United States Patent Application Publication US 2004/0029129 A1 - sequence listing, part 11

SEQ ID NO: 28794 - DNA, 1642 bp, Mycobacterium tuberculosis
  misc_feature (1208)..(1208): n=g, a, t, or c
gccgatccgacctggtttaagcacgccgtcttctacgaggtgctggtccgggcgttcttcgacgccagcgcggacggttccggcgatctgcgtggactcatcgatcgcctcgactacctgcagtggcttggcatcgactgcatctggttgccgccgttctacgactcgccgctgcgcgacggcggttacgacattcgcgacttctacaaggtgctgcccgaattcggcaccgtcgacgatttcgtcgccctggtcgacgccgctcaccggcgaggtatccgcatcatcaccgacctggtgatgaatcacacctcggagtcgcacccctggtttcaggagtcccgccgcgacccagacggaccgtacggtgactattacgtgtggagcgacaccagcgagcgctacaccgacgcccggatcatcttcgtcgacaccgaagagtcgaactggtcattcgatcctgtccgccgacagttctactggcaccgattcttctcccaccaaccggatctgaactacgacaaccccgccgtgcaagaggcgatgatcgacgtcatccgcttttggctcggcttgggcatcgacgggtttcggttggacgcggtgccctatctctttgaacgtgagggcaccaactgcgagaacctgccggaaacacacgcttttctcaagcgagtccgcaaggtggtggacgacgaattccccggccgggtgctgctagccgaagccaatcagtggccgggcgatgtcgtcgaatatttcggtgatcccaacaccggtggcgacgagtgccacatggcctttcacttcccgctgatgccgcgcatcttcatggccgtgcgccgggagtcccgttttccgatctcggagatcatcgcccagaccccaccaatccctgacatggcgcaatgggggatatttctgcgcaaccacgacgagctgacgttagaaatggtcaccgacgaagagcgcgactacatgtacgccgagtacgccaaggatccacggatgaaggcgaatgtcggaatccgtcgtcggcttgcgccgctgctcgacaacgaccgcaaccagatcgagctgttcaccgcgctgctgctgtcgctgcccggctcgccggtcctctactacggcgacgagatcgggatgggcgacgtgatctggttgggtgatcgcgacggcgtgcgcatcccgatgcagtggacaccggnaccgcaacgcgggtttctccaccgccaacccgggtcggctgtacctgccgcccagccaggacccggtttacgggtatcaggccgtcaacgtcgaggcgcaacgcgacacctcgacgtcgctgctcaacttcactcgcaccatgctggccgtgcgtcgccgacaccccgcgtttgcggtcggcgcattccaggaattgggcgggtccaacccgtcggtgctggcctacgtgcgtcaggtggccggcgatgacggcgacaccgtgctctgtgtcaacaacctgtcgcgattcccgcagcccatcgaattggacttgcagcaatggaccaactacacgccggtcgagctgaccgggcacgtggagtttccacgcatcggccaggtgccctatctgctgacgctgccaggacacgggttctactggttccagttgacc

SEQ ID NO: 28795 - DNA, 1039 bp, Mycobacterium tuberculosis
atgaccgagcggaagcgaaatcttcggccagtgcgcgacgtggcaccgcctacgctgcagttccgcaccgtccacggttatcggcgggcattccggatcgccggttccgggccggcgattctgcttatccacgggataggtgacaattccaccacctggaatggggtgcacgccaagctcgcccaacgattcaccgtcatcgctccggatctactgggccacgggcaatccgacaagccgcgtgccgactattcggttgcggcttacgccaagcggcatgcgggacttcctacagcggctcgacatcgagcgggtgaccatcgtgggccattcgctcggcggcggggtagcaatgcaattcgcctaccagttccctcagctagtcgaccgactgatcctggtcaagcgcgggcggtgtcaccaagggacgtcaaacatcgtcttccggttggcctcgttgcccatgggcagcgaggctatggccttgctacggttgccgctggtgctgccggcagtgcaaatcgccgggcggatcgtgggtaaggccatcggtaccaccagcttggggcacgacctgcccaatgtgctgcgcattttggacgacctgccagagccgacggcttctgcggcgttcggccgcaccctgcgggcagtggtggactggcgggggcagatggtcaccatgctggaccgatgctatttgaccgaagccatcccggtacagatcatctggggcacaaaggatgtcgtgctgccagtccgtcacgctcacatggcgcatgccgccatgccgggctcgcaattggagattttcgagggctcgggacatttcccgtttcacgacgaccctgcgcgcttcatcgacatcgtcgaacgcttcatggacaccactgagcccgccgaatacgaccaggccgcgctgcgcgcgttgcttcgccggggtggcggcgaagcaaccgtcaccggctcggcagacacccgtgttgcagtactgaacgccatcgggtccaacgaacgcagcgctacctgatcaccaccg

SEQ ID NO: 28796 - DNA, 1361 bp, Mycobacterium tuberculosis
ccgggctggttctggatcggcggacgcgcggcggcgctgaccgggacgccggcctgggagatgttcaagccgtgggcgatcacctcgatggccattgcggtggccgtcgcgctggtgctgtggtggcggatgaatccgcttcgaatacgccttgctggtcaccgtcgccacagcggcggtgatgctggcctacagctcgccggagccctacgccgcgatgatcacggtgttgttgccgccgatgctcgtactgacctggtcgggcctgggcgcgcgcgaccgtcagggctgggccgcggtggtcggtgccggcgtcttcctgggcttcgcggccacctggtacaccctgttggtcgcctacggcgcgttcacggtggtgctgatggcgctgctgctggccgggtcgcggctgcaatccggaatcaaggcggcggtagacccgctgtgccggcttgccgtcgtcggcgcgatcgcggccgccatcggatccaccacctggctgccctacctgctgcgggcggcccgcgacccggtcagcgacaccggcagcgcccagcactacctacccgcagacggcgccgcactgacctttccccatgctgcagttctccctgctgggcgcgatctgtctgctgggcacgcctgtggctggtgatgcgcgcgcgatcatcggcgccagccggcgccctggccatcggcgtgctggccgtctacctgtggtccctgctgtcgatgctggccacattggcgcgcaccacactgctgtcgtttcgcctgcagccgacgcctgagcgtgctgctggtggcggccggtgcgttcggcttcgtcgaagcggtccaagcccttggcaacgggggggggggggtgtcattcccatggccgccgccattcgggtttgccggggcgatcgcgttcaaccaggacatccccaacgtgttggggccggacctgaccatgggctaaaccgaaaccgaaggtttacggcaacgcggggaaccgggaaccgccccggttccaaaagatacaacccagccatttgatgccgccatccggcgcgtcaccggcaagcgccgcgatcggaccgtcgtgttgaccgccgactacagcttcctgtcgtactacccctactggggctttcaggggttgacgccgcactacgccaacccgctggcacagttcgacaagcgcgccacacagatcgacagctggtcgggactctccaccgccgacgagttcatcgccgcgctggacaagctgccctggcagccgccgaccgtcttcctcatgcgccacggcgcacataacagctacacctgcggcggcccaggacgtcacccaaccagcccttccagcacaaatg

SEQ ID NO: 28797 - DNA, 857 bp, Mycobacterium tuberculosis
atggccttctccgtccagatgccggcactcggtgagagcgtcaccgaggggacggttacccgctggctcaaacaggaaggcgacacggtcgaactcgacgagcccctcgtggaggtgtcgaccgacaaggtcgacaccgaaatcccctcgccggccgcgggtgtgctgaccaagatcatcgcccaggaggatgacacggtcgaggtcggcggcgagctcgctgtcattggcgacgccaaggatgccggcgaggccgcggccccggcacccgagaaagtccctgcggcccaacccgagtccaagccggcacccgaaccaccaccggtccaaccgacgtccggagcgcctgctggtggcgatgccaagccggtgctgatgcccgagctcgggcaatcggtgaccgaggggaccgtcattcgttggctgaagaagatcggggattcggttcaggttgacgagccactcgtgggaggtgtccaacgaacaaggtggacaccaatatcccttccccggtggctggggtcttggtcagtttcagcgccgacgaggacgccacggtgcccgtcggcggcgagttggcccggatcggtgtcgctgccgacatcggcgccgcgcccgcccccaagcccgcacccaagcccgttcccgagccagcgccgacgcctaatgccgaaccctcaccatcgccgccggcgggccatccagccggtggggtcggaggcgcaccggacgtgaacacgtttgttgcagaagctgctttcggaaaacaacatggtatctcgcgggggtgaccgggacccgagatgggtggttgtagccggaagctggatgttttgttcgctgtgtttatagtgatg

SEQ ID NO: 28798 - DNA, 1212 bp, Mycobacterium tuberculosis
atgagcggtgaggacagcatcaggtcttttcccggttgccgaacttcggcgagggactgcaggaagtgaccggtaacgtgttggagcgtcgccgtcggccaacgatgtggagatcaaccagacgctgtgttcggtgaagcaccgccaagcccgaggtcgaaatccccagccctgtatgcggcccggatcgtcgagttaggcggcgccgaaggcgatgtgctcaaagtgggcgcggagctagttcggatcgacaccgggcccacggcagttgcgcagcctaacggtgaaggagcggtccccacgttggtcggcgacggtgccgacgccgcgatcgaaaccagtagacggacaagccggccgctggcggcaccggtagtgcgcaagctggccaaagagttggcggtcgacctggccgcattgcagcgtgggtcgggcgccggcggtgtgatcacccgggccgatgtgctggccgctgctcgaggcggcgtcggagccgggccggacgtgcggccggtccacgggcgtgcacgcgcggatggccgaaaaaatgacgttgtccccacaaggagattccgaccgcaaaggccagcgttgaggtaatttgcgccgaactgctgcggctgcgcgaccggttcgtttcggcggcgcccgagattacaccgttcgcgctgacgctgcggctgctggttattgcattgaaacacaacgtaattctcaactcgacgtgggtcgactcgggcgaaggcccgcaagtacacgtgcatcgcggtgtgcatctggggttcggcgcggccactgagcgtggattgctggtgccggtggtgaccgacgcccaggacaagaacacccgcgaacttgcctcccgcgtagcggaattaaatcaccggcgcacgtgaaggcactctcacacccgcggagctgcgcggttcgacgttcacggtgtcgaacttcggggcgctgggagtcgacgacggcgtgccggtgatcaaccatcccgaagcggcgatcctgggtctgggggcgatcaagccgcgcccggtggtcgtcggcggcgaggttgtcgcacggccgacgatgacgttgacttgtgtgttcgaccaccgcgttgtcgatggtgctcaggtggcccagttcatgtgtgagctgcgggatctgatcgagtcgccggagaccgcgctgttggatctgtagccgggcgggctggcagctttg

SEQ ID NO: 28799 - DNA, 1476 bp, Mycobacterium tuberculosis
cgtaccgctcgggctattccacgggcactggccgtcgcgatcgtccttggcaccggggtggcgtgaagcagtgtccggtcgtcgaaagacggcatcttccacatgtcggcgccctcgctggggcacggcggcgacgacggcgcgatcgacattttgctggtcggcctggacagccgtaccgacgcgcacggcaacccgttgagcgccgaggaattggcgacagttgcacccgccggcgacgagggaagccaccaacaccgacaccatcatcctgatccgggtacccaacaacggaaagtcggcgaccgcaatctctataccgcgggactcctacgtcgcggctcccggtctgggtaagaccaagatcaacggcgtctacgggcaaaccagagagaccaagcgggccggcctggtccaagccggtgcctcgccgaccgaagcggccgccgccggcaccgaggccgggcgtgaggcgttgatcaagacggtcgccgatctgaccggcgtcaccgtcgaccactacgccgagatcgggctgctcggtttcgcgttgatcgccgacgcactcggcggcgtcgacgtctgcctcaaagagcctgtatacgaaccactttcgggtgccgattttccagccgggcggcaaaagctcaacggtccgcaagcgctcagcttcgttcgccagcggcatgatctgccccgcggcgacctggaccgggtggtacgtcagcaggcggtgatggcggcgttggcccaccgggtcatctccggacagacgctatccagccccgccacgctgaagcggttggagcaggccgtggcagcgctcggtggtgctgtcctccgggtgggacatcatggatttcgtccgccaattgcagaagctggccggcggtaacgttgccttcgccaccatcccggtgctcgacggcgccggctggagcgacgacggcatgcaaagcgtggtgcgggtggatccgcgtcaggtgcaggactgggtcgttcgcctgctgcacgagcaggaccaaggcaagaccgacgagctggcctacacacccgccaagaccacggccaacgtggtcaacgacaccgatatcaacgggcttgcggcagcggtgtcaaaggtgttgagctccaaggggtttaccaccggatccgtcggcaacaacgacggcgaccacgtgcctggcagccaggtgcgggccgcaaaggccgacgacctgggcgcacagcaggtcgccaaggaactgggcgggttgccggtggtcgccgatgcgtcaatcgcgcctgggtcggtgcgggtggtgctggccaacgactacagcggtccgggctccgggctggggggtagtgatccgaacggcgtcgtatcgccggcccgcgcgttcaacctcgggtccgccgacgacacgactcccccgccgtcgccaatccttaccgccgggctccgacgcgccggagtgcatcaactgaccacac

SEQ ID NO: 28800 - DNA, 760 bp, Mycobacterium tuberculosis
cggggcgacattttggggcaccgtcaagaacctgcaggtactggtcgacgcgctatcgaagagcgacgagcagattgtgcagttcgccggccacgtggcttcgtgtcgcaggtgctcgccgacagctcggccattctggaccagacccctgggcacgctcaaccaggcgctgtccgacatcagggggttcttgcgcgagaacaactcgacgctgatcgaaacggtgaatcagctcaacgactttgcgcagacgttgagtgaccagagcgagaacatcgagcaagtgctgcacgtggctgggccggggatcaccaacttctacaacatctatgaccctgcgcaaggcaccctcaacggtctgttgtcgatacccaacttcgctaacccggtgcagttcatctgcggcggttccttcgataccgccgcgggcccgtcggcgccggactactaccggcgcgccgagatctgccgtgagcggctggggccggtgctgcgccggctcacggtgaattacccgccgatcatgttccacccgcttaacacgatcacggcgtacaagggccagatcatctacgacaccccggccaccgaggcccaagtcggagacgccggttccggaattgacttgggtacccgcgggaggaggagcgcctgtgggcaaccccgcggatctgcagagcctactcgtcccaccggcgcccggtccggcaccggccccgccggcgccgggggcaggaccgggcgagcatgggggcggcgg

SEQ ID NO: 28801 - DNA, 194 bp, Mycobacterium tuberculosis
cctttcgataagaagttgagtgtgcagaacaacggtatcaagccgtgtggcggtgatcagcgacgggtgtcgatctcgcaggtgccgagaagtttggggtgtcgcggcagacgctgcatacctggttggcccgctatgaggccgaggccctcgatggcttaaggatcggtaccggaacagcctataagcgagcg

SEQ ID NO: 28802 - DNA, 776 bp, Mycobacterium tuberculosis
aaaggatttcccctggaattttgcccttggggccgggttttggcaaaaattgggttttttccaaagaatgcgaccaggtgcgcccaaggggaaatctgtactgccgttggccatcggtcccgggaccgtttccagtattgttgctcgctgtggtcgggcgtcgcgatatcgcggaccaagtttggtgtggcccactctcccgcatggggacgggtcgaaaatccgtgggcggttgccaaccgaccacccgcagcgagttctcgaatacattaattcggtcgtgtcgagaagccatgcagaattacccaccgaattggggtgtgccgaagcatgtgacccccgtggtttaaccctcgactggaattacctctgcaaagctggtggccgtggttggcttccgcgccatattcggtgcattcctcctcgggttgctgttcttcgttgccacgacatcgatgatccgctatgtctccgccgtgccggtcagaaccttctttgccgaactgcgcggcaatctggcgttgccggtgctggcatcggcattgctggttccgctgttcatcaccgctgtcgactggactcgctggtgggtgatgatcacacttcgacgtggccattgtctacatcttgtacgcgatcgacaaccggaagatcgagccaccgccgtcgaggagaaacgtgcaggtcttcgtctgcgttgtggtggtgctgggcggtgataccgacccgggtccgccaacaacatcggcagatgaggcaccccgcgggaccacccg

SEQ ID NO: 28803 - DNA, 570 bp, Mycobacterium tuberculosis
tggaaagaagtgcacctgttctggggcgacgaacgctacggttcccgaagacgatgacgagcgcaatctcaagcaggcccggcgggcgttgctcaatcacgtcgacattccatcgaaccaggtgcacccgatggccgccagtgatggtgacttcggcggcgatctggacgccgcggccctggcctacgaacaggtgctggcccgccagtgccgcacagggtgacccggcgccgaatttcgacgtccacctgctgggcatggggcccgagggccacattaactcgctgttcccgcacagccccgccgtctcgagagccacccgcatggtggtggcggtcgacgactcgccggaaccgcccgccacgccgaatcaccttgaccctgccggcgattcagcgttcccgcgaggtgtggctgctggtttccgggccgggtaaggccgacgccgtggccgcggccatcggcggcgccgatccggtttcggtaccggcggccggggccgtcgggcgtcagaacacgctctggctgctggaccgcgacgccgccgccaagcttccgagttaaccgcgt

SEQ ID NO: 28804 - DNA, 906 bp, Mycobacterium tuberculosis
gtgagtccgcgcccgggacctgccgggcgaggtcccgcgccttgtcggtgtgcagacctacactcgctttgcgttgacagccacgcactcaggagggatgggatgcgattcctgcacactgccgactggcagctcggcatgacgcgtcactttctcgccggtgacgcccagccgcgatattctgctgcccgccgtgacgcagtcgctggactaaaagcgctggccgccgatgtgggcgccgaattcgtcgtagtcgccggtgacgtcttcgaacacaatcagctcgcgccacagatagtcggtcaatccttggaagcccatgcgcgtgatcggccttccggtctatctgctgccgggtaaccatgacccgctggacgcttcgtcggtgtacaccagcacgctgtttcgagccgaacggccggacaacgttgtggtgctcgaccgagctggcgtccacgaggtccggccgggagtccagatcgtcgcggcgccgtggcggtccaaggcgcccaccaccgacccggttgccgaggtgcttggcgggcctgcccacagacgccgctattcggctgctcgtcgcccatgggggtgtcgacgcgctggaccccgaaacacgaacaaaccgtcgctgtcagggctcgccgcactcgacgacgcgctgactcgacaggcgattcattatgtggcccctaagtgacaaacattcgcttacccaggttcgcagcagcgggcgggttctggtactccggtgccccgggaagtacccaccttcgacgacgttgaaccggaccccgggtacggtcctaatggttcgaattgaacgaaagcgaacccggaaattcccgttaacggttgaaggcccgtcgcattggccggtggggcggttcgttacctttgcacccacca

SEQ ID NO: 28805 - DNA, 1563 bp, Mycobacterium tuberculosis
gccgcatgctgttgatctggggccgcgctcgccgccgtgggcggttggttcttgtgggctgcatccgcgtggtcgggggacgcgctcgtatggcggagccgaagctgggccagccggtggagtggacaccgtgcccggtcgtcaaacccgcaagtaaagatcccccgccggcgcgttatgcggcaagctcgctgtaccggtcgactacgaccgcccccgatggtgacgtggcggcgctggcgctgattcgctttccggcgacgggagacaagatcggttcgctggtcataaatcccggtggacccggcgaatccggtatcgaggccgccttgggcgtcttccagacattgccgaagcgggtgcacgaaaggttcgacctggttgggttcgacccccgcggggtggcgtcgtcccggccggcgatctggtgcaactccgatgccgacaacgaccggctgcgggccgagccgcaggttgactacagcccggagggtgtggcgcacatcgagaacgagaccaagcaattcgtcggtcgctgtgtggacaagatgggccaagaccttctgggcccatgtcgggacggtcaacgtcgccaaggacctggatgccattcgcgccgcgttggggcgacgaacaagctgaccctacctgggctactcgtaccggcacccggatcggctccgcgtatgcccgaggaatttccgcagcgggtgcgggcaatgattctcgacggtgccgtcgaccccaatgccgatcccatcgaggcggagctgcgccaggccaagggcttccaggacgcgttcaacaactatgccgccgactgcgccaagaacgcgggctgcccgctgggcgccgacccggccaaagccgtcgaggtctaccacagcctggtcgatccgttggtcgacccggacaacccgaggatcagcaggccggcgcgcacgaaggatccgcgcgggctgagttatagcgacgccatcgtgggcaccattatggcgctgtcctcaccgaatttgtggcacccctttaccgaggggctgtgggagctgttcgacattcgcggagacaccctgctggttctggccgacatgtacatgcgtcgggactcgcacggccgttacaacaattccggtgacgcgcgggtggcgatcaattgcgtcgatcagcccccggttaccgatcgcgacaaggtcatcgacgaagaccgccgcgcccgggagatcgcaccgttcatgagctacgggaagttcaccggtgatgcgccgctgggcacctgcgcgttctggccggtgccacccacaagtcagccccatgccgtctcggcgcccggcctagtgccgacggtggtggtatccaccaacccatgacccggcgacgccgtacaaggccggggtcgacctggcgaaccagcttcgcggttcgttgctgaccttcgacggaacccagcacacggtggtattccagggcgacagctgcattgacgagtacgtgacggcgtatttaggtggtggcacaacaccgcccagaggcgccaagggctagcggcgctaacaatcgaaggtg

SEQ ID NO: 28806 - DNA, 1233 bp, Mycobacterium tuberculosis; identical to SEQ ID NO: 26402

SEQ ID NO: 28807 - DNA, 654 bp, Mycobacterium tuberculosis
gtgggccgtcaacgtgatgttgtcgtctccggccggccccgtgcgtataccccgcagcgtgatgtcgttgctgctggtgcgctgcacgatatgggcacgtacataggtctctgctttgggccgacaaatcacccgtacctggtagggctgcagcccttcgtcttcgacggcgttgtcgcggtcgaccagccggccaagtgggcgccccaggagatggacagcgacgatggttccggtgccaatcagggtgaacaccagatgcccggaggcggccagcactccgaccgcggccgagcaccaaagcgtggcagccgtgttcagaccgcggacgttgaacccctcccgcaggatgaccccgccgcccaggaatccaattccagaaaccacgtaggacgccactcgggtggggctgctgtcctcggtggcgaccgcgtacagcacgaacaaggtagcaccggtcgccaccagaatgttggtgcgcaacccagccatccgcgcccgccactggcgctcgagcccgataatggccccgcaacccactccgacggccagccggagagcgaaatcggcgacagtcagcgtttgcatgacgccgagtccttcccgatcgcaagacggccacggcagccaaccacgcgcaggttaacagcagtt

SEQ ID NO: 28808 - DNA, 489 bp, Mycobacterium tuberculosis
gtgctggccagcccagtgctctccgccgacggatcgacggtttacgtcaatgggcgcgaccaccggctatgggcactcaacgcccccgacgggaaagcgaagtggtcagctcccctgggctttctggcgcagacgccgcccgcactgaccccacatggactgatcgtgtccggcgggggccccgacaccgcgctggcggcgttccgggatgccggtgatcacgccgagggggcctggcgacgcgacgacgttactgcgctgtcgaccgcgagtctggccggcaccggcgtcggctatacggtcatcagcggtccaaaccacgatggcacgcccggtttgtcgttgctggtcttcgatccggccaacggccacacggtcaacagctatccgctacccggagcgaccggatatcccgtcggtgtatcggtcggcaacgaccgccgcgtggtgaccgccaccagcgacggccaggtctacagcttcgcacct

SEQ ID NO: 28809 - DNA, 669 bp, Mycobacterium tuberculosis; identical to SEQ ID NO: 26626

SEQ ID NO: 28810 - DNA, 1230 bp, Mycobacterium tuberculosis
ttgaatggcgctgatggtgctgcggcgtccgggatctccccaattcccttgccagacaccactggtcagcggttgaaccggatcgaccgtgcgggcccatcggaacacttgggggaggagctccgcgacgcgctcgagcttgtctttcctttccaccttgcgatacacgcgcgcgggattgtcgggttcattccacaggtcccaacccaacacgcgatcgtcgttgcggaattggcccaacacacccgtgacgtagttgtacagcgtgctggcatagcggcggtcatcgaggcgttcagcacccggactttgcacccacccggagttgtgcaccccagcccttggcgcccgctgccgacccggtctggggagcgggtcccagcaggagtcgaacaggacaaagagcggtttgatgtggtatcgcgccgcgatggcgacgaactgcgcgagccgggtttggaaaccgggcgcgtcttgggcccacagcaggtcgtggaggaagactcgcacggtgttgaacccgtgaaaccgcgcaaggcccagctcgttgtcgatgcgccggggatcgtatgtgcctggctggaacatctcgagctggttgatggcgttcgaggtgatgtagtttgcaccgacgagccagccgtgcgcttgataccagcgatgtgcgccgtcggccgaccaccggcctggttcttcggcgggcggcccgcggcgcttggcccaacaccgtgcctgccgccagcagcagcggggagcttcagggcccgttcgacggtgcacaaaatgacaatagtttcccgggccaggggtacgggccttgtcggcgacgtgggtcgggctggcattatcgattcgcaacaatttgaggttgggaatcgttatgaggacgccagcttggctttaaagcccggccccggttcaggtgtcacattgcgcgccggtgatcttcttgccgcagtgggtacagatcaggcctgggtcggcgtgctcgccccaagtgttggtggcgcaactgattcggtgggtccttctgggcgtggcaagtactcatccccccactgcatgaggacgacgatcgcggcgaacagatcgcggcccgcttcggtgagccggtactcgtgtcgctcggggtcggaggaatatggcacccggtcaaaaagacccacctcgacgagcatccgcagccgcgaggacagcgtgggccgcggaatgccaaggttccgcgcgagc

SEQ ID NO: 28811 - DNA, 1545 bp, Mycobacterium tuberculosis
gtgccggatctcctcgagtttgcggcccttggtctccggcgcaaagcggtacacgaccacgaacgcgacgacggcgaacgtgccgaagaccgcgaaaacgcctgcgccgccgagcacacgcagcatggtgagcgagaaggcggcaacgatcgcgttggccgtcagtgtcgaggtgagcatcaggctcgatcccatcgaccgcagccgggacgggaagctctccgcggcgtacacccagaccagcgagccgaatccgaagttgaacccgatgatgaacagcagcacgccggcgaaccccaacaccagccccgtgccaccatcggagtcgttggcgaatacggtgatcagcacggcatctgcggtgatcatcgtcgcgatgccggacaacaggatcgggcgacggcccagccgatcgaccagaaacagcgaggcacacaccgccgccaagccggcgacttgcaccatcgcgggcagggcaagcatcgcgaaatagcccgcgaagcccatggcggcgaaaagtcgcggactgtagtagatgatcgcgttgatcccggtgatctggacgaggaagccgagcgcgatgacgaacagcgtggcccgcagatacggccgccgcaccatttcgccgataccgccgccgcgttcgtcgaccgcggccgccatatcggccagctcggcatcgatgtcggcctccggctggatccgccgcagcgcgctacgcgcgtcggcgatccggcccttgagcagataccagcgggcggtatcgggcatgcgccacaacaacggcaacagcagcgtggccggcgcggcggccagcccgaacatcgcgcgccagccgtgcgatccggccaacaggtagccgaccaggtaaccgacgacgatgccgctaagcgtcgccagctgatacgcggtcaccaacgacccacgcaccgccgccggcgccgactcggccacatacaccggcaccaccaccaccgacaggccgattgtcacacccagcagcagacgcgccaccaccagcatcggtacggacaccgaggtcgcgccgagcagggcgaacactgcgtagccggcgacgatgagcaccaccgatttcttgcgtccgatcgcgttggcgaggatgccgccgccaagcgccccggcgatctggccgagcaccgccgtggtggtcagcaactcctgttctcgagtggtgagttcgaattcctcgctgagagacagcaacgcacccgcgatggcggaaaggtcgtacccgtagaggacgccgacgctggcggcggtgagcccgacgaggagcgcccggcgccccgatctggtcagttgaccggtaccggggcgctcagcacgtccaccacgcggtcggggtcgtcgggcgccccggcgggcgtgaaccccgcgtcctggtatagggctgtagtcatttcgatgaggctgccacagcgtcgtcacgcggtcaaccgctggtcaagccccgatttcggtgccgaccaaggccggctaggatgcccgcccgcaaacgacgccgaaggtatcggggtaagcagc

SEQ ID NO: 28812 - DNA, 465 bp, Mycobacterium tuberculosis; identical to SEQ ID NO: 26137

SEQ ID NO: 28813 - DNA, 1062 bp, Neisseria gonorrhoeae
atgaaagcagcacgtttttacaacaaaggcgacatccgcatcgaagacatccccgaaccgaccgtcgcccccggcaccgtcggcatcaatgtcgcctggtgcggcatctgcggtaccgacctgcacgaatttatggaaggcccgattttcatcccgccctgcggtcatccgcatccgatttccggcgagtccgcgcccgtaacgatgggacacgagttctccggcgtggtttatgccgtcggcgaaggcgtggacgacattaaagtcggccaacacgtcgtggtcgaaccctacatcatccgcgacgacgtaccgaccggcgaaggcagcaactaccacctctccaaagacatgaactttatcggcttgggcggctgcggcggcggcctgtccgaaaaaatcgccgtcaaacgccgttgggtgcatccgatttccgacaaaatcccgttggatcaagctgctttgattgaacctctgtctgtcggacaccacgcctatgtacgcagcggcgcgaaagcaggcgatgtcgcattggtcggcggcgcaggcccgatcggtttgctgttggccgccgtgttgaaagccaaaggcatcaaagtcatcattaccgagttgagtaaagcacgcaaagacaaagcccgcgaatccggcgttgccgactacatcctcgacccgtccgaagtcgatgttgttgaagaagtgaaaaaactgaccaacggcgaaggcgtggacgtggcgttcgaatgtaccagcgtgaacaaagtgttggatactttggtcgaagcctgcaaacccgccgccaacttggttatcgtatccatctggagccaccccgccaccgtcaacgtccacagcgtcgtgatgaaagaactggatgtgcgcggcacgattgcctactgcaacgaccacgcggaaaccatcaaactggtcgaagaaggcaaaatcaacctcgaacccttcatcacccagcgcatcaagctggacaaactggtttccgaaggcttcgagcgtctgatccacaacaacgaatccgccgttaaaattattgtgaatccaaacctg

SEQ ID NO: 28814 - DNA, 741 bp, Neisseria gonorrhoeae
atgctcatcatccgcaacctgatttactggctgatactctgttccagcctgattttcctctttccctttatgctgctcgcctcgcctttccgggacggggcgcacaagatggcgcgggtctgggtcggcatcctcaactggtcgctcaaacacatcgtcgggctcaaataccgcatcatcggcgcggaacacattccggaccgcccctccgtcatctgcgccaaacaccaaagcggctgggaaacgctcgcgctccaagagatttttccgccgcaggtttacgttgccaagcgcgagttgttcaaaatcccctttttcggctggggcttgaaactggtcaaaaccataggcatagaccgcaacaaccgccgcgaagccaacgaacagctcataaaacagggtttggcgcgcaaaaacgaaggttattggattaccattttccccgaaggcacgcgccttgcgcccggaaaacgcggcaaatacaaactcggcggcgcgcgcatggcgaaaatgtttgagatggacatcgtccccgtcgccctcaacagcggcgaattttggccgaaaaattcctttctgaaatatccgggggaaatcaccgtcatcatctgtccgaccatcccgcacgcaagcggcagcgaagccgaattgatggaaaaatgcgaacacctcattgaaacgcaacaaccgcttatttccggcgcaggcccgtttgccgccgaaatgccgtctgaaaccgca

SEQ ID NO: 28815 - DNA, 1392 bp, Neisseria gonorrhoeae
  misc_feature (1369)..(1369): n=g, a, t, or c
atgaccgtcaaaacccgtttcgcccccagccccaccggttacctgcacatcggcggcgttcgcaccgccttgttttcgtgggcgtttgcccgccatcataaaggcgaatttttattgcgtatcgaagacaccgacttggcacgttccaccgccgaatccgtcaacatcatccttgacggcatgaaatgggtcggtctcgattacgacaacgccgacaacgtggtgtaccaaacccgccgtttcgaccgttataaagaagtcattgccgaactcttggcaaaaggcgatgcctactactgctattgcagcaaagaagaattggaagcgatgcgcgagaaagccgaaaaagaaggcacggcgacttacgaccgccgctggcggccggaagcaggcaaaaccctgcccgaaattcctgcaggcgtgcaacccgtcgtccgcttcaaaacgcctttggacggcgttaccaaatggacagacttggtcaaaggcgaaatctccatccccaacgaagccctagacgacctgattattgcccgcgccgacggtacgccgacctacaacttctgcgccgtggtagacgactacgacatgggcgttacccacattatccgcggggacgaccatgtgaacaacaccccgaaacaaatcaacatcttgaaagccatcggcgcgaacctgcccgaatacgggcatctgccgatgattctcaacgaacaaggcaaaaaaatctccaaacgcagcggcgataccgtcgccattaccgatttcggcgcaatgggcattctgcccgaagcgatgctcaactatttggcgcgtttgggctgggcgcacggcgacgatgagtttttcacgacggaacaattcatcgaatggtttgatttgaaagacgtttccccgtccccaagccgtatggatttgaaaaagctctattggatcaacggcgaacacatcaaaatcacacccgacggcaaacttaccgaactcgtcaaaccgcgccttgcgctgcgcgatattcatgaaaccgaaaaacctgcgttggaagacgtgttggcactggtcaaagaccgcgcccaagatttgaacgccttggcagacgaatgcctgtatttctacaaaaaacaagtccctgccgaagccgatgttgccaaacactgggacgacgaagccgccgcccgtatgctgcgcttcgccgaacgcctcgaagggctggaagactggaacgccaaagccattcacgacctcttcaaacctttctgcgacgaagaaggcatcaaaatgggcaaactcggtatgcccctgcgccttgctgtctgcggtacggcaaaaaccccgagcgtcgatgccgtgttggcattaatcagcaaagagnaagtgttgaaacgcatccgtgct

SEQ ID NO: 28816 - DNA, 2568 bp, Neisseria gonorrhoeae
atgatgcagcaatacctcggcataaaagcgcaacataccgacaaactagtgttttaccgtatgggtgatttttacgagctgtttttggatgacgcggtggaagcggcgaaattgttggacatcaccctgaccacacgcgggcagatggacggcgtgccgattaaaatggcaggcgttccgtttcacgcggcggaacagtatctggcgcgcctggtcaagttgggcaaaagcgtggcgatttgcgaacaggtcggcgaagtcggcgcgggcaaagggccggtggagcgcaaagtcgtgcgcatcgtaacgcccggcacgctaaccgattccgcattactggaagacaaggaaaccaaccgcatcgttgccgtgtctcccgacaaaaaatacatcggtttggcgtgggcatcgctgcaaagcggcgaattcaaaaccaagctgacaactgcggataaattgaacgacgaactggcgcgcctgcaggcggcggaaattttgctgccggacagtaaaaacgcaccgcaacttcagacggcatcgggtgttacacgcctgaacgcgtggcagtttgccgccgacgcgggggaaaaactgctgacggaatatttcggctgccaagatttgcgcggcttcggtttggacagcaaagaacacgccgtttcgattggcgcggcaggtgcgctgttgaactatatccgcctgacgcaaaacctgatgccgcaacatttggacggcctgtcgctcgaaaccgacagccaatatatcggcatggatgccgccacgcgccgcaatctcgaaatcacgcaaaccctctccggcaaaaaaacgccgaccctgttttccatactcgacggctgcgccacccacatgggcagccgcctgttggcattgtggctgcaccaccctttacgcaaccgcgcccacatccgagcgcgccaagaagccgtaaccgcgctggaaagccaatacgaacccctccaatgccatctgaagagcattgccgacatcgaacgtatcgccgcccgcatcgccgtcggcaatgcccgcccgcgcgatttggcatctttacgcgacagtctgttcgagttggcacaaatcgacttgtccgcaaccggcagcagcctgttggaaacccttaaagccgttttccccgaaaccctgcccgttgccgaaaccctcaaagccgccgtgatgcccgaaccttccgtctggctgaaagacggcaatgtcatcaaccacggttttcatcccgaactggacgaattgcgccgcattcaaaaccatggcgacgaatttttgctggatttggaagccaaggaacgcgaacgtaccggtttgtccacactcaaagtcgagttcaaccgcgttcacggcttttacattgaattgtccaaaacccaagccgaacaagcacctgccgactaccaacgccggcaaaccctcaaaaacgccgaacgcttcatcacgccggaactgaaagcctttgaagacaaagtgctgactgctcaagaccaagccctcgccttagaaaaacaactctttgacggcgtattgaaaaaccttcggacggcattgccgcagcttcaaaaagccgccaaagccgccgccgcgctggacgtgttatccacattttcagccttggcaaaagagcggaactttgtccgtcccgagtttgccgactatccggttgtccacatcgaaaacggccgccatcccgttgtcgaacagcaggtacgccacttcacagccaaccacaccgacctcgaccacaaacaccgcctcatgctgctcaccggccccaatatgggcggcaaatccacctatatgcgccaagtcgcgctgattgttttattggcacacaccggctgtttcgtgcctgccgatgccgccacaatcgggcctgtcgatcaaatcttcacccgcatcggcgcatcggacgacctcgcctccaaccgctccaccttcatggtcgaaatgagcgaaaccgcctacatcctgcatcacgccaccgaacaaagcattgttttaatggacgaagtcggacgtggtacttccactttcgacggcctcgccctcgcgcacgcaatcgccgaacacctgctgcaaaaaaacaaatccttcagcctgtttgccacccactatttcgagctgacctacctgcccgaagcccacgccgccgccgtcaatatgcacctttccgcgctcgaacagggacgggacatcgtgttcctgcaccaaatccaacccggtcccgccggaaaaagctacggcatcgccgtcgccaaactcgccggcctgcctgtgcgcgcattgaaagccgcccaaaagcatttgaacggactggaaaaccaagccgccgcaaaccgtccccaactggatattttcagtaccatgccgtctgaaaaaggagatgaaccgaatgtggactgctttgtggataaagcagaggaaaaacattttgaaggtatattggcagcagccctggaaaacctcgatcccgacagcctgaccccgcgcgaagcattgtcagaactgtaccgtctgaaagatttgtgcaaatccgtatct

SEQ ID NO: 28817 - DNA, 1071 bp, Neisseria gonorrhoeae
gtggaatgtagttttatttcagaatacaatacaggcatcggactttatttcacaaccgggagacaaaatatgagcatcaaagtagcgattaacggtttcggccgcatcggccgcctcgcattgcgtcaaattgaaaaagcccacggcatcgaagtcgccgccgtcaacgacctgacccctgccgaaatgctgctgcaccttttcaaatacgacagcacacaaggccgtttccaaggtactgccgaattaaaagacgatgccatcgtggtaaacggcagagaaatcaaagttttcgccaatccgaatcccgaagaattgccttggggcgagttgggtgtggatgtcgtcctcgaatgtaccggtttctttaccaacaaaaccaaagccgaagcacatatccgtgccggcgcgcgcaaagtcgtgatttctgcacccggcggcaatgatgtgaaaaccgtcgtatatggcgtaaaccaagacatcttggacggtagcgaaactgtcatttccgccgcttcctgtaccaccaactgccttgccccgatggcggcagtcctgcaaaaagagttcggcgtagtcgaaggcctgatgaccaccatccacgcctacaccggcgaccaaaacacccttgacgcgccgcaccgcaaaggcgatttgcgccgcgcccgcgccgccgcgctcaacatcgtgcccaacagcaccggcgccgccaaagccatcggtctggttatccccgaattgaacggcaaactcgacggctccgcccaacgcgtccctgttgccaccggctcgctgaccgaattggtttccgtcctcgaacgccctgcaaccaaagaagaaatcaacgccgcgatgaaagccgcctccagcgaatcttacggctacaacgaagatcaaatcgtttcttccgacgttgtcggcatcgaatacggctcgctctttgacgcaacccaaacccgcgtgatgaccgtgggcggcaaacaactggtgaaaaccgttgcctggtacgacaacgaaatgtcctacacctgccaactcgtccgtactttggaatacttcgcaggcaaaatc

SEQ ID NO: 28818 - DNA, 678 bp, Neisseria gonorrhoeae
atgacttataccattacccccatcggcaccgcccgctcgccctacaaacagaaattcggcatcgcccgccagcccggtttggtctccgccgcagaagcctgcatcgagctgaatcccgaatttaccgcagacagcgtgcgcgggttggaagatttcgattatgtgtggataagttttatcttccacggcgtattggatgaaggttgggcgcaaatggtgcgcccgccacggctcggcggcaaacaaaaaatgggcgtgttcgccacgcgcagcccccaccgccccaaccatctcggactctctctccttaaactcgaacgcatcgaaaccggcaaacccgtccgcctctattgcagcggctcagacctgctggacggcacgccgattgtggacatcaagccttatatcccctttatcgaatccaaacccgatgccgcatccggtttcgtcagcggcaaacccgtagagttggaagtcgtttggcaggaaaacatcggcgcggaaaatttatctgcaaacaccaaaaaccttatcagccaaagcattgcccaagatccgcgccccgcctatcagaatattcccgaacggatttatgtgatgaatattgcggattacgaagtcaggtttcaaatcgaggaaaaccgcgcgacggttattaatctttccccaaccccgctt

SEQ ID NO: 28819 - DNA, 591 bp, Neisseria gonorrhoeae
atgaaaattgcaaacagcatcaccgaattgatcggcaacacgcctttggtcaaactgaaccgtttgaccaaaggtttgaaggcagaggttgccgtgaaactggaattttttaatccgggcagcagcgtcaaagaccgcattgccgaagcaatgatcgaggccgccgaaaaagcgggaaaaatcaacaaaaacaccgtcattgtcgaagcaaccagcggcaatacgggtatcggtttggcaatggtatgtgccgcacgcggctacaaactggcgattaccatgccggaaagcatgagcaaagagcgcaaaatgctgttgcgcacgtttggcgcggaactgattctaacccccgccgccgaaggtatggcgggcgcgattgccaaagcgcaatccttggtggacgctcatccagacacttattttatgccgcgccagttcgacaatgaggcaaatcccgaagtccaccgcaaaacaaccgccgaggaaatttggaacgataccgacggtgaagtcgatgtcttcgttgccggcgtcggcacgggcggtacgattaccggcgtgggcgaagtgttgaaaaaatacaaaccaaat

SEQ ID NO: 28820 - DNA, 864 bp, Neisseria gonorrhoeae
atgatgaaaaccttactgccctttttcggcgtggcgcgcgtcagcggcgaagaccgccaaaccttcctgcacggacagctttccaacgacatcaataatcttcagaccgggcaggcgtgttacgcgacttacaacacgcccaaaggccgcgtcatcgccaatatgattgtcgtcaaccgtggagacgatttgctgctgattatggcgcaagatttgcttgaagcaacggtcaaacgcctgcagatgtttgtgttgcgcgccaaagccgtttttgaaatccttgaagattacgccgtcggcgcggaattggcagcatccgccgaaccgcttgccgcgcaagaacccagtctcgcctttacctccgaatgcgtctcagacggcatctgttccgtcatcctgcaccatcggggcattttgcacatcgcccccgaaaccgccctacccccttatgacgctgccgccgaaaacgcgtggcggctgcacgaaatccgcagcggttatccgtggatatgcgcggctaccaaagaaaccgccgtcgcccaaatgctcaaccagcacatcatcggcggcgtacacttcaaaaaaggctgctacccgggacaggaaatcatcgcgcgcgcccagtatcgggggcaggtcaaacgcggcttggcggtattgtcgggaaattcggcagccgaagcgggcatcctgctgacggcggacggcgaagaagccggcatcgtactcgacagcgttcaagattcggaaaactttaccgcccttgccgtgattaaattctccgccgcgcaaaaagaactcaccgtcccaaacggcggtatcttcaaagcggttcatctcttctttaaaaccaaaaatgcagaa

SEQ ID NO: 28821 - DNA, 1017 bp, Neisseria gonorrhoeae
atgaacacaatgctaatgtcgggcgcggctgccgcgctgcttgccggcatcatcctttatttcaaaagcgacaagaaacggcaggaaaacggtgaatggagttccggcctcgaatacgcctatatcctgacggcggtcggtgtgtttgccgctttgtccctgtttatgagctttaccgccgttttcctgattttcgttgtattgtgcggtacggcttggggggtatataaataccgcctgaagactcatcccgaaatctcggaaagcagccacttcggcgattatttcggcagtttcttccctaccgttttggtattgttcctcatccggtcgtttattgccgaaccgttccaaatcccgtccagctcgatgcgcccgggattaatcaagggcgatttcattttggtcggcaaattttcctacggcctgcgcgtacccgttttaaacaatgtattcatccccacgggcaaaatcgaacggggcgatgtcgttgtttttaactatcctttgcagccggagatgacctacatcaagcgtattgtcggcatcccgggcgacattgtcgaatatcgagataaagttttgacggtaaacggaaaaccggcttccgacattcctgacggcacataccgttatcctgacgataccgacccatccgaaatccacaacacggatatgttccgcagcggtctggacggcaaatccttcaatattctgaaaaaagaaggacagcctgccgtttccctgcccgtattgggcaaatatacctccgatattatgtctgaaaacggatattccatagatcaaagcggtctgaaccattgccaatatgccgacgacggcagcggtttcgtgtgcaaagttcccgaaggacgctatttcgctatgggcgacaaccgcgacaacagtgccgattcgcgctactggggctttgtggatgacaagctggttgtcggcaaggcaatgttcattttgatgaacttcggcgatttcggcagggccggcacggcaatccgt

SEQ ID NO: 28822 - DNA, 699 bp, Neisseria gonorrhoeae
atgtctttgaaaacagtagccgttatcggcgcgatggaacaggaaatcgagcttttgcgcgagatgatggaaaatgtcaaagccgtctctttcggcagattttccgcctatgaaggcgaattggcgggaaaacgcatagtgcttgcattgagcggcatcggcaaggtcaacgcggcggttgcaacggcttggcttatccgtcaattcgcaccggactgcgtcatcaacaccggcagcgcaggcggtttgggcaagggtttgaaagtcggcgacgtggtgatcggcacggaaaccgagcaccacgatgtcgatgtaaccgcattcggctatgcccgggggcaagtgccgcaactgccggcaaggttcgcttcagacggcatattgattgaaacggcaaaacgggcggcgcggacgtttgaaggcgcggaggtagaacaaggcctgattgtcagcggcgaccgcttcgtccacagcagcgaaggcgtggcggaaatccgcaagcacttccccgaagtcaaagcagtggaaatggaagcggcggcgattgcccaaacctgtcatcagttggaaacgccgttcgtcatcatccgcgctgtttccgattcggcggacgaaaaggcagacatcagctttgaagagtttttgaaaacggcggcggcaagttctgcaaaaatggtggcagaaatcgtcaaatcttta

SEQ ID NO: 28823 - DNA, 975 bp, Neisseria gonorrhoeae
atgatttatccgtggcatcaggaacaatggcggcagattgccgagcattggacgagccgtcctaatgcgtggctgtttgttggcaaaaaggggacggggaagactgcgtttgcccgctttgcggcgaaggcgctgttgtgcgaaacccctgcaccgggctgcaaaccctgtggcgaatgtatgtcctgccatctgtttggacggggaagccatcccgatttttacgaaatcacgcctctggcggacgaacccgaaaacggacgcaaactgttgcggatcaaaatcgatgccgtcagggaaatcatcgataatgtgtacctgacttcggtacggggcggtttgcgcgtgatcctgattcatcctgcggaaagtatgaatgtccaagccgccaacagtttgttgaaagtgttggaagagccgccgccacaagtggtctttttgctggtaagccacgcggcggacaaggttttaccgaccattaaaagccgctgccggaagatggttttgcccgctccttcgcatggggaagcattggcgtatctgcgcgacaggggtgtggcggagcctgaggaacgtctggctttccattcgggtgcgccgctgtttcaggaggaaggcgagcttcgggaattgagggcaaagctgctggagatattggcagagccgagattgttgaagattttggattacgccgcgcttttcgataaggaaaaacttccgctcgccgtatttgtcgggtggatgcagaaatggctggtcgatttaggcttgtgcctgcaacacatgaaacccgtctattatcccgcttatgaagacaggctgcttcagacggcatcgggtttccgtccgcgcaatgtatttgcggcggaggatatgctcaaacagcttgccccttacgggtttcatactttaaatgtcaaaatgcagatcgagcatctgctcatcaactatttggaattgaagaaagagaacagg

SEQ ID NO: 28824 - DNA, 1506 bp, Neisseria gonorrhoeae
atgttgcctcacgggcagtttgcgcaatggattgcgccccttacggttggtgaggagggtggcgtatgggtggtgtacggcaagaaccagtttgcctgcaatatgctcaagagccagtttgccggaaaaatagaagcggtaagggaagagttggctgccggccgtcccgcctttgtattcaaaccgggagaaggcgtgcgttatgagatggcggcggttgaaggtgctgtcgaacctgccgagccgtccttgcacgcggggtcggaggagatgcccgtgcaggaggttctgttggacgagctgccgtctgaaaagcctgtcaaacccgctgcgtcgaaaacggcggcggatattttggcggaacgtatgaaaaacctgccgcacgagccgcgtcaggctgccgggcctgcttcccggccggaatcggcggcagttgccaaagcgcggacggatgcgcagcgtgatgcggaagaagcgcgttacgaacaaaccaacctgtctccggattacacgtttgatacgttggtagaaggtaagggcaaccgccttgcggcggctgcggcgcaggcgattgcggaaaacccggggcagagttacaacccgttcttcctgtacggcagcacgggtttgggcaaaacccaccttgtgcaggcggtcggcaacgagctgttgaaaaaccgtcccgatgccaaagtgcgctatatgcattcggacgactacatccgcagctttatgaaggcggttcgcaacaatacctacgacgtgttcaagcagcaatacaagcaatacgacctgctgattatcgacgatattcagttcatcaaaggaaaagaccgtacgatggaagaatttttctatctgtacaaccattttcacaatgagaaaaaacagctcatcctcacttgcgatgttttacccgccaaaatcgaaggtatggacgaccgcctcaaatcccgcttttcgtgggggctgactttggaactcgagccgcccgaattggaaatgcgtatcgccattttgcagaaaaaggcggaagcggcgggcatcagtatcgaagacgaagccgcgctgttcattgccaatctgatccgttccaacgtgcgcgaactggaaggcgcgttcaaccgtgtcggagcgagcagccgctttatgaaccgtcccgtcatcgacatcgatttggcgcgtaccgctttgcaggacattattgccgagaagcacaaagtcatcaccgccgacatcatcatcgatgcggtggcgaaatattaccgcatcaaaatcagcgacgtactcggcaaaaaacgcacgcgcaacattgcccgtccgcgtcaggttgccatgagcctgaccaaagaattgaccactttgagcctgccgtctatcggcgattcgttcggcggacgcgaccatacgaccgtcatgcacggcatcagggcggtggcgaaactgcgcgaggaagaccccgagttggcgcaggattacgagaaactgctgattctgattcaaaac

SEQ ID NO: 28825 - DNA, 1101 bp, Neisseria gonorrhoeae
atgttgattttacaagccgagcgcgacagcctgctcaagccgctgcaagcctttaccggcatcgtcgaacgcctacacaccctgcccatcctgtccaatgtgctgattgagggcaggggcggtcagaccaaactcttggcaaccgatttggaaatccaaatcgacaccgcgggtcccgagggaggtgcgggcgacttccgcatcactaccaatgccaagaaatttcaggacattttgcgcgcgctgcctgccggtgcgctggtgtcgctggattgggacgacaaccgtctgacgctgaaggcgggcaaatcgcgttttgccctgcaaaccctgcctgccgccgattttccgatgatgaatgtcggcgaggacatcagcgcgactttctcgctggggcaggagcgtttcaaaaccatgctgtcgcaagtgcagtacagcatggcggtgcaggacatccgctattatctcaacggtctgctgatgcaggttgagggcagccagttgcgccttgtggcgaccgacggacaccgccttgcctatgcagcctgcgcgattgatgcggatttgccgcgcgccgaagtgattttgccgcgcaaaacggtgctggaactgttcaaactgttgaacaaccccgacgatccgattcaaatcgagctgctggacaagcaggtgcgtttccaatgcaacggcacgaccatcgtcagcaaggtcatcgacggcaaattccccgatttcaaccgcgtgattcctttggacaacgacaagattttcgtgttgtcccgtgccgaacttttgggcgcgctggaacgtgtgtccattcttgccaacgaaaaattccgtggcgcgcgcctgttcctgcaacccggcctgttgagcgtcgtgtgcagcaacaacgagcaggaagaagcgcgcgaagaaatcgaaatcgcctatcagggcggcgaactcgaagtcggtttcaatatcggctatttgatggacgtgttgcgcaacatccattccgacgatatgcagcttgccttcggcgacgccaaccgctcgacgctgtttaccgtgccgaacaatccgaatttcaaatatattgtgatgccgatgcggatt

SEQ ID NO: 28826 - DNA, 2634 bp, Neisseria gonorrhoeae
atgaccatgcaagaacattaccagcccgccgccatcgagcctgcggcgcagaaaaaatgggacgacgcccgtatttccaacgtctccgaagacgcttccaaacccaaatattattgcctttcgatgttcccttaccctagcggcaagctgcatatggggcatgtacgcaactacaccatcggcgacgtattgagccgcttcaaacttttaaacggcttcaacgttatgcagcctatgggttgggacgcgttcggcatgccggcggaaaatgcggcgatgaaaaacaacgtcgcccccgccgcttggacctacgacaacatcgaatacatgaaaacccagctcaaaagcctgggttttgcgattgactgggaacgcgaagtcgccacctgcaaacccgaatactaccgctgggaacaatggctgtttaccaagctgtttgaaaaaggcatcgtctatcgcaaaaacggaacggtgaactgggacccggtcgaccaaaccgtccttgccaacgagcaagtcatcgacggacgcggctggcgttcgggcgcgttgatcgaaaaacgcgaaatcccgatgtattacttcaaaattacggattacgccgaagagctgctcaacgatttggacaagctggaacactggccggaacaagtcaaaaccatgcagcgcaactggatcggcaaatctcgcggcatgaccgtgcgcttcgccgtttcagacgacagcaagcaaggtttggaaggcgattacgcgaaattcctgcaagtttataccacccgccccgacacgctgatgggtgcgacttatgtcgctgttgccgccgaacatccgctggcaacagccgcagccgccgacaaacccgaattgcaggcatttatcgccgaatgcaaagccggttcggttgccgaagccgatatggcgacgatggagaaaaaaggcgtgccgaccggccgctacgtcgtcaacccgctcaacggcgacaagctggaagtgtggattgccaactatgtcttgtggggctacggcgacggcgcggtgatggctgttccggcgcacgacgaacgcgatttcgagtttgccgccaaatacaatctgccgaaaaaacaagtcattgccgtcggcgacaacgcattcgacgcaaaccgatggcaagaatggtacggcgacaaagaaaacggcgtattggtcaacagcggcgacttggacggcttggattttcagacggcatttgatgccgttgccgccaagctgcaaagccaaggtgcgggcgaaccgaaaacccaataccgcctgcgcgactggggcatttcgcgccaacgctactggggctgcccgattcccatcgtccattgcgaaaaatgcggagacgttcccgtccctgccgaccaactgcccgtcgtcctgcctgaaaacgtcgtacccgacggtatgggttcgccgctggcaaaaatgcccgagttttacgaaacttcctgcccgtgctgcggcggcgcggcgaaacgcgaaaccgacaccatggacaccttcatggagtcgagctggtacttcttccgctatatgtcgcccaagttttcagacggcatggtatcggcagaatccgcgaaatactggggcgcggtcgaccaatacatcggcggcatcgaacacgcgattttgcacctcctgtacgcgcgcttcttcaccaaactgatgcgcgacgaaggtttggtcaatgttgacgaaccgtttgaacgcctgctcacgcaaggtatggtcgtctgcgaaacctactaccgcgaaaacgacaaaggcggcaaagactggatcaaccccgccgatgtcgagctgactttcgatgacaaaggccgccccgtttccgccgtcctcaaagccgacggactgcccgtcgtcatcagcggcacggaaaaaatgtccaaatccaaaaacaacggcgtcgatccgcaagaactgattaacgcctacggcgcggacaccgcccgcctgttcatgatgttcgccgcaccgcccgaacagtccctcgaatggagcgacagcggcgtcgaaggtgcacaccgcttcctgcgccgtctgtggcgtaccgtttacgaatacctgaagcaaggcggcgcggtcaaagcatttgcaggcaaccaagacggtttgtctaaagaactcaaagacctgcgccacaaactgcattccaccaccgccaaagtcagcgacgactacggccgccgccagcagttcaacaccgccatcgccgccgtgatggaactgctcaaccaatacgacaaaaccgacaccggcagcgaacaaggccgcgccgtcgcccaagaagtattggaagccgccgtacgcctgttgtggcccatcgtgccgcacatctgcgaaaccctgtggagcgaattgaacggcgcgaaactgtgggaagcaggctggccgacagtcgacgaagccgccctggtcaaatccgaaatcgaagtgatggttcaagtcaacggcaaactgcgcggcaaaatcaccgtcgccgccgacgcctccaaagccgacctcgaagccgccgcactcgccaacgaaggcgcagtgaaattcatggaaggcaagcctgcgaagaaaatcatcgtcgtaccgggcagactggtgaacatcgtcgtc

SEQ ID NO: 28827 - DNA, 468 bp, Neisseria gonorrhoeae
ttgaacattaccgtcttggcagtcggcaccaaaatgccgcgttgggttgatgaggccgtcgccgaatacgccaaacgcttcggacgcgacgccgcctacgcattcaaagaaatcaaacccgaaaaacgcggcgcgggcgtgaatgccgtccaaggtatggcggcggaagaaaaacgcatccttgaagccattccgcaaggcgcgttcctcgtcgttcttgacgaacgcggcaaagcaccgacctccgtcgagctggcggaacacctcaaaagctggcggcaaaacggcgaacacgtctgcttcgtcatcggcggcgcggacggcatgaccgaccgcctcaaacaacaagcccgcatgatgatgcgcctgtccagcctcaccctgccgcacggcatggtgcgcgtccttctgaccgagcagctctaccgggccgtttccatcctgcacaaccatccttatcatcgggaa

SEQ ID NO: 28828 - DNA, 558 bp, Neisseria gonorrhoeae
atgaaaaaaatcatcttcgccgcgctcgcagcggcagccgtcggcactgcctccgccacctacaaagtggacgaatatcacgccaacgtccgtttcgccatcgaccacttcaacaccagcaccaacgtcggcggtttttacggtctgaccggttccgtcgagttcgatcaagcaaaacgcgacggcaaaatcgacatcaccattcccgtcgccaacctgcaaagcggttcgcaacccttcaccggccacctgaaatccgccgacatcttcgatgccgctcaatatccggacatccgcttcgtttccaccaaattcaacttcaacggcaaaaaacttgtttccgttgacggcaacctgaccatgcgcggcaaaaccgcccccgtcaaactcaaagccgaaaaattcaactgctaccaaagcccgatggcggaaaccgaagtttgcggcggcgacttcagcaccaccatcgaccgcaccaaatggggcgtggactacctcgttaacgccggtatgaccaaaaacgtccgcatcgacatccaaatcgaagctgcaaaacaa

SEQ ID NO: 28829 - DNA, 777 bp, Neisseria gonorrhoeae
atgcatatcatcgattcgcactgccacctcaattttgaaggtttgaaagaacgcctgcccgaagttttgtccaacatggaagcaaacggcgtggggcaggcactcgccatcagcgtcagtagggaaagcttctccgaagtctttgccgtcgccgaagcgcacgaacacatctattgcaccataggcgtacatcccgacagcaaggaagccgaagaattttccattgcggaaatggtcgaagccgccgcccatccgaaagtggtcggcatcggcgagacgggtttggattattactggtgcaaaggcgatttgtcttggcagcacaaacgctttgcagaccacatcgaagcagccaatcaaaccggactgcccgttatcgtccatacgcgcgatgcggcggcggacaccttggcgattttaaaagaatgtaaaaccaattcgggtgtgattcactgtttttccgaggatgtcggttttgcccgggctgccatggatttggggctttatatttctttctcgggaatcgttacctttaaaaacgcccccttggttcaggaggcggcgaaatacgttccggacgaccgcattttagtggaaaccgatgcgccgttccttgcccccgttcccaaacgaggcaggcagaacgaaccggcttttgtgcgtcatactgccgaacatattgccaaattgcggaatcaaacattggaacaggttgcggcatatacgacggaaaacttttaccggctgtttaaaaaagtacccgatatgcgggtcgtc

SEQ ID NO: 28830 - DNA, 1782 bp, Neisseria gonorrhoeae
atggctttagttgaattgaaagtgcccgacattggcggacacgaaaatgtagatattatcgcggttgaagtgaacgttggcgacaccatcgccgttgacgacaccctgattaccttggaaaccgacaaagcgacgatggacgtgcctgccgaagttgcgggcgtgatcaaagaagtgaaagtcaaagtcggcgacaaaatctccgaaggcggtttgattgtcgtcgtcgaagccgaaggtgcggctgccgcccctaaagccgaagcggctgccgccccggcgcaagaagcacccaaagctgccgctcctgctccgcaagccgcgcaattcggcggtgctgccgatgccgagtacgacgtggtcgtattgggcggcggtcccggcggttactccgctgcatttgccgctgccgatgaaggcttgaaagtcgccatcgtcgagcgttacaaaactttgggcggcgtttgcctgaacgtcggctgtatcccttccaaagccttgttgcacaatgccgccgttatcgacgaagtgcgccacttggctgccaacggtatcaaataccccaagccggaactcgacatcgatatgcttcgcgcctacaaagacggcgtggtttcccgcctcacgggtggtttggcaggtatggcgaaaagccgtaaagtggacgttatccaaggcgacgggcaattcttggatcctcaccacttggaagtgtcgctgactgccggcgacgcgtacgaacaggcagcccctaccggcgagaaaaaaatcgttgccttcaaaaactgtatcattgcagcaggcagccgcgtaaccaaactgcctttcattcctgaagatccgcgcatcatcgattccagcggcgcactggcactgaaagaagtaccgggcaaactgctgattatcggcggcggcattatcggcctcgagatgggtacggtttacagcacgctgggttctcgcctggatgtggttgaaatgatggacggcctgatgcaaggcgcagaccgcgacttggttaaagtatggcaaaaacaaaacgaataccgttttgacaacattatggtcaacaccaaaaccgttgcagtcgagccgaaagaagacggcgtttacgttacctttgaaggtgcaaatgcacctaaagagccgcaacgttacgatgccgtactggtcgcggcaggccgtgcgcctaacggcaaactcatcagcgcagaaaaagccggtgttgccgttaccgatcgtggcttcatcgaagttgacaaacaaatgcgcaccaacgtaccgcacatctacgctatcggcgatatcgtcggtcaaccgatgttggcacacaaagccgttcacgaaggccacgttgccgctgaaaactgtgccggccacaaagcctacttcgacgcacgcgttattcccggcgttgcctacacttcccccgaagtggcatgggtcggtgaaaccgaattgtctgccaaagcatcaggccgcaaaattaccaaagccaacttcccatgggcggcttccggtcgtgcgattgccaacggttgcgacaacggctttaccaagctgattttcgatgccgaaaccggccgcatcatcggcggcggcattgtcggtccgaacggtggcgacatgatcggcgaagtctgccttgccatcgaaatgggctgcgacgcggcagacatcggcaaaaccatccacccgcacccgaccttgggcgaatccatcggtatggctgcggaagtggctttgggtgtatgtaccgacctgcctcctcaaaagaaaaaa

SEQ ID NO: 28831 - DNA, 624 bp, Neisseria gonorrhoeae
atgaacgttaacgttatcaaccatccgctcgtccgccacaaactgaccctgatgagggaggcggattgcagcacctacaaattccgtacgctgaccaccgagttggcgcgcctgatggcatacgaggcaagccgtgattttgaaattgaaaaataccttatcgacggatggtgcggacagattgaaggcgaccgcatcaaaggcaaaaccctgaccgtcgtccccatcctgcgcgccggtttgggtatgctcgacggcgtgctcgacctgattccgactgccaaaatcagcgtggtcggtttgcagcgcgacgaggaaacgctgaagcctatttcctattttgagaaatttgtggacagtatggacgagcgtccggctttgattatcgatcctatgctggcgacaggcggttcgatggtggccaccatcgacctgttgaaagaaaaaggttgccgcaacatcaaagccttagtcttggttgccgcccctgagggcgtgaaggctgttaatgatgcgcatcccgatgttacgatttataccgccgcgctggatagccgtttgaacgaaaacggctatattattcccggtctgggcgatgcgggcgacaagattttcggcacgcgc

SEQ ID NO: 28832 - DNA, 1584 bp, Neisseria gonorrhoeae
gtagaaatcaaagtccccgatatcggcggtcacgaaaacgtcgacatcatcgccgtagaagttaaagcgggcgacaccatcgccgttgacgacaccctgattacactggaaaccgacaaagccacgatggatgtgcctgccgatgcggccggtgtcgtgaaagaagtaaaagtcaaagtcggcgacaaaatctccgaaggcggcgtaattttgaccgttgaaaccggtgccgccgctgccgaagccgccccggctgctgccgccgaagcacaacctgcacccgctgccgcaggcggtgcaaccgttcaagtagccgttcccgatatcggcggccataccgatgtagatgtaatcgccgttgaaatcaaagttggcgacaccgttgccgaagacgacacgctgattactttggaaaccgataaagcgacaatggacgtaccttgtaccgctgccggtgtcgttaaagccgtattcttaaaagtcggcgacaaagtgtccgaaggctctgccattatcgaagtggaaaccgccggctctgccgcagcagctcctgcgcctgccgctcaagctgccgcacccgccgccgtgcctacatctgccgcacccgccgccgtgcctacatctgcctcgcctgccgctgccaaaatcgatgaagccgctttcgccaaagcacacgccggtccttccgcacgcaaactggcgcgcgaattgggcgtggatttgggccaagtcaaaggtagcggcttgaaaggccgtatcatgggagacgacatcaaagcctttgtgaaatccgtaatgcagggcggcgcggcaaaacctgccgcagccggcgcatctttgggcggcggtctggacttgctgccgtggcctaaagtggacttctccaaattcggcaatgtcgaagttaaagaattgtcccgcattaagaaaatctccggtcaaaacctgtcccgcaactgggtggtgattcctcacgttaccgtacacgaagaagcggatatgaccgaactggaagaattccgcaaacagctgaacaaagaatgggaacgcgaaggcgtgaaactgtccccgttggcgttcatcatcaaagcctccgtttccgcgctgaaagccttccccgaattcaacgcttctttggacggcgacaacctggtgctgaaaaactacttcaacatcggtttcgcagccgatacgccgaacggcttggttgttcccgtcatcaaagacgtggatcaaaaaggcttgaaacaaatcagccaagaattgaccgaattgtccaaaaaagcccgcgaaggcaagctcaaaccgcaagaaatgcaaggcgcgtgctttaccatttccagcttgggcggcatcggcggcacaggtttcacgccgattgtgaacgctcccgaagtcgctatcttgggcgtgtgcaaatcccaaatcaaaccggtttggaacggcaaagagtttgccccgcgcctgatgtgcccgttgagcctgtccttcgaccaccgcgtcatcgacggtgccgccggtatgcgcttcaccgtattcctggcgaacctgttgaaagacttccgccgcattaccttataaaat

SEQ ID NO: 28833 - DNA, 594 bp, Neisseria gonorrhoeae
ttgtccgatacggataaacaggcttttttgacttctgtcagctcaaaagaacaggttaaaaaagtcattgaaccaagaaaagttacgaagtgcccacattgccaatctacacatttcgtcaaaaatggcaaagattgtggcaaccaacgttttttgtgtcgtgattgtaaaaagtcttttgttgagcagacaggcactattctctacaacacgcaaaaagacattgaagtttgggaaaaatacattcattgtatgattgaaaaatacccacttcgcaaatgtgctgaaatttgcaaaatcaatcttgctactgcgtttacttggcggcacaaaattttggacgcacttcaaaacatgatgaatgaagttgagttagacggcattgtgcaagctgatgaaacttattcgacgatttcttacaaagggcaccacaaaaattttaatctgccacgtcctgctcacaaacgaggaacgagagcaacgaaacgtggcatttccaaagaacaagtttgtgttccttgtggtatcaatttagacggtaaatctgttgctagaattagcaatttgggtaagccatctctaaaaaatatcaac

SEQ ID NO: 28834 - DNA, 756 bp, Neisseria gonorrhoeae
atgattaccatccgcaacgtcagctaccgcatcggcacacaccccatcctcgacaacgtcagcctcgacatccccgaaggcggcattaccgcgctaatcggccccaacggtgcgggcaaatccaccctgttttcctttatggcgcggctgcgcccgcttgaaagcggcagcatcgcctaccgaggcaaaaaccttgccggcacccccaccgccgaactcgcccgcacgctctccatcctcacccaagaaaacagcatcatgagccgcatcaccgtgcgcgacctgctgatgttcggccgttacccctaccatcaaggcagaccgactgccgaatgccgccgtatcgttaacggtgcaatcgaagaattccacctgcaggacctctccgaccgctacctgaccgaactctccggcggacaacgccaacgcgccatgattgcgatggtgttctgccaaagcaccgactacgtccttttggacgaaccgctgaacaacctcgatatgtatcacgcccgctcgctcatgcagattctgcaaaagctcacgcacgaacacaaacgcaccaccgtcgccgtattgcacgacatcaaccaggccgccgcctacgccgaccacgtcgtcgccatgaaaaacggcaaagccgccctgaccggcacacccgaagaagtgttcaccgtacacaacatcaaagaactgttcgacatggacgtggacgtactcgactacgaaggcaaaaaactcatcgtccaccacatc

SEQ ID NO: 28835 - DNA, 966 bp, Neisseria gonorrhoeae
atgactgccaaacctttttccctcaacctggccaacctcctgctgccggcggtattgtttgccgtcagcctgtcggtcggcattgccgatttccgctggtcggatgtgttttcgctgtccgacagccagcaagtgatgttcatcagccgcctgccgcgcacgtttgcgattgtgttgacgggcgcgtcgatggcggtggcggggatgattatgcagattctgatgcgcaaccgttttgtcgagccttctatggcgggtgcgggccaaagtgcggctttgggtttgcttctgatgtccctgctgctgcctgccgcgccgctgccggtcaaaatgtcggttgccgccgttgccgcgctgatcgggatgttggtctttatgctgctgatccgccgcctgccgccgacggcgcagctgatggtgccgctggtggggattattttcggcggcgtggttgaggcggtggcgacgtttgtcgcgtatgagtttgagatgctgcaaatgttgggcgtgtggcagcagggcgacttttcaagcgtgctgctggggcggtacgagctgctttggattacgggcggtttggcggtgtttgcctacctgattgccgaccggctgacgattttggggctgggcgagacggtgagcgtgaatttgggtttgaaccggacggcggtgttgtggtcgggtttgattattgtggcactgattacatcgctggtcattgtaacggtcggcaatattccgtttatcgggctggtcgtgccgaatatcgtcagccgcctgatgggcgacaggctgcgccaaagcctgcctgcggtcgccctcttgggcgcgtctttggttttattgtgcgacattatcggacgcatgattgtgtttccgtttgaaattccggtctccacggtttttggtgtgttgggtacggctttgtttttgtggcttttgttgaggaaacccgcctatgccgtc

SEQ ID NO: 28836 - DNA, 2139 bp, Neisseria gonorrhoeae
atgaacgccccgtttttccgcctcagcctgctctcgctcacacttgccgccggctttgcccacgcggcagaaaataatgccaatgtcgcattggataccgttaccgtaaaaggcgaccgccaaggcagcaaaatccgtaccaacatcgttacgcttcaacaaaaagacgaaagcaccgcaaccgatatgcgcgaactcttaaaagaagagccctccatcgatttcggcggcggcaacggcacgtcccaattcctgacgctgcgcggcatgggtcagaactctgtcgacatcaaggtggacaacgcctattccgacagccaaatcctttaccaccaaggcagatttattgtcgatcccgctttggttaaagtcgtttccgtacaaaaaggcgcgggttccgcctctgccggtatcggcgcgaccaacggcgcgattatcgccaaaaccgtcgatgcccaagacctgctcaaaggcttggataaaaactggggcgtgcgcctcaacagcggctttgccggcaacaacggcgtaagctacggcgcaagcgtattcggaaaagagggcaacttcgacggtttgttctcttacaaccgcaacgatgaaaaagattacgaagccggcaaaggcttccgcaatgtcaacggcggcaaaaccgtaccgtacagcgcgctggacaaacgcagctacctcgccaaaatcggaacaaccttcggcgacggcgaccaccgcatcgtattgagccatatgaaagaccaacaccggggcatccgcactgtgcgtgaagagtttgccgtcggcggcgaaaattcacggataactattaaacgccaagcccctgcctaccgcgaaaccacacaatccaacaccaatttggcgtacaccggcaaagatttgggctttgtcgaaaaactggatgccaacgcctatgtgctggaaaaaaaacgctattccgccgatgacaaagataacggctacgcaggcaatgtaaaaggccccaaccatacccgaatcgccactcggggcatgaacttcaacttcgacagccgccttgccgaacaaaccctgttgaaatacggcatcaactaccgccatcaggaaatcaaaccgcaagcgtttttgaattcacaatttaaaattgaagataaaaaagatgcaactgaggaagataaaaagaagaaccgtgaaaatgaaaaaattgccaaagcctaccgtctgaccaacccgaccaaaaccgataccggcgcgtatatcgaagccattcacgagattgacggctttaccctgaccggcgggctgcgttacgaccgcttcaaggtgaaaacccacgacggcaaaaccgtttcaagcagcagcctcaacccgagtttcggcgtgatttggcagccgcgcgaacactggagcttcagcgcgagccacaactacgccagccgcagcccgcgcctgtatgacgcgctgcaaacccacggcaaacgcggcatcatctcgattgccgacggcaccaaagccgaacgcgcgcgcaataccgaaatcggcttcaactacaacgacggcacgtttgccgcaaacggcagctacttccggcagaccatcaaagacgcgcttgccaatccgcaaaaccgccacgactctgtcgccgtccgcgaagccgtcaacgccggctacatcaaaaaccacggttacgaattgggcgcgtcctaccgcaccggcggcctgaccgccaaagtcggcgtaagccgcagcaaaccgcgcttttacgatacccatcctaaaaaactgttgagcgcgaaccccgagtttggcgcacaaaccggccgcacttggacggcctcccttgcctaccgcttcaaaaacccgaatctggaaatcggctggcgcggacgctatgttcaaaaagctacgggttcgatattggcggcagggcaaaaagaccgcgacggcaaattggaaaacgttgtacgccaaggtttcggtgtgaacgatgtcttcgccaactggaaaccgctgggcaaagacacgctcaatgttaatctttcggttaacaacgtgttcgacaagttctactatccgcacagccaacgctggaccaataccctgccgggcgtgggacgtgatgtacgcctgggcgtgaactacaagttc

SEQ ID NO: 28837 - DNA, 1632 bp, Neisseria gonorrhoeae
atggcagcaaaagacgtacaattcggcaatgaagtccgccaaaaaatggtaaacggcgtgaatattttggcaaacgccgtgcgcgtaaccttgggccccaaaggccgcaacgtggtggttgaccgcgctttcggcggcccgcacatcaccaaagacggcgtaaccgtcgccaaagaaatcgaactgaaagacaagtttgaaaatatgggcgcgcaaatggtaaaagaagtcgcgtccaaaaccaacgacgtagccggcgacggtacgactaccgccaccgtattggcacaatccatcgttgccgaaggcatgaaatacgttaccgccggcatgaacccgaccgatctgaaacgcggcatcgacaaagccgttgccgctttggttgaagagctgaaaaacatcgccaaaccttgcgatacttccaaagaaatcgcccaagtcggctcgatttccgccaactccgacgaacaagtcggcgcgattatcgccgaagcgatggaaaaagtcggcaaagaaggcgtgattaccgttgaagacggcaaatctttggaaaacgagctggacgtggttgaaggtatgcagttcgaccgcggctacctgtccccttactttatcaacgacgcggaaaaacaaatcgccggtctggacaatccgtttgttttgctgttcgacaaaaaaatcagcaacatccgcgacctgctgcccgtgttggaacaagtggcgaaagccagccgcccgctgttgattatcgctgaagacgtagaaggcgaagccttggcgactttggtcgtgaacaacatccgcggcatcctgaaaaccgttgccgtcaaagcccccggcttcggcgaccgccgcaaagcgatgctgcaagacatcgccatcctgaccggcggcgtagtgatttccgaagaagtcggcctgtctttggaaaaagcgactttggacgacttgggtcaagccaaacgcatcgaaatcggtaaagaaaacactaccgtcatcgacggcttcggcgacgcagcccaaatcgaagcgcgtgttgccgaaatccgccaacaaatcgaaaccgcgaccagcgattacgacaaagaaaaactgcaagagcgcgttgccaaactggcaggaggcgtggcagtgatcaaagtcggcgcggcgaccgaagtcgaaatgaaagagaaaaaagaccgcgtggaagacgcgctgcacgctacccgcgcagccgttgaagaaggcgtggttgcaggcggcggcgtagccctgttgcgcgcccgtgccgctttggaaaacctgcacaccggcaatgccgaccaagacgcaggcgtacaaatcgtattgcgcgccgttgagtctccgctgcgccaaatcgttgccaacgcaggcggagaacccagcgtggtggtgaacaaagtgttggaaggcaaaggcaactacggttacaacgcaggctccggcgaatacggcgacatgatcggaatgggcgtactcgaccctgccaaagtaacccgttccgcgctgcaacacgccgcgtctatcgccggtctgatgctgacgaccgactgcatgattgccgaaatccctgaagaaaaaccggctgtgcccgatatggggggaatgggcggtatgggcggcatgatg

SEQ ID NO: 28838 - DNA, 1710 bp, Neisseria gonorrhoeae
atgaaagccagccaattctttatctctactttaaaagaagcccctgccgaagccgcgtttgccagccacaagctgatgattcgcgccggtctgattaaagccaacgcgtccggtctttatacttggatgccgatggggctgcgcgtgttacgcaaagtcgaaaacgtcgtgcgcgaggaaatggcgcgcgcgggcagcgtggagctgctgatgccggtggtgcagcctgccgaactgtggcaggaatccggccgctgggagttttacggtaaagaactgctgcgcctgaaagaccgccacgaacgcgatttctgcatgggcccgacctgcgaggaagtcatcgccgacatcgtgcgcaaagaaatcaacagctacaaacaactgccgaaaaatttttaccacatccaaaccaaattccgcgacgaagtgcgcccgcgtttcggcgtgatgcgcgcgcgcgaatttgtgatgaaagatgcttattccttccacgccgactacgcctcgcttcaggcgacctatgatgccatgtatgacgctcactgccgcatctttacccgtctgggtttggcgttccgccccgtcgccgcagacaccggcagcatcggcggtacgggttcgcacgagtttcaagtgttggcggaaagcggcgaagatgtgattgcatacagcgacacttccgattacgccgccaatatcgagttggcaccgaccttgccgcttaaaggtgaacgtgccgccgctcaggctgtgttgaccaaagtacatacaccaaacgtcaaaaccattgagtctttggttgaattcctgaatattccggttgaacaaaccctcaaatccatcgtggttgaaggcgaaaacgaaggcgaactcgtcctactgctgttgcgtggcgaccatgagtttaacgacatcaaggcagaaaaactggcgggcgtaaaatcgccactgactatggcaagccctgccgcgattgttgaacaattcggcgcaaacggcggttcgctcggccccgtcggcttcacaggcaaagtctatgccgatttcgctaccgaaaaaggcgcggactgggttatcggcgcaaacgaagacgactaccactataccggcttcaacttcggccgcgatgccgccgagcctgaattcgtcgatttgcgtaatgtggtcgaaggcgacgaaagccccgacgggcaaggccgtctgaaactggcgcgcggcatcgaagtcggacatgtcttccagttgcgcggcaaatatacccaagctatgaacgtcagcttcctcgacaataacggcaaatcgcaaatcatggaaatgggctgctacggcatcggcatcacccgcgtcgttgccgccgccatcgagcagaataacgacgaaaaaggcatcatttggaccaaagcgatggcgccgtttgaagtcgtcatcgtgccgatgaactacaaaaaatccgacactgtgcgtgaagccgccgacagaatctatgccgaattgctggcggcaggcgcggatgtgctgctggacgaccgcgacgaacgcgcaggcgtattgctgaacgattccgagcttctcggtatcccgcaccgcatcgtcatcggcgaccgcgccttgaaagaaggcaatgtcgaatacgccgaacgccgcggcaacgaagcgcaggcagttgcaatcggagaaattgttgcgcgtgtaacagcttcattaaatgcg

SEQ ID NO: 28839 - DNA, 654 bp, Neisseria gonorrhoeae
gtggcttcagtatttttagaaggagaagcagtcgaggtcggcaatattttctgtatcggcaggaactatgccgcacatgtcgaagagttaaaaaacgaaataccttcagaacctgtggtgtttatgaagccgtcaggcagcattttgaacagcggcggtacaatcttgctgcccgagttcagtagggatgtgcagtttgagtgcgaactagtgttgctgattggccgggattcagacggcacgggcgagggtgaagatattttgggatgcgtggcggggtacggcgtgggtttggatttgaccgcgcgggacatccaatgccgtctgaaggcgcaggggctgccctggctgaaggcaaaagggttcaggcattctgcgtgcgtgtcggattttgcggcggcagacagaatcggcaatcaagataaggtgttgttttcattaaaacaaaacggcgtattgaaacagcgcggggagactggtttgatgatttacccgattcgggaaattttacacaaactggcggcggattacggtttggggaaaggggatttggtgtttaccggaacgccttccggcgtgggcgcaatcggtgcgggggacaatttggcattggagctggacggcttggtgtgcgcctctttcacgatagggtgt

SEQ ID NO: 28840 - DNA, 453 bp, Neisseria gonorrhoeae
atgcataaaattccaaaaggaacggcactggcattcgacttcggcgaagcgcgcatcggcgtggcgcagggcgatgcggaattggggctgtcccatccgctggccaccgttaccggcggcagcaacgatgaaaaattcgcggcaatcgccaagctggttcaagaatggcagccgcgttattttgtcgtcggactgcccgtgcatgccgacggcacggaacatgaaatgacgcacctgtcgcgcaagtttggacgcaggctgaacggcaggttcaatctccccgtctattgggttgacgaacggctgtcgtccgtctgtgccgaaagcctgctttcggaagcacaggtcttgggcaaaaaacgcaaatcggtgctcgaccaagtggcggcgcaagccatcctgcacggttttctcgagggcggcccggcggaatgtttcaacgggcgtgaaggt

SEQ ID NO: 28841 - DNA, 1377 bp, Neisseria gonorrhoeae
atggcaaaaacgcttaaaaccctttaccaatgcaccgaatgcggcggcacttccccgaaatggcagggcaaatgtccgcattgcggcgagtggaacacgcttcaggaaagctttgccgcgcccgagccgaaaaacgcccgattccaatcttgggcggcggacgcttcgaccgtccaatccctctccgccgttaccgctgccgaagtgccgcgcaatccgaccggtatgggcgaactcgaccgcgtattgggcggcggtttggtcgatggcgcggtcatcctgctcggcggcgatcccggcatcggcaaatccacgctgttgttgcaaaccatcgccaaaatggcgcaaagccgcaaagtgctgtacgtttccggcgaagaatccgcccaacaggtcgccctgcgctcgcaacgtttggaactgcacgccgaaggcgtaaacctgcttgccgaaatccgcatggaagcgattcaggcggccttgaaacagcatcagcccgaagtcgtcgttatcgattccatccaaaccatgtattccgaccaaatcacgtccgcccccggttccgtgtcgcaggtgcgcgaatgtgccgcccaactgacgcgtatggcgaaacaaatgggtatcgccatgatactggtcggacacgttaccaaagacggagcgattgccggcccgcgcgtgctggaacatatggtcgataccgtgctgtatttcgagggcgaccaacattccaactaccgcatgatacgcgccatcaaaaaccgtttcggcgcggcaaacgaattgggcgtgttcgcgatgaccgaaaacggtttgaaaggcgtatccaacccgtccgccatcttcctcgccagctaccgcgacgacacgcccggttcgtgcgttttggttacacaggaaggcagccgcccgcttttggtcgaaattcaggcattggtcgatgacgcgcacggcttcacacccaaacgcctcagcgtcggattggaacaaaaccgccttgcgatgctgcttgccgtgttaaaccggcacggcggcatcgcctgtttcgatcaggatgtttttttaaacgccgtcggcggcgtgaaaatcggcgaaccggcggcggatttggcggtcatcctcgcgatgctttccagcttccgcaaccgccctatgcctgaaaaaaccgtggtcttcggtgaaatcggcctaagcggcgaagtccgccccgtcgcacgcggacaagagcggctcaaagaagcggaaaagctcggcttcaaacgcgccatcgtccccaaagccaatatgccgcgcaatgccaaagagtttccgaacctgaaaatccacggcgtttcaagtttgcaggaagccatcgatatttgccgcgacagcagggaa

SEQ ID NO: 28842 - DNA, 2790 bp, Neisseria gonorrhoeae
atgtccaacagacctacactcctcctcgttgacggctcttcctatctctaccgcgcgtatcacgcgatggggcaaaacctgactgcgcctgacggtgcgccgacgggtgcgctgtatggcgtattgaatatgttgcgccgtttgcggtcggaatatccgcacgattattgcgcggtggtttttgatgcgaaaggcaaaaatttccgccatcaaatgtttgaagaatacaaggcgacgcgcccgccgatgccggacgatttgcgcccgcaggcggaagccctgccggatttggtgcgcctgacgggctggccggtattggtgattgggcaagtggaggcggacgatgtgatcggcacgctggcgaaacagggggcggaacatggtttgcgagtcattgtttcgacgggcgataaggatatggcgcagttggtggatgagcgcgttacgctggtgaacacgatgagcggagaaacgctggatattgaaggcgtgaaggcaaaattcggcgttcgccccgaccaaatccgtgattatctcgcgctgatcggcgacaaggtggacaacgtaccgggcgtggaaaaatgcggcccgaaaacggcggtgaaatggctggaagcctacggttcgttgcaaggcgtgatggaacacgctccggaaatcaaaggcaaggtcggcgaaaacctgcaagccgcgctgccccaactgccgctgtcgtatgatttggtcacgattaaaaccgatgtggacttgcacaccgagctttcagacggcatcgaaagcctgcgccgtaccgcgccgaaatgggcgcagcttgcggttgatttcaaacgctggggcttccgtacttggctgaaagaagcggaatcaaacatgaataccggctcgaccgatgatttgttcggtagcgacagcatcggcgagcaggcggctttgaatgcggaaataccgtctgaaaaacgagctgaaaaagccaccgcccctgaaaaactggattatcaagccgttaccaccgaagctcagtttgccgccttgttggacaaactagcgaaggcggacacaatcggcattgatacggaaaccacgtcattagatgcgatgaatgccgagctggtcggcatcagcattgcgttccaagcaggcgaagcggtttacatccccgtaggccacagcctgactgccgcgcccgaacagcttgatttgcaagacgtattaggccgtctgaagccgcatttggaaaaccccgccctgaaaaaaatcggtcaaaacctcaaatacgaccaacacgttttcgccaactacggcatcgcgttaaacaacattgccggcgacgcgatgctcgcttcctacatcatcgagagccatctcggacacggcttggacgaattgtccggacgctggctcggtttagaaaccattacctacgaatcgctgtgcggcaaaggcgcgaagcaaatcagttttgccgatgtcgccatcgggcaggcgaccgaatacgccgcccaagatgccgatttcgccctgcgcctcgaagcgcgcctgcgcgcgcaaatggacgacaaacaacttgaaatgtatgaaaaaatggagcttcccgtcgcgcaggtattgtttgaaatggaatgcaacggcgtgcaaatcgaccgcgccgaactcgcccgccaaagcgcggaactcggcgcggagctgatgaagctcgaacaggaagcctacgccgctgcaggtcaaccgtttaacctcaactcgcccaaacagctgcaagaaatcctgttcgacaaaatgggcatcccgacaaaagggctgaaaaaaaccgccaaaggcggcatttccaccaacgaagccgtgctcgaacagctcgcgcccgactaccccctgcccaaaatcatcctgcaaaaccgcagcctggcgaaactcaaatccacctacaccgacaaactgcccgaaatgatttcgccccgggataaccgcgtgcataccacctatgcccaagccgtcgccattaccggccgcctcgccagcaacaaccccaacctgcaaaacatccccattcgcaccgccgaaggccgccgcgtgcgccgcgccttcactgcaccgccgggcagcgtcatcgtttccgccgactattcccaaatcgagctgcgcattatggcgcacctctccggtgacaaaaccctcattgccgcatttcaaagcggcgaagacgtacaccgccgcaccgccgccgaagtgttcggcactgcgcccgaaaacgtctcgcccgagcaacgccgctacgccaaaaccatcaacttcggcttaatctacggtatggggcaatacggtttggcaaaatcattgggcatcgacaacctttccgccaaaaactttatcgaccgctacttcgcccgttatcccggcgttgccgaatacatgcagcgcaccaaagaacaagccgccgcccaaggctacgtcgaaaccctgttcggcagaaggctctatttgcccgacatccgcaacaaaaacgccaacgcccgcgcaggagccgagcgtgccgccatcaacgcccccatgcaaggcaccgcttccgacctcatcaaacgcgccatgataaacgtgcgaaactggctttcagacggcatcggcagcaaactggtcatgcaggtgcatgacgaactggtgctggaagtcgttgaaaccgaactggattttgtcaaagaaaaactgccgcagattatggcgaaagtggacggcggattattggatgtaccgctggtggctgaggttggcgtaggggagaattgggaagaggcacat

SEQ ID NO: 28843 - DNA, 4404 bp, Neisseria gonorrhoeae
atgaaaacaaccgacaaacggacaaccgaaacacaccgcaaagcccctaaaaccggccgcatccgcttctcgcccgcttacttagccatatgcctgtcgttcggcattctgccccaagcccgggcgggacacacttatttcggcatcaactaccaatactatcgcgactttgccgaaaataaaggcaagtttgcagtcggggcgaaagatattgaggtttacaacaaaaaaggggagttggtcggcaaatcgatgacgaaagccccgatgattgatttttctgtggtatcgcgtaacggcgtggcggcattggcgggcgatcaatatattgtgagcgtggcacataacggcggctataacaatgttgattttggtgcggagggaagcaatcccgatcagcaccgcttttcttaccaaattgtgaaaagaaataattataaagcagggactaacggccatccttatggcggcgattatcatatgccgcgtttgcacaaatttgtcacagatgcagaacctgttgagatgaccagttatatggatgggtggaaatacgctgatttaaataaataccctgatcgtgttcgaatcggagcaggcagacaatattggcggtctgatgaagacgaacccaataaccgcgaaagttcatatcatattgcaagcgcatattcttggctcgtcggtggcaatacctttgcacaaaatggatcaggtggtggcacagtcaacttaggtagcgaaaaaattaaacatagcccatatggttttttaccaacaggaggctcatttggcgacagtggctcaccaatgtttatctatgatgcccaaaagcaaaagtggttaattaatggggtattgcaaacaggcaacccctatataggaaaaagcaatggcttccagctagttcgtaaagattggttctatgatgaaatctttgctggagatacccattcagtattctacgaaccacatcaaaatgggaaatacttttttaacgacaataataatggcgcaggaaaaatcgatgccaaacataaacactattctctaccttatagattaaaaacacgaaccgttcaattgtttaatgtttctttatccgagacagcaagagaacctgtttatcatgctgcaggtggggtcaacagttatcgacccagactgaataatggagaaaatatttcctttattgacaaaggaaaaggtgaattgatacttaccagcaacatcaaccaaggcgcgggcggtttgtattttgagggtaattttacggtctcgcctaaaaacaacgaaacgtggcaaggcgcgggcgttcatatcagtgatggcagtaccgttacttggaaagtaaacggcgtggcaaacgaccgcctgtccaaaatcggcaaaggcacgctgctggttcaagccaaaggggaaaaccaaggctcggtcagcgtgggcgacggtaaagtcatcttagatcagcaggcggacgatcaaggcaaaaaacaagcctttagtgaaatcggcttggtcagcggcagggggacggtgcaactgaatgccgataatcagttcaaccccgacaaactctatttcggctttcgcggcggacgtttggatttgaacgggcattcgctttcgttccaccgcattcaaaataccgatgaaggggcgatgattgtcaaccacaatcaagacaaagaatccaccgttaccattacaggcaataaagatattactacaaccggcaataacaacaacttggatagcaaaaaagaaattgcctacaacggttggtttggcgagaaagatgcaaccaaaacgaacgggcggctcaatctgaattaccaaccggaagaagcggatcgcactttactgctttccggcggaacaaatttaaacggcaatatcacgcaaacaaacggcaaactgtttttcagcggcagaccgacaccgcacgcctacaatcatttaggaagcgggtggtcaaaaatggaaggtatcccacaaggagaaatcgtgtgggacaacgattggatcgaccgcacatttaaagcggaaaacttccatattcagggcggacaagcggtggtttcccgcaatgttgccaaagtggaaggcgattggcatttaagcaatcacgcccaagcagttttcggtgtcgcaccgcatcaaagccacacaatctgtacacgttcggactggacgggtctgacaagttgtaccgaaaaaaccattaccgacgataaagtgattgcttcattgagcaagaccgacatcagaggcaatgtcagccttgccgatcacgctcatttaaatctcacaggacttgccacactcaacggcaatcttagtgcaggcggagacacgcactatacggttacgcgcaacgccacccaaaacggcaacctcagcctcgtgggcaatgcccaagcaacatttaatcaagccacattaaacggcaacacatcggcttcggacaatgcttcatttaatctaagcaacaacgccgtacaaaacggcagtctgacgctttccgacaacgctaaggcaaacgtaagccattccgcactcaacggcaatgtctccctagccgataaggcagtattccattttgaaaacagccgctttaccggaaaaatcagcggcggcaaggatacggcattacacttaaaagacagcgaatggacgctgccgtcgggcacggaattaggcaatttaaaccttgacaacgccaccattacactcaattccgcctatcgacacgatgcggcaggcgcgcaaaccggcagtgcggcagatgcgccgcgccgccgttcgcgccgttccctattatccgttacgccgccaacttcggcagaatcccgtttcaacacgctgacggtaaacggcaaattgaacggtcagggaacattccgctttatgtcggaactcttcggctaccgcagcggcaaattgaagctggcggaaagttccgaaggcacttacaccttggctgtcaacaataccggcaacgaacccgtaagtctcgagcaattgacggtagtggaaggaaaagacaacacaccgctgtccgaaaatcttaatttcaccctgcaaaacgaacacgtcgatgccggcgcatggcgttatcagcttatccgcaaagacggcgagttccgcctgcataatccggtcaaagaacaagagctttccgacaaactcggcaaggcgggagaaacagaggccgccttgacggcaaaacaggcacaacttgccgccaaacaacaggcggaaaaagacaacgcgcaaagccttgacgcgctgattgcggccgggcgcaatgccaccgaaaaggcagaaagcgttgccgaaccggcccggcaggcaggcggggaaaatgccggcattatgcaggcggaggaagagaaaaaacgggtgcaggcggataaagacaccgccttggcgaaacagcgcgaagcggaaacccggccggctaccaccgccttcccccgcgcccgccgcgcccgccgggatttgccgcaaccgcagccccaaccgcaaccccaaccgcagcgcgacctgatcagccgttatgccaatagcggtttgagtgaattttccgccacgctcaacagcgttttcgccgtacaggacgaattggaccgcgtgtttgccgaagaccgccgcaacgccgtttggacaagcggcatccgggacaccaaacactaccgttcgcaagatttccgcgcctaccgccaacaaaccgacctgcgccaaatcggtatgcagaaaaacctcggcagcgggcgcgtcggcatcctgttttcgcacaaccggaccggaaacaccttcgacgacggcatcggcaactcggcacggcttgcccacggtgccgttttcgggcaatacggcatcggcaggttcgacatcggcatcagcgcgggcgcgggttttagtagcggcagcctttcagacggcatcagaggcaaaatccgccgccgcgtgctgcattacggcattcaggcaagataccgcgcaggtttcggcggattcggcatcgaaccgcacatcggcgcaacgcgctatttcgtccaaaaagcggattaccgatacgaaaacgtcaatatcgccaccccgggccttgcattcaaccgctaccgcgcgggcattaaggcagattattcattcaaaccggcgcaacacatttccatcacgccttatttgagcctgtcctataccgatgccgcttccggcaaagtccgaacgcgcgtcaataccgccgtattggcgcaggatttcggcaaaacccgcagtgcggaatggggcgtaaacgccgaaatcaaaggtttcacgctgtccctccacgctgccgccgccaaggggccgcaattggaagcgcagcacagcgcgggcatcaaattaggctaccgctgg

SEQ ID NO: 28844 - DNA, 1344 bp, Neisseria gonorrhoeae
atgtcggataacgttccaacgattgcggcagtcgcgaccgcgcccggacgcggcggcgtgggcgtgatacgcatatcggggaaaaacctgttgccgatggcgcaggctttgtgtgggaaaacgcccgagccgcgcgtggcaacctatgctgattttacggacgcggacggacaggcaatcgatagcgggctgctactgttttttgccgcgccggcaagttttacgggcgaagatgtcatcgagcttcagggacacggcgggccggtagtgatggagatgctgctgaaccgctgtttggaactgggcgcgcgccttgccgagccgggcgagtttaccaaacgtgcgtttttaaacgacaaactggacttggcacaggcggaaggcgtggcggatttgattgacgcatccggccgttcggcggcgcgtctggcgttgcgctcgctcaagggcgatttttcgcggcggatacacggtttggtcgaaggcttgattaccttgcggatgctggtcgaagcggcgctggattttcccgaggaagacatcgattttctcgaagcggcggacgcacgcggcaaactggacggcttgcgccgcgccgtggatgatgtgcttgccaacgcgcagcagggcgcgattttacgcgaaggtctgaatgtcgtattggtcggtgcgccgaatgtcggcaagtccagcctgttgaacgcgctggcgggcgacgaagtggcgattgttaccgatattgccggaacgacgcgcgacgcggtcagggaacgtatcctgattgacggcgtgccggtgcatattgtcgatacggcaggtttgcgcgagacggacgacgtggtcgaacgcatcggcatcgaacgcagccgcaaagccgtatccgaagccgatgtcgcgctggtgttggtcgatccgcgcgagggtttgaatgaaaagacgcggatgattttggatacgttgccgtcggatttgaaacgcattgaaatccacagcaaatccgatttgcacgcacacgcggcaggcgggttcggtacgggcgcggaaaccgtcatcgcgctgtcggcgaaaaccggcgacggcttggacgcgctgaaacggacgctgttgtgcgaggccggttggcagggcgaaagcgaagggctgtttttggcgcggacgcggcacgtcaacgcactcaaggcggcgcaggaagaattgtcgctggccgctttgtgcggcaaccatcaaatcgagctgtttgccgaacacttgcggctggctcaggtcgcgtgcggcgaaattacgggggaatttacggcggacgacctgctcggcgtgattttttcgaggttttgcatcggaaaa

SEQ ID NO: 28845 - DNA, 2013 bp, Neisseria gonorrhoeae
atgatgaaactcaatgcccaacagctcgaagccgtccgctacctcggcggccccctgttcgtccttgccggcgcaggcagcggcaaaaccggcgtgattacgcaaaaaatcaagcatttgattgtcaatgtcggctatctgccgcataccgtcgccgcgattacctttaccaacaaagccgctgcggaaatgcaggagcgcgtcgccaaaatgctgcccaaaccgcaaacgcgcgggctgacgatttgcacgttccattctttgggcatgaagattctgcgcgaagaggcgaaccatatcggttacaaaaaaaacttctccattctcgactctaccgacagcgccaaaatcatcggcgaactcttaggcggcacgggaaaagaagccgtattcaaggcgcagcaccagatttccctttggaaaaacgatttaaaaacgcctgaagatgtcgttcagacggcctctaatgtgcgggaacaacaaaccgcgcgcgtgtatgcaagttatcaggaaaccctgcaaagctatcaggcagtagattttgacgacttaatccgcctgcctgccgtgctgttgcagcaaaacagtgaagtgcgcaacaaatggcagcggcggctgcgttatctgttggttgacgaatgccaagatacgaatacctgccaatttgcgctgatgaaactcttgacaggcgcggaagggatgtttaccgccgtcggcgacgacgaccagtccatctacgcatggcgcggcgcgaacatggaaaacctgcgcaaaatgcaggaaaactatccgcagatgaaggtcatcaaactggagcaaaactaccgctccaccgcgcggattctcaaaattgccaacaaagtcatcgaaaacaaccccaagctgtttaccaaaaaactttggtcgcaattgggcgaaggcgagccggttaaagtcgttgcctgccaaaacgagcagcacgaagccgattgggtcgtcagccaaatcgtcaaacaaaaactcatcggcggcgacaaaacccgatacgccgattttgccgtgttataccgcggcaagcatcaggcacggattttcgaggaagcattgcgcggcgcgcgcatcccctaccgtctctccggcggacaaagctttttcgacaaagccgaaatcaaagacgtgttgtcttatgtgcggctgcttgccaaccccaacgacgatcccgcctttctgcgcgccgttaccacgccaaaacgcggcatcggcgatgtaacgctgggcaaactcaacgcctacgcgcacgagcacgaatgcagcctgtatgaagccgcacaaaacgaagaagcccttgccacactgaacaataccaaccgccaacacctgcaagcctttatggatatgttcggcaactaccgcgccaaagccgaaatcgacgaagcgggcgagttcatcaacagcctgctcgaagaaatcgactatgaaaaccatttgatgcaaaacgaagaaggcaaagccggcgaaatcaaatggcgcaacgtcggcgagttggtatcgtggttcgcacgaaaaggcgaacgggacggcaaaaacgtcatcgaactcgcccaaaccgtcgccttgatgacgcttttggaaggaaaagacgaagaagaaaccgatgccgtctcgctatccacgctgcacgccgccaaaggtttggagtatccgtatgttttccttgtcggttgcgaagaaggtgttttgccgcacaacgacagcatcgaagaaggcaacgtcgaagaagaacgccgcctgatgtacgtcggcatcacccgtgccaaacgccaactcacgctgacccactgtgtcaaacgcaaaaaacaaggcatatggcaattccccgaacccagccgattcatagacgaaatgccgcaggaagatttgaaaatcctggggcgcaaaggcggcgaaccgattgtcagcaaagaagaaggcagacgtaaccttgccgatataatcggaaggatcgacaacctaaaaaaaagcggcccggcggat

SEQ ID NO: 28846 - DNA, 762 bp, Neisseria gonorrhoeae
atgcacaccagcctgaccgtcaaaaataccgttatcggaagcgggcgcaccaaaatcgccgtgccgcttgtcgcccgagatgccgccgatttatcctccgtgctgtcccaaatcaaaaacctgcccttcgatatcgtcgagttccgcgccgactttttggaatgcgcgggcagcatcggcgaagtattgcgccacacgcaggccgtccgcgacgcgctgcccgacaaaccgctgctgtttacgttcagacggcattgcgaaggcggctcgttcccgtgttcggacgattattattttgaactgctcgacgcgctgatcgaaagccgcctgcccgacattatcgatatcgagctgttttccggcgaaaccgccgtccgccgcgccgtggcaaatgctcaaaaaaacggcatcgccgccctgctctgcaatcatgagtttcaccgcacgccgccgcaagaagaaatcgtatgccgtctgaaacagatggaggactgcggcgcggacatctgcaaaattgcggtgatgccgcaaagctcggaagatgtgctgactttgctttccgccacgctcgaagcgaaacggcttgtcgccaaaccggttattacgatgtcgatggggcagacgggtgcggtcagccggcttgccggacaggtgttcggctcaagcatcacgttcggttcgggaacgcaaaactccgcgccggggcaaatcggcgtatccgccctccgtgcggcactcgactgcctcgaaagcggcgcagac

SEQ ID NO: 28847 - DNA, 1125 bp, Neisseria gonorrhoeae
atgaccgaccgattcatattccgcgccgcagcccgtgttgcgccgcagcccacataccgcatttgttccggagtaacccccatgtcagacgacaaaagcaaagcccttgccgccgcactggcgcaaatcgaaaaaagtttcggcaaaggcgccatcatgaaaatggacggcagccagcaggaagaaaacctcgaagtcatttccaccggatcgctcggattagacctcgccctcggagtcggcggcctgccgcgcgggcgcatcgtcgaaatcttcggccccgaatcctccggcaaaaccacactctgcctcgaagccgtcgcccaatgccagaaaaacggcggcgtgtgcgcctttgtcgatgccgaacacgccttcgatcccgtttacgcccgcaaactcggcgtaaaagtcgaagagctttacctgtcccagcccgataccggcgaacaggctttggaaatctgcgacacgctcgtccgttcgggcggcatagatatggtagtcgtcgattccgtagccgcactcgtccccaaagccgaaatcgaaggcgatatgggggacagccacgtcggactgcaggcgcgcctgatgagtcaggctttgcgcaaactgaccggacacatcaaaaaaaccaatacgctggttgtgttcatcaaccaaatccgaatgaagatcggcgtaatgttcggcagccccgagaccacgaccggcggcaacgcgctgaaattctattcttccgtccgcctcgacatccgccgcaccggatccatcaaaaaaggcgaagaagtattgggcaacgaaacccgcgtcaaagtcatcaaaaacaaagtcgcccccccgttccgtcaggcagagtttgacatcctctacggagaaggcatcagttgggaaggcgaattgatcgacatcggcgtgaaaaacgacatcatcaacaaatccggcgcgtggtacagctacaacggcgcgaaaatcggtcagggcaaagacaacgtccgcgtctggctgaaagaaaaccccgaaatttccgacgaaatcgacgcaaaaatccgcgccctcaacggcgtagaaatgcacatcaccgaagggacgcaggacgaaaccgacggcgaacgacccgaagaa

SEQ ID NO: 28848 - DNA, 333 bp, Neisseria gonorrhoeae
atgttcggaaaagccggattaggcggcctgatgaaacaggcgcagcaaatgcaggaaaacatgaaaaaggcacaagccaaacttgccgaaaccgaaatcgaaggcgaagcaggcaacggcttggtcaaaatcacaatgacctgcgcgcacgaagtacgcaaaatcgacatcagccccgatttgattcaagaagccgccgatgacaaagaaatgctcgaagacctcatcctcgccgccctcaaatccgcccggggcaaagccgaagaaaccgcaaacaaaacaatgggcgcattcacccaagatctgccccccggcgtgggcgacttcttccgc

SEQ ID NO: 28849 - DNA, 2175 bp, Neisseria gonorrhoeae
atgcaacaaaaaatccgtttccaaatcgaggggatgacctgtcaggcatgtgcttcgcgcattgaaaaagtgttgaacaaaaaagattttgtcgaatcggcgggagtgaactttgccagtgaggaagcgcaggttacgtttgacggcagcaaaacctcggttgccgacattgccaaaatcattgagaaaaccggttacggcgcgaaggaaaaaacggaagatacattgccgcaacctgaagcagaacaccatatcggctggcggttgtggcttttgctgaccatcaatatcccgttccttatcggtatggtagggatgatgctaaaagggctgaattggacacggcacgattggatgattccgcctgtatggcagtttgtactggcaagcatagtgcaactttggctggcaatcccgttttacaaaagcgcgtgggcaagcattaaaggcgggctggcgaatatggacgtactcgttaccatcggcacggtgtcgatttacctgtattccgtttatatgctgtttttcagttcgcatgcggcgcacggtatggcgcatgtgtattttgaagcgggcgtgatggtgatcggttttgtgtcgctgggtaagtttttggaacaccgcaccaaaaaatccagcctgaacagcttgggcttactgctaaaactcacgccgacccaagtcaacgtgcaacgcaacggcgaatggaaacaactgcccatcgaccaagtgcaaatcggcgaccttatccgcaccaaccacggcgaacgcatcgctgccgacggcattatcgaaagcggcagcggttgggcggacgaaagccaccttaccggcgaatccaatcccgaagagaaaaaggcgggcggcaaagtgttggcgggcgcgctgatgaccgaaggcagcgtggtgtaccgcgccgcgcagctcggcagccaaaccctgctcggcgacatgatgaacgcgctctctgaagcacaaggcagtaaagcaccgattgcgcgcgtggccgataaagcggcggcggtatttgtgccaactgtcgtgggcatcgcgcttctgacttttatcgttgcttggctgattaagggcgattggacggtcgcactgatgcacgccgttgccgttttggtgattgcctgcccgtgcgcgctcggtctggcgacccctgccgcgattatggtcggcatgggcaaagcggtgaaacacggcatttggtttaaagacgcggcggcaatggaggaagcagcccacgtcgatgccgtcgtattggacaaaaccggtacgctgaccgaaggcaggccgcaggttgccgccgtttattacgttcccgacagcggctttgacgaagacgctttgtaccgcatcgccgccgccgtcgagcaaaacgccgcccacccgctcgcccgcgccatcgtctccgccgcacaagcgcgcggtttggagattcccgctgcacaaaatgcgcaaaccgttgtcggagcaggcattaccgccgaagtggaaggcgtgggtttggtgaaatcaggcaaagccgaatttgccgaactgaccttgccgaagttttcagacggcgtttgggaaatcgccagtgcggttaccgtatctgtaaacggcaaaccgatcggcgcattcgcactctccgacgcgttgaaagccgataccgccgaagccataggccgtctgaaaaaacacaatatcgatgtctatattatgagcggcgataaccaaagtacggtcgaatacgtcgccaaacaactgggcatcgcacacgccttcggtaatatgagtccgtgcgacaaagccgccgaagtgcagaaactcaaagccgccggcaaaaccgtggcgatggtcggcgacggcatcaacgacgcgcccgcgcttgccgccgccaacgtcagcttcgccatgaaaggcggtgcggacgttgccgaacacaccgcctccgccacgctgatgcagcattcggtcaatcagctcgccgatgccctgctgatatcgcaggcaacgttggaaaacatcaagcaaaacctatttttcgccttcttctacaatatattgggcattccgctcgccgcgctcggctttttaaatcccgtcatagcaggcgcggcaatggcggcaagctcggtttcggtattgggcaatgccctgcgcctgaaatgggtaaaaatcgat

SEQ ID NO: 28850 - DNA, 927 bp, Neisseria gonorrhoeae
atggcagaccgccagttgcaaccgtttgaaaacgtagaattaggcgaaaagcaagaccagttccaggtatttgaaaaagctgttttggaacacgaaggcaaaggttctgccgaagattccggcacggtcccgctgcccgaaaactacccctgccgcaaacgtatgctccgcgccgcctacgaagccgaaaaagccaaactgcaaatcgaattgctgaaagtgcaaagctgggtcaaagattccggccagcgcatcgtcagcctgtttgaaggccgggatgcggcaggtaagggcggcaccatcaaacgctttatggaacatttaaacccgcgtggcgcgcgcgtggttgctttggagaaaccaaccactaccgaacgcggacaatggtatttccaacgctacatccaaaacctgccgactgcgggcgaaatggtattcttcgaccgctcgtggtacaaccgcgccggcgtggaacgcgtgacgggcttctgcgaacccaacgaatatatgctctttatgtgccaagcccctgagttggaacgtatgcttgtcgccagcggcatccacctgttcaaattctggttctccgtatcccgcgaagaacaactgcgccgcttcatctcccgccgcgacgacgccctgaaacactggaaactttcccccgtggacatccagtcgctcgaccgctgggacgactacaccgaagccaaaaacgcgatgttcttccacacccacaccggcgacgcgccttgggtcatcatccgttcggacgacaaaaaacgcgcccgtttgaactgtatccgctacttcctgcaccagttggactacccgggtaaagacgtgaaagccatcggcaaagtggacgataaaatcgttcttgttcccgatacgcgttacaaagagaaaaccatcgatatcggtcatgac

SEQ ID NO: 28851 - DNA, 916 bp, Neisseria gonorrhoeae
atggaaaaagcagaacatttgaacagcagccggttcgtcaatctggtcaaaagcggcggcggcttatgtggagggcagctaccgtttcgatactttgtccaacggcatttccatccacggcggtacggtaacggcacggtgcgatttttgcagcagccgcctcgccgaaccttatgtgtcgttcgtgctgttgctggaagggcgtttggacttcggcatcaaccgccgccgcttccgcatcgatgcggacggcggcaagattgtcctaattgccgtcggggaagaagtcctgttcagccgctatctttatcgcggcggcaaaacggtcaaaatgaccattaaaggtatggaacaatggctgccgcgtccggaatacgcgcgtttcgcacccctgctttaccgcgaaccggtcaggatatgggatttgcccccaaacctgcgcggcttggcggcatcctgcctgcaaaccgtcccaaaggggcatttgggcgaaacattgcgccgcgaggcggacgtgttgcggctgctgtcggatttgtgggacacggtttcagacggcatcgagccggcggcggggcaaacggcggaagcagacgctatgccgtctgaagacttcagccgcaccctgaatgccgcgttcgacggcggcgcacaccaagtcaaccggctgacagccgcgctgaacatcagcgaaaggacgctgcaacgccgtatgcgcgaccatttcggcattacggcaagcgagtggctgcaccacaaacaaatgcagcacgcgctctatctgttgcaaaacgggggcaaaaacgtgggcgaaaccgcgtatttgtgcggctagcgccacgtttccagctttattcaggcattcaggcaatatttcggcagcacgcctgcggaaactaaaaaagaaaaccggtaa

SEQ ID NO: 28852 - DNA, 2121 bp, Neisseria gonorrhoeae
atggcctatcaagttctcgcccgaaaatggcggcccaaaaccttttccgacttagtcggtcaggaacacgtcgtcaaagccctgcaaaatgccttggacgaaggcaggctgcaccacgcctacctgctgaccgggacgcgcggcgtgggcaaaaccaccatcgcccgcatccttgccaaaagcctcaactgcgaaaatgcgcaacacggcgaaccttgcggcgtgtgccaaagctgcacccaaatcgatgccggacgctatgtcgacctgctcgaaatcgacgccgcctccaacacaggcatcgacaacatccgcgaagtcttggaaaacgcccaatacgcgccgaccgccggcaaatacaaagtctatatcatcgacgaagtgcatatgctttccaaaagcgcgttcaacgccatgctcaaaacgctggaagagccgcccgaacacgtcaaattcatcctcgccaccaccgatccgcacaaagtccccgttaccgtattaagccgctgcctacaattcgtcttacgcaatatgaccgcgcaacaggttgccgaccaccttgcccacgtcctcgacagcgaaaaaatcgcctacgacccccccgccctgcaacttttgggacgtgccgccgccggatcgatgcgcgatgccttaagcctgctcgaccaagccatcgccctaggttcgggcaaagttgccgaaaacgatgtccgccaaatgatcggcgcggttgacaaacaatacctgtacgaactgctgacaggcatcgtcaaccaagacggcgaagccctgctggcaaaagcgcaggaaatggcggcgtgtgccgtcggctttgacaacgccttgggcgaactggccatactgctgcaacaactcgccctgatacaggcagtcccctccgccttggcgcacgacgaccccgattccgatattttgcaccgcctcgcccaaaccataagcggcgaacaaatccagctttactaccaaatcgccgtccacggcaaacgcgacctgggcctcgcccccgacgaatacgccggctttatgatgaccctgctgcgtatgctggcgttcgcccccttggcggcggcttcgtgtgatgcaaacgccgtgattgaaaataccgaacttcaatccccgtcggcacaaaccgccgaaaaggaaaccgccgcaaaaaagccacaaccgcgccctgaagcggatgccgcccaaacgcccgttcagacggcatccgcagcagcaatgccgtctgaaggcaaaactgccggccccgtttcccatcaagaaaacaacgatgttccgccttgggaagacgcgccggacaaaaccgaaaccgcagccggcacggcgcgaacgtcggcaaaaagcattcagacggcatccgaagccgaaacgccgcccgaaaatcaagtttccaagaacaaggcagccgacaacgaaaccgaggcttccttgtccgaagtgccgtctgaaaaccccattcaggcaacaccgaatgatgaagccgttgaaacggaaacatttgcacacgaagcccctgcagaacctttctacggttttccggataatgactgccccccggaagacggcgtggaaatcccgccgcccgattgggcaaatgtcctccctgccgataccgcaggcggagggacggacgaagaagcagaagcgggcggcatcggcggaaacaacacgccgtccgccccgccgcccgaattttccaccgaaaactgggcagccatcgtccggcacttcgcccgcaaactcggcgcggcgcaaatgccggcgcaacactccgcgtggacggaataccgttccgacaccggactgatggttttggcaatgaccgccgaagcccgcgccaccgccgacaaaaagcggctcgacaaaatccgcgacaccctcgcccaagcctacgggctgcaactcaccctgcaaaccgaagactggcgcgacgaagccggccgggaaacccccgcgatgcaggacaagcgtgtccaagccgaagacaggcaaaaagcacaagcattgctcgaagccgaccccgccgcacaaaaaatcctccaagcattcggcgcgcaatggcagcccgaatcactggaattggcggcaaaccggcca

SEQ ID NO: 28853 - DNA, 1974 bp, Neisseria gonorrhoeae
atgccacgcattgccgccctgcccgaccacctcgtcaaccaaattgccgccggcgaagtggtcgaacgccctgccaacgccctgaaagaaatcgttgaaaacagcatagacgcgggcgcaacggcggttgatgtggaactggaaggcggcggcatccgcctcatccgcgtcggcgacaacggcggcggcatccaccccgacgacatcgaactcgcgctccaccgccacgccaccagcaaaatcaaaaccctgaacgatttggaacacgttgccagcatgggctttcgcggcgaaggcttggccagtatcgcctccgtcagccgcctgaccctgaccagccgccaagaagacagttcgcatgcgacccaagtcaaagccgaagacggcaaactcagcagccccaccgccgccgcccaccccgtcggcaccaccatcgaagccgccgaactcttcttcaacacccccgcgcggcgcaagttcctcaaatccgaaaacaccgaatacgctcactgcgccaccatgctcgaacgcctcgcgctggcgcatccgcacattgccttctcactcaaacgcgacggcaaacaagtgttcaaacttcctgcccaaagcctgcatgaacgtatcgccgccattgtcggcgatgattttcagacggcatctttggaaattgacagcggcaatagcgcgctgcggctctatggcgcgattgccaagccgactttcgccaaaggcaaaaccgataaacaatattgcttcgtcaaccatcgttttgtccgcgacaaagtcatgctccatgccgtcaagcaggcataccgcgacgtattgcacaacgcactgacacctgctttcgtccttttcctcgagctgccgcccgaagccgtggatgtcaacgtccacccgaccaaaaccgaaatccgcttccgcgacagccggcaagtacaccaactcgtgttccacacgctcaacaaagcccttgccgacacacgcgccaacctgaccgaaagcgtcagcaacgcaggcgaagtgttgcatgacattaccggcgttacgcctgccccaatgccgtctgaaaacgacggcgaaaatctgtttgatagcgcatccaaccacccgacaggcaacaaacccgatacacgcaatgcctttggttcatcaggtaaaaccgcgcccatgccttaccaggccgcgcgtgcgccgcaacaacacagcctgtccctgcgcgaaagccgcgcggcaatggacacctatgccgaactctacaaaaaaaccgacgacatcgaccttgagttgagccaattcgaacaggcacgtttcggcaatatgccgtctgaaacgcctgctcacaaaacagatacgccgctttcagacggcatcccgtcccaatccgaactgccgccgctcggtttcgccattgcccaattacttggcatctacattcttgcccaagccgaagacagcctgttgctcatcgatatgcacgccgctgcagaacgcgtcaactacgagaaaatgaaacgccaacgtcaggaaaacggcaacctgcaaagccagcacctgcttattcccgtaacctttgccgcgtcccacgaagaatgcgccgccctcgccgatcatgccgaaacgctggcaggcttcggcctggaactgtccgacatgggcggcaacaccctcgccgtccgcgccgcgcccgtaatgttgggcaaatccgatgtcgtctccctcgcacgcgacgtattgggcgaactcgcccaagtcggcagcagccaaaccatcgcatcacacgaaaaccgcatcctcgccacaatgtcctgccacggctcaatccgcgccggccgcaggctcaccctgcccgaaatgaacgcgctgctgcgcgatatggaaaatacgccgcgcagcaaccagtgcaaccacggcaggccgacgtgggtcaaactgactttgaaagaattggacacactgttcttgcgcggacag

SEQ ID NO: 28854 - DNA, 366 bp, Neisseria gonorrhoeae
atgcgtcattacgagatcgtgtttatcgttcatcctgatcaaagcgagcaagtgcccgctatggttgaacgttacaaaaccatgattaccgaggcaaacggtaagattcaccgtttggaagattggggccgccgccaactggcttacccgattaacaaaatccataaagcacattatgttttgatgaacatcgaaaccactcccgaagttgttggggagttggaaaccgcgttccgtttcaatgatgcggtattgcgtcatctgaccatcaaaaccaaacacgccgttaccgaagcctcccctatgctgggcggcgaaaaggctaagaacctgttggtcggcgcggctgaagaagcggctgcccaa

SEQ ID NO: 28855 - DNA, 711 bp, Neisseria gonorrhoeae
atgaagaccaaattaccgctttttatcatttggctgtctgtgtctgcctcctgtgcttccgttttacccgttccggagggcagccgaaccgaaatgccgacacaggaaaatgcttcagacggcattccctatcccgttcccactctgcaagaccgtttggactatctggaaggcaaaatcgtccggctgtcgaacgaagtggaaatgttaaacgggaaagtcaaagcattggagcatacgaaaatacacccttccggcaggacatacgtccaaaaactcgacgaccgcaaattgaaagagcattacctcaataccgaaggcggcagcgcatccgcacataccgtcgaaaccgcacaaaacctctacaatcaggcactcaaacactatcaaaacggcaggttttctgccgcagccgccttgttgaagggggcggacggcggagacggcggcagcatcgcgcaacgcagtatgtacctgttgctgcaaagcagggcgcgtatggggaactgtgaatctgtcatcgaaatcggagggcgttacgccaaccgtttcaaagacagcccaaccgcgcccgaagtcatattcaaaatcggcgaatgccaatacaggcttcagcaaaaagacattgcaagggcgacttggcgcagcctgatacagacctatcccggcagcccggcggcaaaacgcgccgccgcagccgtacgcaaacga

SEQ ID NO: 28856 - DNA, 300 bp, Neisseria gonorrhoeae
ttgggattcactaatcttgtttcgcttgccgcgctgattgaaaaggctttccctattcgatatacgcctgccggaatccctgttttagatattattttaaagcacgaatcgtggcaggaggaaaatgggcagcaatgccttgtccaattggaaatccccgcgcggattttgggtaggcaggcggaagagtggcagtatcggcaaggcgactgcgcaacagtcgaaggttttttagctcaaaaaagcagacgttccctgatgccgatgctcaggatacaaaatattaaagaatataaaggt

SEQ ID NO: 28857 - DNA, 228 bp, Neisseria gonorrhoeae
atggctcgtcaatcattcaaacgtagaaaattctgccgtttcacggctgaaaaaatccaagaagtcgattacaaacaagttgatttgctgaaagactttatctctgaaaacggtaaaatcattcctgcccgcatcacaggaacgaaggcattctaccaacgccaattggctgttgccgtaaaacgcgcgcgcttcttggcactcctgccttataccgaccaacacaaa

SEQ ID NO: 28858 - DNA, 450 bp, Neisseria gonorrhoeae
atgcaaattattctgttagaaaaaatcggcggtctgggcaacttgggcgacatcgttaccgtaaaaaacggttatgcccgcaacttcttgattcctgctggtaaggcaaaacgtgctactgaagcaaacatgaaagagtttgaagcacgccgcgccgaattggaagccaaacaggccgaaattttggcagatgcccgagcccgtcaggaaaaactggacggtcaaaccgttaccgttgcacagaaagccggtgtggacggccgcctgttcggttccgttaccaatgccgacattgctgccgcaatcgttgctgccggcatcgaagccgtgaaagcaaatgtacgtctgccgaacggtcctctgaaagccgttggagagtacgaagtggaagtggctttacacactgatgccgttgctaaaattactgttgccgtcattgccgcagccgag

SEQ ID NO: 28859 - DNA, 2436 bp, Neisseria gonorrhoeae
atgacagaaaaatcccataaaaaaacagcaaaaggcagggcgggaagcccgtccccaacgtccgcacgcaacaagaaagccgacaacggcgcgcggggcaataaagtttccgagcggctcaaggcggtcaaagagctgcagaaaactgaagccaaaaaggcgcgtcccgaacatgtcgtcaacctgattgccgacgcgctgtggctgatgggtttggcggcaaccctgtatttggcgatttccctgatcagtttcgatatgggcgatccgtcttggtcgcacagttcaccggttgtggaagatgccgccaattggggcggactgttcggcgcgtatgttgccgatgtcggctattatcttttcggctggtcgttctggtggtggatagcggctgcctgcgtcgtgctgtataaaaatttccgtctgcacgcaaaacagacggaaaacgaggcatacaaccacaaaatcgctgccgccgcgctgtttgtcctgacggtcttcagccccgtcttggagtattttgtgctgggcggaaaatatgccgactccctgcctgtcggagcaggcggtatggtcggcatacgtgtcggcgcagtgtttgcgtggctgttggggaaatcgggcagcctgctgattatcctggttgttctgctgttgtcgttgtccctgctggtgcagatttcatggctggaatttttgaacggtgcgggcagggcggttcaaaaccgcctgagtgccttatccggcaaggtcatggctttgagaaaacgccggccgaataccaaaacagacggtgtcgatacccaaaatacacggcgcatggtgaaagaagccaaaaacatcactgccaaacccgttgccttgcccgaaggcagcagcagcaaccgcaaatccgtcgcggtttccgttgcgccgccgcctaaaatccaaccttcgctgtttgaagacaatgaagtacagcagaacggcgaataccacaagcctacattgaacctattgcggattcccgacagcgagccggtcagcatcaatcccgccgaattggagcgcactgccgaactaatcgaatccaaactggcagaattcggcatcggcgtacaagtcgtatccgcgacatccggccccgtcatcacgcgctacgaaatcgaacccgcgcaaggtgtcaaaggcagccaaattgttgccctgtcgaaagatttggcacgctctatgtcgctgcaatccgtgcgtatcgtcgaaaccattgcgggcaaaaacacgatgggcatcgagttgcccaacgacaaacgccaagacgtgatgttgagcgaaatcttgtcctcgcccgtgtttgccgaagccaaatccaagctgaccgtcgcgctgggcaaagacatcgccggtacgcccgtcgtcggcgacttggcgaaaatgccgcaccttttggtcgccggcatgaccggttcgggcaaatccgtcggcgtgaacggcatgattatgtctatgcttttcaaagctacgcccgaagaagtccgcttcattatgatagacccgaaaatgctcgagttgagcatttacgacggcattccgcacctactctgtcccgtcgttaccgatatgcgcgaagcagggcaggcgttgaactggtgcgtcgccgaaatggaaaaacgctaccgcctgctctcccacgccggtgtacgcaatctggaaggcttcaaccaaaaagtcgaacaagccaaagcggcaggcaagccgctgctcaatccgttcagcctgaacctcgacgaacctgagccactggaaaaactgccgatgatcgtggtcgttatcgacgaacttgccgacctgatgatgaccgaacgcaaagctgtcgagcagcaaatcgcccgcctcgcccaaaaagcgcgcgccgccggcatacacatgattgtcgccacccaacgcccaagcgtcgatgtcgtaaccggtctgattaaagccaacatcccgacgcgtatggcgtttaccgtgcaaagcaaaatcgacagccgtaccatcctcgaccaaatgggcgcggacgaactgctcaaatatggcgattcgctgttcctgcaaccgggcagtgccgaaccgacccgcctgcaaggcacgtttgtttcagacggcgaagtgcatcaagtcgtcaactacgtcaaatcgcaagccccagccgactatattgaaggtctgctcagcggcgaagccgcgctggaaactgccaatatcgttaatccgaatgcagacagcgacgaattattcgatcaggcagtcgcctatgttttggaaagcaaaaaaacctccatttcgtctttgcagcggcagttgcgtatcggctataaccgcgcggcaaacctgatggaggcactggaaaatgcgggtatcgtttctccctccgacctcaacggcagccgtaaaattttggcgcacaaggaccattta

SEQ ID NO: 28860 - DNA, 1767 bp, Neisseria gonorrhoeae
atgatactgccaacccgattttcagacggcatccccctttccctgcgcctgaaactcctgaccggcttgtgggtcggtttggcggcactgtctgtcgttttaacgctgctgctttctttccgcctggaaaatgccgcctcggtcatcgaagaggcgggcaatctgaagatgcaggcataccggcttgcctatatggcgggcgaaggctcgccccgcgcacaaatcgacaatcagattgccgaatttgaaaaaagtttaaaacgcatttcccaaagcgatgccatccatccgctgattccctccgacaatccccttgcctacgatttgatacagtccatgctgattatcgactggcaggccaacatcctccccccgttgcaggcataccgccgccccacacaaatcgagctttaccgctttgccggcaatatcgaactgtttttgcaggcgttggaaaatgccggcgaaaaaaacacttggtggctcaggcggtttcaatgggtcattatgctgatgacgctggtgtcgtccgtgctgatgcttttttggcaccagatttgggttatccgtccgctgcaggcgttaagggaaggtgcggaacgcatcggtcagcggcatttcgacatccctgttcccgaagacggtacgcccgaattcaaacaggtcgggcggtgtttcaaccaaatggcgctcaggctgaagactttatacgatgatttggaaggacaggttgccgaacaaacccacaaccttgaaaagcaaaaccgcaacctgaccctgctgtaccggaccacgcgcgacctgcatcaatcctatacgccgcgacaggcggcggaagaatttttgaaccacatcctgcccgccgtcggcgcgcaatccggcaacatctgcctggaaaacggttccgacacagacatttccgtccatacggccgaacacggcaaaaagccccctttggaaaaataccatgacgaaaccttccccatcgaatatcaaaacgagaaactgggcatgctttcgctcggcttttcagacggcacttccctcaccggagacgaccgcacgctgcttcaaaccctgattcggcaattgggcgtatcgctcgccggggcgaaacaggaggaagaaaaacgtctgcttgccgtattgcaggaacgcaacctgattgcacaggggctgcacgacagcatcgcgcaggcattaaccttcctgaacctgcaggtacagatgctggaaaccgcctttgccgaaaacaaacgggaggaagccgcagaaaacatcggctttatcaaaacaggcgtgcaggaatgttatgaagatgtccgcgaactgctgctcaatttccgtaccaaaatcagcaataaagaatttcccgaagctgttgccgacctgttcgcgcgcttcacgcaacaaaccgggataacggtcgaaaccgtttgggaaaacggttcgttcctgcctacacaggacgagcagctccaaatgattttcatcctgcaagaaagcctgtccaacatccgcaaacacgcccgcgccacccatgtaaaattcaccctttccgaatacggcggacgctttaccatgaccatccaagacaacggacaaggtttcgacacggagaaaataggagaacctacgggcagccatgtcggactgcacatcatgcaggagcgtgccaaacgcatccgtgccgttttagaaatccgttcccaagcacaacagggaaccaccgtctcattgacgggcgcacccaaagaaagcctacca

SEQ ID NO: 28861 - DNA, 777 bp, Neisseria gonorrhoeae
gtgcaagaccgccgaccggcgcggaaaggaaaggtcaaggcgtaccgggcggtttttgcccgaaccggaggcacaatgccgtctgaaggagtttcagacggcatttttcgcggggaaatgctacaatttgcaccatttttaccgacacagggaaacaggattatgtttacaggcattgttcaaggattgggaaaactgacggcaatccaccgcccgtcggaggcgtttcagacttatgtcgtcgagcttccgcaagaggcggcagaaaacctgcaacacggcgcatcggtcgccaataacggctgctgcctgacgattactgaaatcgaaggaaaccgcgtcagcttcgatttaatggcagaaactttggcaaaaaccaatttggggctgctgaaggaaggcgattgcgtcaacatcgaacgggcggcacgtttcggcgacgaaatcggcggacacgtcatgagcggacacattatggcaaccgtgcccattgtcgaaatcgaacgggacgggttcaaccgcacggtttggtttgcgctcccgcacgaactcaaaccctatatcctgaccaaagggttcgtcggcttggacggttgcagcctgaccataggcaaagtcgaagacagccgtttcaatgtccatctgattcccgaaactttggaacggacgctgttcggcagcagaaaggccggagacaggatcaacatcgaaatcgatccgaatacgcaggcaatcgtcgacaccgtcgaacggctgatggcgcaaagatatgcaaag

SEQ ID NO: 28862 - DNA, 447 bp, Neisseria gonorrhoeae
atgagcaccttcttccggcaaaccgcccaagccatgactgccaaacacatcggccgcttcccgctatcggagttggaccaggtgattgattggcagccgatcgaacaatacctgatccgtcaaaaaacccgttacctccgagaccgccgcggccgtcccgcccatcccctgtcgtccatgttcaaagccgtcctgcccggacaatggcacagcctctccgatcccgaactcgaacacagcctcatcacccgcatcggtttcaacctgttttgccgttttgacggaccgggcatccccggttgcagcaccttatgccgctaccgtaaattccgctatgcgcgggcagcctatttcgggctgctcaaagtgggtgtgcaaagccacctgaaggcgatgtgtttgaacctgttgaaagccgccaacaggctaagtgcgcccgctgccgcc

SEQ ID NO: 28863 - DNA, 432 bp, Neisseria gonorrhoeae
gtgccgctgcctgctccctgccgttttgccaaacctgccgcctcttttttaagtatggctttgctttcctgccagctttcccacgccgccacggcttatatccccccgaacgattttcaaccgaactgcgacatacgccggctcgggctgacacagggtcagcacaatgagctgcgtaaaatccgcgccgccttcaaaatggcgggcgacagggcgcgtttgaaggttatgcattccgaacacagccgccgccgctctgtcgtcgaaatcatttcttcggatgtttttaatcggaacgaggcgcgcgattatgtcgaaagccgctaccactccagcatggattttgcggtggacgaattggaaatccaacaccgcttcttccatattctcacaccgcaacagcagcaaatgtggctttcttcctgcctcaaa

SEQ ID NO: 28864 - DNA, 1263 bp, Neisseria gonorrhoeae
atgaacacactccaacgccgcaagacgcatcaagtcctcatcgatcatatcaccgtcggttcagaagcacccgtcgttatccaatctatgaccaacaccgacactgccgatgcaaaagccaccgcattgcagattaaggaattgagcgatgccggctcggaaatggtgcggattaccgtcaacagccccgaagccgcgtccaaagttgccgaaatccgccgccgcttggacgatatgggctatgccacaccactgattggcgatttccattttaacggcgaacgcctgttggcggaatttcccgaatgcggcaaagcattgtccaaataccgcatcaatcccggcaatgtcggcaaaggcgtaaaaggcgatgaaaaatttgcctttatgattcggactgctgctgaaaacgataaagccgtccgtatcggcgtaaactggggttctttggatcagagcctcgccaaacgtatgatggatgccaacctcgtttcttccgcgccgaaaccgcccgaagaagtgatgaaggaagcactgattgtctccgctttggaatctgccgaaaaagccgttctattgggactgcccgaagacaaaatcatcctgtcgtgcaaagtcagcgcggttcatgatttgattcaggtttaccgcgaactgggcagccgttgcgtctatccgctgcatttgggtttgaccgaagccggtatgggcagcaaaggcattgtcgcatcaacggcggcattatctgttttgcttcaagaaggaattggcgacaccatccgcatttcactcactccggaaccgggcagcccgcgtactcaggaggtcgtcgtcgggcaagagattttacagactatgggtttgcgctcgtttacgccgatggttaccgcctgcccgggatgcgggcgtaccaccagtaccgtatttcaagagctggcacaagatgttcaaaattacctgcgccaaaaaatgtctatatggcgtaccctttatcccggggttgaatccctgaacgttgccgtaatgggctgcgttgtcaatggccccggagaaagcaaattggccgacatcggaatcagccttcccggtacgggggaaacacccgtcgcacctgtttatgtagatggggagcgcaaagtcacactgaaaggtaataatattgcaagcgaattcctagctattgtagaggaatatgttaaaaccaattatggcaaaaacagttctaaacgcaataaaggaaaagtcatcccgatacagtctcta

SEQ ID NO: 28865 - DNA, 1230 bp, Neisseria gonorrhoeae
atgcagacttacctcgtcggcggcgccgtccgcgattatcttttgggcctgcccgtcaaagaccgcgattgggtggtcgtcggcgcagacgcgcaaaccatgttggcgcaaggtttccagccggtcggcaaagattttcctgtattcctccatcccaaaacgcacgaagaatacgccctagcccgcaccgaacgcaaaaccgccaagggttacgccggtttcagtttccacgccgacaaagacgttacgctggaacaggacttgatgcgccgcgacctgaccatcaacgcgatggcgcaagatgcggacggcaagattatcgaccctttcggcgggcaacgggatttggcggcaggcattttgcgccacgtctcgcccgccttcgccgaagatcccgtccgcatccttcgtgccgcccgctttgccgcgcgttacggctttgaaatcgccgaagaaaccataaagctgatgcggcagatggtggaaaacggcgaagcggacgcattggttgccgaacgcgtctggcaggagttggcgaaaggtttgatggaaaaaaatccgcgcaaaatgattgaaatgttgcgcgaatgcggcgcactccaagtcttgctgcccgaagtcgacgccctcttcggcgtgccgcaacgcgccgactaccatcccgaaatcgacagcggcatccataccctgatgacgctgcaacgcgccgccgatatgggtttgagcctgcccgaacgctatgccgccctgctgcacgacttgggcaaagccaaaacaccgcccgacatcctgccgcgccaccacggacacgacatcaacggcgtagaacccgtgcgcgaagtcaatcaacggctgcgcgcgccgaggcagtgtgccgagcttgccgaattggtttgccgttggcacattattttccaccaagtcggacagcttaaaagccaaaccattctgaacgtattgaaaaaaaccgatgccttccgccgtcccgagcgttttcagacggcattgaacgtctgcattgccgacacgcaaggccgtctgaaccgcgaacacacgccctacccgcaacgcgcgcactggctcgccctgctcgaagccgccaatcaggcggattcgggcaaaatcgccgccgaatgccgcgcgcagggaaaagcgcactttatcgccgaacaaatcgaccgggcgcggctggcgcaaatcgccccgctgcaaaaaacgtttcggggcgcg

SEQ ID NO: 28866 - DNA, 1626 bp, Neisseria gonorrhoeae
atgatttctaccaacggcattaccatgcagttcggcgcgaagccgctgtttgaaaacgtatccgtaaaattcggcgaaggcaaccgctacggcttgatcggcgcgaacggttcgggcaaatccaccttcatgaaaatcctcggcggcgatttggaacagaccgccggcgaagtggcgattgaaaacggcgtgcgtttgggtaaattgcgccaagaccagtttgcctacgaagacatgcgcgtgctggacgtggtgatgatggggcataccgaaatgtgggcggcgatgaccgagcgcgatgcgatttacgccaatcccgaagccaccgaagacgactacatgaaagccgccgaactggaagccaagttcgccgaatacgacggttacaccgccgaagcgcgcgccgccgaattattaagcggcgtgggcatttccgaagatttgcacaatgcgaaaatggcggaagtcgccccgggcttcaaactgcgcgtattgctggcgcaggcgctgttctccaagccggatgtattgctcttggacgaaccgaccaacaacttggacatcaataccatccgctggctggaaggcgtgttgaaccaatacgactccaccatgatcatcatctcgcacgaccgccacttcttgaacgaagtttgcacccacatggcggatttggactacaacaccatcactatttatccgggcaactacgacgactatatgctcgcttccgcccaatcgcgtgagcgcgccctgaaagacaatgccaaagccaaagagaaactgcaagagctgcaagaattcgttgcccgtttttccgccaataaatccaaagcccgtcaggcaaccagccgtctgaaacaggccgacaaaatcaaatcggaaatggtcgaagtcaaaccttctacccgtcaaaacccgtatatccgttttgaagccgatgaaaaagccaagctgcaccgtcaggctgtggaagttgaaaaactggccaaacgctttgaaacccagttgtttagaaacctcaacttcatccttgaagcaggccaacgcctcgccatcatcggcccgaacggcgcaggtaaatctaccttgctgaaactcttggccggcgcgtacaaccccgaatattcagacggcctgttgccggacgaaggcagcatcaaatgggcggaaaaagccagtgtcggctactatccgcaagaccatgaaaacgactttgacgtcgatatggacttgagcgaatggatgcgccaatggggtcgggaaggcgacgacgaacaagtcatccgaggcactttggggcgtttgcttttcggcagcaacgacgtggtaaaaaaagtgaaagttctctccggcggcgaaaaaggccgtatgctttacggcaaactgttgctgttgaaacccaatgtcttggtcatggacgaaccgaccaaccatatggacatggaaagcatcgaatcgctgaacatggcactggacaaatacaacggcacgctgattttcgtctcccacgaccgtcagttcgtttcctccctggcaacccaaatcatcgaactggacggcaaaggcggatatgaacactacttgggcgattacgaaagctatctcgagaaaaaaggcgtagca

SEQ ID NO: 28867 - DNA, 1215 bp, Neisseria gonorrhoeae
atggcgttaatcgtacataaatacggcggcacatccgtaggctcgcccgagcgcattaaaaacgtggccaaacgtgtcgctaaagcccgcgccgaaggacacgatatcgtcgtcgtcgtatccgccatgagcggcgaaaccaaccgtctggttgcgttggcgcacgaaatgcaggagcatcccgatccgcgcgagctggacgtcgtcttagctaccggcgaacaagtaaccatcggccttttggcaatggcattgaaggatatcggcgtggatgccaaaagctacacaggctggcaggtctccctcaaaaccgataccgcccacaccaaagcccgcatagaaagcattgatgacgaaaaaatgcgcgccgacctcgccgccggcaaagtcgtcatcgttgccggcttccaaggcatcagcagtgaaggcaatatttccacgctaggacgcggcggttccgacacttccgccgttgcgcttgccgcagccctcaaagcggacgaatgccaaatctataccgacgtagacggcgtttacaccaccgacccccgcgtcgtacccgaagcgcgccgtatggatacggttacatttgaagaaatgatcgaactggccagcctcggttcgaaagttttgcaaatccgttcagtagaattcgccggaaaatacaaagtgcgcctgcgcgtactgagcagcctgcaagacggcggcaacggcaccttaattacctttgaagaggacgacaacatggaaagagctgccgtaaccggtatcgcattcgataaaaaccaagcccgcatcaacgtgcgcggtgtgcccgataagcccggcgtcgcctatcagattttgggcgcggtcgcagatgccaacatcgaagtcgatatgattatccaaaatgtcggcagcgaaggcacaaccgatttttctttcaccgtaccgcgcggcgattacaaacagactttggaaatcctgtcggaacgtaaagacagtatcggcgcagcttctatcgacggcgacgacaccgtgtgcaaagtctccgcagtcggtttgggtatgcgttcgcacgtcggcgtagccgccaaaatcttccgcacgctcgccgaagagggcatcaacatccaaatgatttccacctccgaaatcaaagtttccgtattgattgacgaaaaatacatggaactggcaaccagggtattgcataaagcctttgatttgggc

SEQ ID NO: 28868 - DNA, 618 bp, Neisseria gonorrhoeae
atgatgaattccaaaaaacaggatgcattccaacgcctgatcggtgcgctgaaagtattgcccaacgtcgggccgaaatcggcacagcggatggcgtaccatctgttgcagcaaaagcgcaaagaggctgaagagctggtggatgccttacagacggcattgaggcaggtttgccattgcgcaaggtgcaatacattttgcgaaggcggattgtgcgatatttgtgccgatgaaacacgcgacgggcggcggctgatggtggtgcatatgcctgccgacgtgtcgaatatagaagcggcaaactgccacgacgggctgtatttcgtcctgatggggcaaatcaatacggcattgggaatggacgtatccgccatcgcattggacaggctggcgcaacggctggacggcggggaaatcgaagaaatcattatcgcgaccgcctttaccgcagaaggcaatgccacagcgtatgtcctgtccgagtttttcaaaaacctgccttacaaggtcagcaggctgtcgcagggcatcccattgggcggcgaattggaatatgtcgatgcgggaacgctggcgcaagcggtgtacgaacggcgtctgattaaagaaggcggggcg

SEQ ID NO: 28869 - DNA, 1206 bp, Neisseria gonorrhoeae
atgaccggcatcatacattcgctgctcgacactgacctctacaaattcactatgctgcaagtagtcctgcaccagtttccgcagacgcacagcctttacgaattccgctgccgcaacgtctcgaccgtctatccgcttgccgacatcagggaagacttggaagccgaactcgacgcgctctgccggctgcgcttcacccacgacgaactcggctatctgcgctccctgcgtttcatcaaaagcgactttgtcgattatctcgaactcttccagctccaacgccgctttgtcgaagtcggcacagacgataaaggccgtctgaacatccgtatcgaaggcccgatgatacaggcgatgttttttgaaatcttcatcctcgccattgtcaacgaactttacttccgccggctggaaacccctgccgttatcgaagaaggcgaacgccggcttcaagccaaagccgcgcgcctgaaagaaatcgccgccgcacagaatccggacgaaccgcccttcctgatttccgacttcggcacgcgccgccgctacaagctcgcgtggcaggaacacgtcatccgcaccctgctcgaagccgccccaagcatcgtgcgcggcacaagcaacgtttacctcgccaaaaaactcggcatcacccccatcggcaccatggcgcacgaattcctccaagccttccaagccctcgacgtgcgcctgcggaatttccaaaaggccgcgctcgaaagctgggtgcacgaataccggggcgatttgggcgttgccctgaccgacgtggtcggtatggatgccttcctgcgcgatttcgacctctatttcgccaaactctttgacgggctgcgccacgacagcggcgacccttacgtttggggcgacaaagcctacgcccactatcaaaagctcaaaatcgacagccgcaccaaaatgctgaccttctccgacgggctggacatcgaacgctcttgggcattgcaccaatatttcaaaggccgcttcaaaaccggcttcggcatcggcaccaacctcaccaacgatatggggcatacgcccttgaatatcgtgttgaaactggtcgaatgcaacgggcagtccgtcgccaagctctccgactcgccgggcaaaaccatgaccaacaacagcaccttcctcgcctacctgcgccaagtgttcggcatacccgaacctagaacgccg

SEQ ID NO: 28870 - DNA, 1716 bp, Neisseria gonorrhoeae
atgaacctacatcaaaccgtcgaacacgaagccgccgccgcctttgccgccgcaggcatcgccggcagccccgttgtcttgcagccgaccaaaaatgccgagcacggcgatttccaaatcaacggcgtgatgggtgcggcgaaaaaagccaaacaaaatccgcgcgaactggcgcaaaaggtcgccgacgcattggcgggcaacgccgtcatcgaaagcgcggaagtggccggacccggctttatcaacctgcgcctgcgccacgaatttctcgctcaaaacattcatgcggctttgaacgatgcgcgtttcggcgtagcgaaaactgcccaaccgcaaaccgtcgtcatcgactattcctcgcccaatctggcgaaggaaatgcacgtcggccatctgcgttccagcatcatcggcgacagtatttcgcgcgtgttggaatttacgggcaacaccgttatccgtcaaaaccacgtcggcgactggggtacgcagttcggcatgttggtcgcttatttggtcgagcagcaaaaagacaatgccgcgttcgagctggcggatttggagcagttttaccgcgccgccaaagtgcgctttgacgaagaccctgcctttgccgacaccgcacgcgaatacgttgtgaagctgcaaggcggcgatgaaaccgtgttggcgttgtggaaacagtttgtcgatatttcgctctcgcacgcccaagccgtttacgacacgctgggcttgaagctgcgccccgaagacgtggcgggcgaatcgaaatacaacgacgatttgcagcccgtagccgatgatttggttcaaaaaggcctggcggttgaggacgacggcgcgaaagtcgtgttcttggacgagttcaaaaacaaagagggcgaacctgccgcatttatcgtgcaaaaacaaggcggcggcttcctttatgcttccaccgatttggcgtgcctgcgctaccgcataggccgtctgaaagccggccgcctgctgtacgtcgtcgaccaccgccaagccctgcacttcgaacaacttttcaccacttcccgcaaagcaggctatctgcctgaagatgcaaaagccgagtttatcggcttcggcaccatgatgggcaaagacggcaaaccgttcaaaacgcgcagcggcgacaccgtaaaactggttgacctgctgaccgaagccgtcgagcgcgccaccgctttggtgaaagaaaaaaatcccgaattgggcgcggatgaagccgccaaaatcggcaagaccgtcggcatcggcgcagtcaaatacgccgacttgagcaaaaaccgcaccagcgattatgtgttcgactgggacgccatgctctcatttgaaggcaacaccgccccctacctgcaatacgcctacacccgcgtgcaaagcgtgttccgcaaagccggagaatgggacgcaaccgcaccgaccgttttgaccgaaccactggaaaaacagcttgccgccgagcttctgaaatttgaaaacgtgctgcaaagcgtggcggacaccgcgtatccgcactacctcgccgcctacctttaccaagccgccaccctgttcagccgcttctacgaagcttgcccgattttgaaagccgaaggcgcaagccgcaacagccgcctgcaactggcaaaactcaccggcaacacgctgaaacaaggcttggatttgctgggcatcgatgtgttggacgtaatg

SEQ ID NO: 28871 - DNA, 1776 bp, Neisseria gonorrhoeae
gtgccttcagacggcatttcgacaaggaatacgatggaactgcagacagatgaatttgcccaagcggcggcaagggcggcaatccgttttttggaacgctatgcgggttcgggcaacgaagtgcttgcaaactgtaccgaacgcctgtttcaggcattgcaaaacggtcattcgtttatccgtttgagcggggacgaggctgacgcgctgtcggcactcgcacccgtggtcggaacatccgccgcgcctttgattttggaaggcagaaggctgtttttgggcaggatgtggcagttggaatacgatttggctgccgaaataaaacgcttggcggcagccggcacgtccgcccccgacgcggcaggcgcgcggcaaaacctcgcaaaatggtttcaaggcgcgggaagcgaaggacagcgcgatgcggccgccttggcactgttgcagttttttatggtgattaccggagggccgggaacgggcaaaacgacaacggttgccaaactgctggcactgatttgcggtgaaaacgaaaatcttccccatatcgcgcttgccgcaccgacgggcaaagcggcggcacatatggcgcgcgcactgcaccgttcaatcaacggttttgacgcgccggaggccgtccgccgccatttgctcaaactggaagggcaaaccgtccaccgactgcttaagctgagcccgcccaaaatgcaggcggcgttcgaccatatccgtccgctgccgttcgacgtgctgattgtcgatgaagcctccatgttggataccgcattgatgctgcaacttttgaaagcggtcaaaaccggcgcgcgcgtgattctgctgggcgatgaaaaccagctcccgtccgtcggaatcggggcggtgctgtccgttttgtcgcaaaaaaccgttttggacggagaaacgcaccaaaggctggccggtttccttccggaacacggtttcagcgtcagcgcaaatccgcccgtgttggcgcaaaacaccgcccatctgtcgttcagccaccgcttcggcgacaacagcggcatcggctgccttgcccgtgccgccgtatcgggcgatgaaggggcgtgggcattgtttgaccggtttccggacgaactggaacattcggaatgcagtccgaatgctcgggtcgaaaggttgtaccgggcgcacaaagcctattggcaggcggtaaaagacggcaatatcgaagccgcatacgcaggcatctcggatatcgtggttctggcagcttggcggcaggatgcggaagacttcaacgaagcctattgcagctatgtacgccgcaaaatgaacataccggaacatttggcctatttcgccggagagccgattatgatcagacagaacgactacgcgcttgagctgttcaacggcgacatcggactgattatggaagatgtcggacggcagggcagccttgccgcctattttgccgatgcggacggatttaaaaaggtagcggtaagctgcctgcccgaatttgaacccgcattcgccatgaccgtccacaaaagccaaggttcggaatatcgggaagtctggctgctgccgccttccgacgcaccttcggacgaaggggacgatgcattgtccggattgagtaaggagctgttatataccgccattacccgcgccagggaaaaattcgtatttttcggcggcaaaaagacattttgtcaggcggtaaacaccgtcaaagtccgtcagacggcgttgggcagtatgcttgagcgggtattttcacaagaa

SEQ ID NO: 28872 - DNA, 1677 bp, Neisseria gonorrhoeae
atggaaaattttgctcagctgttggaagaaagctttaccctgcaagaaatgaacccgggtgaggtgattaccgctgaagtagtggcaatcgaccaaaacttcgttaccgtaaacgcaggtctgaaatcagaatccctgatcgatgtagctgaattcaaaaacgctcaaggcgaaattgaagttaaagtcggcgacttcgttaccgttaccatcgaatccgtcgaaaacggcttcggcgaaaccaaactgtcccgcgaaaaagccaaacgcgcagccgattggatcgctttggaagaagccatggaaaacggcaacatcctgtccggcatcatcaacggtaaagtcaaaggcggcctgaccgttatgatcagcagcatccgcgcattcctgccgggttctttggtcgacgtacgtcccgttaaagacacttcccattttgaaggcaaagagatcgaattcaaagtgatcaaactggacaaaaaacgcaacaacgtcgttgtttcccgccgcgccgttttggaagccactttgggtgaagaacgcaaagccctgctggaaaacctgcaagaaggctccgtcatcaaaggcatcgtcaaaaatatcaccgactacggcgcattcgttgacctgggcggcatcgacggcctgctgcacatcaccgatttggcatggcgtcgcgtgaaacacccgagcgaagtcttggaagtcggtcaggaagttgaagccaaagtattgaaattcgaccaagaaaaacaacgtgtttccttgggtatgaaacaactgggcgaagatccttggagcggtctgacccgccgttatccgcaagccacccgcctgttcggcaaagtatccaacctgaccgactacggcgcattcgtcgaaatcgaacaaggcatcgaaggtttggtacacgtctccgaaatggactggaccaacaaaaacgtacacccgagcaaagtcgtacaactgggtgacgaagtcgaagtcatgattttggaaatcgacgaaggccgccgccgtatctctttgggtatgaaacaatgccaagccaatccttgggaagaatttgccgccaaccacaacaaaggagacaaaatctccggtgcggttaaatccattaccgatttcggcgtattcgtcggcctgcccggcggcatcgacggtctggttcacctgtccgacctgtcttggaccgaatccggcgaagaagccgtacgcaaatacaaaaaaggagaagaagtcgaagccgtcgtattggcaatcgatgtggaaaaagaacgcatctccttgggtatcaaacaactggaaggcgatcctttcggcaacttcatcagcgtgaacgacaaaggttctttggttaaaggttccgtgaaatctgttgacgccaaaggcgctgttatcgccctgtctgacgaagtagaaggctacctgcctgcttccgaatttgcagccgaccgcgttgaagacttgaccaccaaactgaaagaaggcgacgaagttgaagccgtcatcgttaccgttgaccgcaaaaaccgcagcatcaaactttccgttaaagccaaagatgccaaagaaagccgcgaagcactgaactccgtcaatgccgccgccaatgcgaatgccggtaccaccagcttgggcgacctgctgaaagccaaactctccggcgaacaagaa

SEQ ID NO: 28873 - DNA, 744 bp, Neisseria gonorrhoeae
atggattttcgttttgacattatttacgaataccgctggatgtttctttacggcgcactgacgaccttggggctgacggtcgtggcgacggcgggcggttcggtattgggtctgttgttggcgttggcgcgcctgattcacttggaaaaagccggtgcgccgatgcgcgtgctggcgtgggcgttgcgtaaggtttcgctgctgtacgttaccctgttccggggtacgccgctgtttgtgcagattgtgatttgggcgtatgtgtggtttccgtttttcgtccatccttcagacggcattttggtcagcggcgaggcggcaatcgcgctgcgtcgcggatacgggccgctgattgccggttctttggcactgatcgccaactcgggggcgtatatctgtgagattttccgcgcgggcatccagtctatagacaaaggacagatggaggcggcgtgttctttgggactgacctatccgcaggcgatgcgctatgtgattctgccgcaggcattgcgccgtatgctgccgcctttggcgagcgagttcatcacgctcttgaaagacagctcgctgctgtcggtcattgctgtggcggagttggcgtatgttcagaatacgattacgggccggtattcggtttatgaagaaccgctttacaccgccgccctgatttatctgttgatgacgactttcttaggctggatattcctgcgtttggaaaaacgttacaatccgcaacaccgc

SEQ ID NO: 28874 - DNA, 654 bp, Neisseria gonorrhoeae
atgaacagacaaaaagtcatcgccatcgacggtccgggcgcatcgggcaaaggcacggtcgccgcccgcgttgccgccgcattgggatacgattatctcgataccggcgcgctctaccgcctgaccgccctatatgcacaaaaacaaggcgtggaatggcacgatgaagaaaacgtttccgcacttgccaaaaaactgcccgccgtattttcaggcaaccgcatcctacttgatggcgaagacgtttcagacggcatccggacagaagccatcggtatgggcgcatccgcagttgcgcaatggcccaaagtccgcgccgcactgctgcaacgccaacgcgattttctgaccgaaaaaggactggttgccgacggacgggacaccggatcggtcgtcttcccccaagccgaactcaaaatttttctgacagccgaatctaaaatccgtgccgaacgccgcgccaaacaaatcggcattccctgcgaaggtttcacattcgagcgcatcctgtccgacatcgagaccagagacgaagcagaccgaaaccgcaaggttgcccccctgaaacaacagcccgatgccctgcttttggatacgagccgcctaactatagaagaaactgtaaaaaaagtgcttgattggtatcgtaaagtt

SEQ ID NO: 28875 - DNA, 690 bp, Neisseria gonorrhoeae
atgaaactcatcaaatacctgcaatatcaaggcataggaagccgcaagcagtgccaatggctgattaggggcggctacgtctccatcaacggaacctgcatggacgacaccgatgcagacatcgattcctcatacgtcgaaacgttggatattgacggggaagcagtaaccgtcgttcccgaaccctatttctacatcctgctcaacaagcctgaagattacgaaacttcgcacaaaccgaaacactaccgcagcgtattcagtctgttccccgacaatatgcggaacatcgatatgcaggcggtcggcaggctggatgcggatacgaccggcgtattgctgattaccaacgacggcaaactgaaccacaacctgacttcgccgagcagaaaaattcccaagctatacgaagtaacgctcaaacaccctacaggagaaacgctctgcgaaactttgaaaaacggcgtgccgctccacgacgaaaacgaaaccgtttgtgccgccgatgccgttttggaaaatccgaccaccctgctgctgaccattaccgaaggaaaataccaccaagtcaaacgcatggttgctgccgccggcaaccgcgtgcaacaccttcaccgccggcgattcgcacatttggaaacagaaaacctcaaacccggggaatggaaatttatcgaatgtccgaaattc

SEQ ID NO: 28876 - DNA, 480 bp, Neisseria gonorrhoeae
atgacgaatatccgtatcggacagggctacgatgtccaccaattgaccgaaggcagaaagctgatacttggcggagttgaaatcccatttgaaaaagggctgctcgggcattcggatgccgacgcgctgctgcacgccgttaccgacgcgctgctcggtgcggcaggtttgggcgacatcggcagccattttcccgacaccgccgcagagttcaaagatgcggacagccgcgtccttttgcgtgcggcgtatcaaagcgttcaggcgcagggttggcaggtggtcaatgtcgatacgaccgtgattgcacagaaacccaaactcgcaccgcacattccgcaaatgcgtgccaacatcgccgccgatttgggtatcgatatttcgtgcgtcaatatcaaaggcaaaaccaacgaaaaactcggctatctcgggcggatggaaggcatagaggcgcaggcggcggtattgctggtacggatt

SEQ ID NO: 28877 - DNA, 2460 bp, Neisseria gonorrhoeae
atgacacaaaaagaaaagcattttgaggaatatgctgctttggcgacccttcctttacgggatgtcgtcgtttacccgcatatggttctgccgctgttcgtcggcaggccgaaatccatcgccgcactggaaaacgccattacccgcgaggaaccggttttcctgttggcgcaaaccgatgcggcggtagaagaaccggttgccaccgacctgtatcagaccggtaccgtcgcacaagtcctgcaagtgttgaaactgcccgacggcacggtaaaagtgctggtcgaagggctgtatcgcggacgtgttttgaccatcgaagacacgggcgggctgttcgtttctcatatagaggcggtcgtggaagaagacacgggcggcaataccgacctcgaagccgtgcgccgcaccctgttggcgcagtttgaacaatacgccaaactcaataaaaaaatccctgccgaaattatcggcagcatcaacggcattgccgaaaacagccggctaaccgatacggtcgcagcgcatttgcagttgaaactggcgcaacgccaacagattttggagattcccgaaatcggcaaacggatggaattcctgctggcaaagctggaatccgaactcgacattatgcaggccgaaaaacgcatacgcggacgcgtcaaacgccaaatggaaaaatcccaacgcgaatattatctgaacgaacagattaaagcgatacacaaagaattgggcgaagaagacgaaaacggcgaactggatgccttggaggcaggcatcaaaaaggcgggtatgaccaaagaagcggaagaaaaatgcctgtccgaactgaaaaaactcaaaatgatgccgccgatgtctgccgaatccaccgtcgtacgcaactacatcgacaccctgctcggactgccgtggaagaaaaaatcccgcgtcagcaaagacatcgccaaagccggactggtgctggatgccgaccactacggcctggaaaaagtcaaagaacggattttggaatacctcgccgtccaaaaacgtatggacaagctcaaaggtccgattctgtgtttggtcggccctccgggcgtgggcaaaacctctttgggcgaatccatcgccaaagcaacggggcggaaatatgtccgtatggccttgggcggcgtgcgcgacgaaagcgaaatccgcgggcaccgccgtacctatatcggctctatgcccggcaagattttgcagaatatggcaaaagcaggcgtaagaaacccgttgttcctgctcgacgaaatcgacaaattgggcagcgactttcggggcgatcccgccagcgcgttgcttgaagtgctcgatcacgaacaaaacaacaagttcgccgatcattatgccgaagtggattacgatttgagcgacgtgatgtttattgcgacttcaaacagcctgaatatcccgaccccgctgcttgaccgtatggaaatcatccgtctgtccggctataccgaagacgagaaaatcaatatcgcgatgcagtatctcgtaccgaagcaaatgaaacgcaacggcgtgaaagaaggcgaattggtggtcgaagaaagcgcggtacgcgatattatccgttattacacccgagaggcgggcgtgcgttcgctcgaccgcgaaattgccaaaatctgccgtaaggtggtgatgcagattaccttgaacgaagataagaagaggttgtctgaaaccaagaaaaccagcaaagccaagcctagggcggttaaagtcaatgagaaaaacctacatgactacttgggcgtgcgccgcttcgattacggcgttgccgaaagtgaaaaccgcatcggacaggttaccggtttggcttggacggaagtcggcggcgaattgctgactgtcgaagccgcagcattaccgggtaaaggcatgatccagtgtaccggccagttgggcgatgtgatgaaggaatctgtatccgctgcatggtctgttgtccgttcccgtgcggaatcagtaggtttggctcctgatttttacgagaaaaaagacattcatgtccatgttcccgaaggtgcaacgccgaaagacggtccgagcgcaggcattgctatgactttggcgatggtgtccgcctttaccaaaattccggtgcgtgccgatgttgccatgacgggcgaaattaccctgcgcggcgaagtcctgccgatcggcggtctgaaggaaaaactgttggctgcgcttcgcggcggcatcaaacacgtcctgattccgaaagacaatgtcaaagacctggaagaaatccctgaaaacgtgaaaaccggattaaccatccatccggtcaaatggatagacgaggtattggctttgggtttggaaagccggcctgagtcttgggcagaaccttctgccgcggaagcggcggcggaatccgcttcaaaaccgaaaccccgcagcagggcaatcaaacat

SEQ ID NO: 28878 - DNA, 687 bp, Neisseria gonorrhoeae
atgaaacgcaaaaatatcgcgctgattcccgccgccggcatcggggtgcgtttcggtgcggacaaacccaagcaatatgtcgaaatcggaagcaaaaccgttttagaacatgtacttgggatttttgaacggcatgaggccgtcgatttgaccgtcgttgtcgtctcgcccgaagacacgtttgccgataaggttcagacggcatttccacaggttcgggtgtggaaaaacggtggacagacccgcgccgaaactgtccgcaacggtgtggcaaaactgttggaaaccggtttggcggcggaaaccgacaatattctggtacacgatgccgcccgctgctgcctgccgtctgaagctctggcgcggttgatagaacaggcgggcaacgccgccgaaggcgggattttggcagttcccgttgccgatacgctcaagcgcgcagaaagcggacaaatcagtgcaactgtcgaccgttcggggctttggcaggcgcaaacgccgcagctttttcaagcgggtttgctgcaccgcgcattggctgcggaaaacttgggcggcattaccgatgaagcgtccgccgtggaaaaactgggtgtgcgtccgctactgatacagggcgacgcgcgcaatttgaaactgacgcagccgcaggacgcatacatcgtcaggctgctgctcaatgccgtc

SEQ ID NO: 28879 - DNA, 267 bp, Neisseria gonorrhoeae
gtgaacaagtctgaattgatcgaagcgattgctcaagaagccgatatttccaaagccgccgcacaaaaagctttggatgccactaccaacgcagtaaccaacgccctgaaacaaggcgacaccgttactctggtcggtttcggtactttctacgtcggcgaacgtgcggaacgccaaggccgcaaccccaaaaccggcgagcctctgaccattgccgccgccaaaacgcttaaattccgtgcaggtaaagcattgaaagacgcactg

SEQ ID NO: 28880 - DNA, 825 bp, Neisseria gonorrhoeae
atgccggaattgccggaagtggaaacgacgttgcgcggcatcgcgccgcatattgaaggaaaaacggtggaagccgtgatattgcgccaactgaagctgcgctggcagatcaatcccgatttgggggagattttgtccggccggcaggttttgtcctgcggcaggcgtgccaaatatctgattgtccgtttccaaacggggattttgctgattcacttggggatgtcgggcagcttgcggatctttacgccgtcggacggacgtatcggcaggccggacagacacgatcacgtcgatattgtgttttcagacggcacggtcatgcgttaccgcgatccgagaaagttcggcgcgatactttggtatgagggaatcgaagaacgtcatccgctgttggaaaaactggggccggagcctttgtcggaggcattttgcacggattatctgtatgcggggctgaaggcgcagaaacgcgcggtcaaactcgctctgatggacaataccgtcgtggtcggcgtgggcaatatttatgccaacgagagtctgttcagggcgggcatttcgccccaccgtcctgccaaccgcctaaaaaagaaagagtgcgcggttttggttgaaaccgtcaaagcggtgttgcagcgcgccattgaaacgggcggcagtacgctgagggattttgtggacagcgacggcaaaagcggctactttcaacaggaatatacggtgtacgggcggcacaatcagccgtgcctccggtgcggcggtttggttgtgaaagaaactttggggcagcgcggcacgttttattgcacgaactgtcagaaa

SEQ ID NO: 28881 - DNA, 2232 bp, Neisseria gonorrhoeae
ttggaagccattgatttggataagattcaccgtgtcgttacttgggcggcggaaggattggaaaatgtttccgtgtcgcaggtcgagttgaaatcgcacatccagttctacaacggcatccgcaccgacgacatccacgaaaccatcatcaaagccgctgcagatttaatttcggaagataccccggactaccaataccttgccgcacgtttggcgattttccatcttcgtaaaatagcctacggcgaatacgagccgccgcacctttacaaccatgttaaaaagctcaccgatgccggaaaatacgacaggcatatccttgaggattacagccgcgaagaatttgacgaactgaacgcctatatcgaccacgaacgcgatatgtccttttcctatgccgccgtcaaacagctcgaaggcaaatatctggtacagaaccgcgttacccgccagatttacgaaacgccgcagtttttatatgttttggtggcgatgtgccttttcagcaaatacccgaaagaggcgcgcttggattacgtcaaacggttttacgatgccgtttccacattcaaagtatcgttgcccacgccgattatgagcggcgtgcgtacgcctacgcgccagttctcaagctgtgtgctgattgaatgcgacgatagtttggattccatcaatgccactaccagcgcgattgtgaaatacgtttcccaacgcgcgggcatcggcatcaatgccggacgtatccgcgggctggacagcgaaatccggggcggtgaagcccggcataccggctgcattcccttctttaagatgtttcaggcggcggtcaaatcttgttcgcaaggtggcgtgcgcggcggcgcggcaaccttgttctaccccttgtggcatattgaagccgaaagcctgctggtgttgaaaaacaaccggggcgtggaagacaaccgtatccgccagcttgattatggcgtgcaaatcaaccgcctgctgtacacccgcctgattaagggcggcaacattacgctgttttcgcccaacgaggtttcggggttgtacgaagcgttttttgccgaccaagacgaatttgagcggctctatacgaaatacgagcaagacccgaacatacgcaagcgtatcattccggctgccgacctgttttccacgctgatgcaggagcgtgccgggaccgggcgcatctacattcaaaacgtcgatcactgcaatacgcacagcccgttcgatccgcgcgttgcgcctgttcatcagtccaacttgtgtatggaaatcgccctgccgaccaaaccgctggacaacatcaacgaccctgacggcgaaatagccctgtgtacactgtccgccttcaacttgggtgcattaaacagcttggacgaattggaagggcttgccgatttgaccgtgcgcgcactcgatgcacttttagattatcagggatatccggtagaagccgcgcgtacctctactatggaccgccgttcgctcggcatcggtgtcatcaactacgcctactatctggcgaaaaacggtgtccgctacagcgacggttccgcgctcggtctgacccaccgtacctttgaagccatacagtattacctgctcaaagcatcggcaaaccttgccaaagaatacggagcgtgcacgctctttaaccaaaccgtttattcgcaaggcaaactgcccatcgacacctacaaaaaagatttggatgccgtctgcggcgagcctttgcattacgactgggaaagcctgcgtgccgacatcgtcaaatacggcctgcgcaactctactctgaccgcgctcatgccgtctgaaaccagctcgcaaatcgccaacgccaccaacggcatcgagccgccgcgcggattggtaacggtcaaagcatcgaaagacggcattttgaaacaagtcgtgccggagtttgaaaccttgaaaaatgcctacgaaaccctgtggcagcttccgggcaacgaaggctacctgaaacttgtcggcgtaatgcaaaaattcgtcgatcaggcgatttccgccaacactgcttacgacccgggcaaattcgaaggtaacaaagtttctatgaaacaaatgctcaaagacctgctgactgcctacaaatacggcgtcaaaaccctgtactaccacaacacccgcgacggcgcggacgacacgcagaccgatattcaagatgacggctgcgctggtggggcttgtaagatt

SEQ ID NO: 28882 - DNA, 1152 bp, Neisseria gonorrhoeae
atgtcctgcgaacacctagtcatgtcatacagcacctttcccaaaaccaaaaacgacgcgctgaaagagccgatgtttttcggtcagccggtaaatgtcgcccgttatgaccagcagaaatacgaggtatttgaaaaactgattgaaaaacaattgtcgtttttttggcggccggaagaaatcgacgtgtcgcgcgaccgtatcgactacgccaacctgcccgaacacgaaaaacatattttcatcagcaatctgaaatatcaaacactgctcgattccatccaagggcgcagtccgaatgttgccttgctgcctttggtttcgattcccgagctggaaacttgggttgaaacgtggagcttcagcgaaaccatccactcgcgcagctatacccacatcatccgcaatattgtgaatgatccgtcggtcgtgtttgatgatattgtcgaaaacgaatacattaccgcccgcgccgaagacattgcctgctattatgatgatttaatcgaatacacccaatattacaacctgttgggcgaaggggtgcacaatgtcggcggaaaacccgttactgtgtctttgcgcgggttgaagaaaaaactctatctctgcctgatgtgcgtcaatgtgttggaagccatccgtttctacgtttcatttgcctgctcgtttgcttttgctgagcgtgagttgatggaaggcaacgccaaaatcatcaaactgattgcccgcgatgaagccctgcacctgaccggcacgcagcatatgcttaatctgatgcgttcgggtgttgatgatccggaaatggcggaaattgccgccgagttgcaggacgaatgtttccaactcttcaaaaaagcggcggaacaggaaaaagaatgggcggcatatttgtttaaagacggttcgatgatcggtttgaacaaagaaatcttatcccaatacgtcgaatatattaccaatctgcgtatgcaggcggtggggctgccggccggatttgaaggcgcaaatcaaaacccgattccgtggattaatgcgtggctgtcgtccgacaacgtacaggtcgcgccgcaggaagtggaaatatcctcttatttgattggtcaaatcgattctgaagtgaatacggatgacttgggcgattttgagttg

SEQ ID NO: 28883 - DNA, 981 bp, Neisseria gonorrhoeae
atgagtgaaatcaaaaccgacgaccccaaacgcggcatcaaactcagaggcgcggacaaaaccgcccgcatccccatcaaagtcgtcccccttcaggaaaaactgaaaaagcccgaatggatacgcgccaaactcccatcgcgcaaattctttgaaatcaaagacattttgcgcgaacaaaagatgcacaccgtttgcgaggaagcctcctgccccaacatcggcgaatgcttcagcaaaggcacggcgaccttcatgattatgggcgacatctgcacccgccgctgcccgttctgcgacgtgggacacggccgtccgaatatgctcgaccccgacgagccgaaaaacctcgcagaatccgtcaaagccatgaacctgcgttacgtcgtcatcacctcggttgaccgcgacgacctgcgcgacggcggcgcccaacacttcgccgactgcatcaaagccatccgcgaaaccagcccgaacaccaaaatcgaaatcctcgtccccgacttccgaggccgcttggacatcgcactgaaaatccttgccgaaaccccgcccgacgtgatgaaccacaacttggaaacccatccgagcctgtacagaaaagcccgtcccggtgccaattatcaacattctttagacttattaaaacgttataaagaaatgatgccgcatatcccgaccaaatccggcattatggtaggcttgggcgaaacagacgaagacgtgcgtgaaattatgcgcgatatgcgggcgcacaatatcgagatgattaccatcggacagtacctccagccttcagacggacacttgcctgtcttgcgctacgttacacccgaacaattcaaaatatttgaaaaagaagcatacgaactgggctttaccaatgccgccatcggcgcgatggtacgttcaagttaccatgccgacgaacaggcggcggaagccttacgcgaaagccacggcggttgcgggcatcat

SEQ ID NO: 28884 - DNA, 942 bp, Neisseria gonorrhoeae
gtgcaagaacgcgatgatattgcgatttatgcacaacaggctcaagccgccaataccttattcgccttgcgtttgaacgacaaaaacagtgatattttcgaccgcactttaccacgcaaaggcttgtggttgcgtgtgattgacggacattccaaccaatgggtgcaaggcaaaacagcacctgtagaaggctatcgaaaaggtgtgcaactcggcggcgaggtgttcacatggcaaaacgaaagtaatcaactttctattggcttaatgggcggacaagcagaacaacgcagcactttccgcaatccggatacagacaatcttacaacgggaaatgtgaaaggctttggtgcgggcgtttacgccacttggcatcagcttcaggacaaacagacaggtgcgtatgttgatagctggatgcaatatcaacgtttccgccaccgcattaacactgaatatgctacagaacgttttacttcaaaaggtattactgcctcaattgaagcgggttacaatgcgttattggcggaacacttcactaaaaagggcaacagccttcgtgtttacctacaaccacaggcgcaattgacttatttgggggtaaacggaaaattcagcgatagcgaaaatgcccaagtgaatttgcttggctcccgccaattacaaagccgagtgggcgttcaagctaaagcgcaatttgctttcactaatggcgtcactttccaaccatttgttgctgtcaattcaatctaccaacaaaaacctttcggtgtggaaatagacggggatcgtcgagtgataaacaataagacggtaattgaaactcaattaggtgtagcagcgaaaatcaaatctcacttaaccttgcaagcctcattcaaccgccaaacaagcaaacatcatcacgctaaacaaggtgcgttgaatttacagtggacgttt

SEQ ID NO: 28885 - DNA, 450 bp, Neisseria gonorrhoeae
atgtttatggctattgcgaacaataaaaaagcatttcacgattttttcattgaagaccggattgaagccggtttggtcttggaaggctgggaagtcaaagcaatccgcgccgcgcgcgtacagcttaaagagagttatatctattggaaaaaagatgcgttttatctggtcggctgccatattacggctttgcctacggcttcgacacacatcaaaccggatgccgtacgtccgcgcaaactgttattaaaacagtcggaaatcaataagttaatcggaaaaaccgaacgtgcaggttacaccatcgtgccgctggatttgcatttttcacgcggaaaaatcaagatggaaatcggtttggcaaaaggtaagaaacagcacgataaacgacaaagtatgaaggaagccgactggaaacgcgagaaacagcggttgattaagcatacgcgc

SEQ ID NO: 28886 - DNA, 444 bp, Neisseria gonorrhoeae
atgcagcacgaagaaggcaaccgccaacgccctcaaggcgaacttctcctgcgtaccgtcgctatgccgcgcgataccaatcccaaccaagacattttcggcggctggattatgtcgcaaatggatttgggcggcggcatattggcggcggaaatcgcgcgggggcgcatcgttaccgtcgccgttcaggaaatgaacttcatccgcccggtcaaggtcggcaacgtcgtctgctgctacgggcattgcgtccgcgtgggcaatacttccctccagcttaaagtcgaagtctgggtgaaaactttgatgaacgattgcgttaccgaagaccgccatctcgtaaccgaggcggtgttcacttatgtcgccatcgatgcggaaggcaatccgcgcccgattccgaaagaaggcaaccccaaattgtcgggcttattgcccaccccg

SEQ ID NO: 28887 - DNA, 2556 bp, Neisseria gonorrhoeae
atgcctgaaaacctgtcttcagcactggaaaccttcaaacagcagcgcaatgccgccgaagcgcattatttgaaagccaaccgcgtgtcggtatttttcagagaatacacggcggcagtcgaaaccttgctggcggcattgtgggcagaacattttcaaaacagcgcgttatgcctgatggcggtaggcggcttcgggcgcggcgaaccgtatccctgttcggatgtggatttggcggttgtctcccctgccccgctttcagacggcattcaggaacagattgcccgatttatccaaactctgtgggattgcaaactaatgccgtctgtaaaaagcggcagcgttgacgaactgtgcgaaagcgtgcgcgacgatattacgggggacacagcgtttttagaggctaggtttttgtttggcaaccgccaaacagcagacgaattggcggaaaaaatgaacgtgcaacgcaatgtagcggcatttatcgaagcaaaattggtggagatggaacaccgccacgccaaatcgcaaggttcgggggcggtgttggagccgaatatcaaaagctgtccgggcggtctgcgcgacatccacaccctgctttggatagcgaaggcgcaaggcttggcggccaacctgcccgacctgctcaaacagcggattttgacacgtgccgaagccggtatgctttcgcacggctaccgccgcctcgcccacatccgcatccggctgcatttaaacgccaagcgcgccgaagaccgcctgcttttcgatttgcagccgcaagttgccgaaagtatgggttatcaagatgaaaaccgccgccgtcaaagcgaagaactgatgcgcgtgttttaccgtgcggtcaaaaccgtcaaacaactgggcggcatcctcacgcccatgctgcgaagccgcgtttcctccacgccggtgcgcgttaccctgcggattgacgacgactacatccaagtcaacaaccaaatcgccgcgcggcacaccgatatttttttcagacggcccgaacacattttcaaaatcgtcgaaatcatgcagcagcgcaacgacattactgcgctcgaaccgcaaaccctgcgcgcatggtggggggcgacgcgcaaaatcaaccgcagcttctaccaaaattctgaaaaccgtcgccgcttcgccggttttttccgcagcggcaacggactgacccaaaccctgcgctttctcaacctctacggcgtgttgggccgctatctgcccgcgtgggaaaaaatcgtcggcctgcttcaacacgacttgttccacatctatcccgtggacgaccacatccttgccgtcgtccgcaacgtccgccgccttgccctagatatgcacagccatgagctgccctacgcctccgcgctgatgcagtcctttgaaaaacaagacatcctctaccttgccgccttcttccacgacatcgccaaaggacgcggcggcgaccatgccgtacaaggcatcgcagacgcgcgccaatttgccgccgaccacttcctgaccgaagaagaaagcgacctgctcgcctggctggttgaaaaccacctccttatgtctgccgtcgcccaaaaagaagacatccaagaccccggcgtactcgatgccttctgcaaacgcgtccaaacccacgaacgcctcagcgcgctctacctcctgaccatttccgacatacgcggcaccaatcccaagctgtggaacgcctggcgcgccagcctgctggaaagcctgttccacgccgccggacgctgcctcgcaggcaacgacggcaacccgcacgccctcttcggccgccgccggcaggaagccgccgacttacttacccgcgccgccgtccccgaaaaacagcagaaaaaactatggaacgcgctcggttccgcctatttcgcccgccatcagtcccgcgaaatcctgtggcacgccgccaacctcgtacacgactttgaaccccccatcgtccgcagccgcatcctaccccaaagcgacagctttcaagtgatggtctttatgcccaacggcccgcgcctgttcgcccgcctctgccgcatcttcagccgccacggcttcgatatcctcgccgcccgcgcctttatcaccgaacacgactacatcctcgacaccttcatcgtgcaaatcccctcgcagcacgcccccgaagactaccccgacatccaaagcgcgctcgaagccgaactcaacagctttatccacggacacaccgttgccgaaacccaaagctgcaaccgccgcatcagccgccgcagccgctatatgcctattgcgccaagcatcaccatcacccccgaagaagactatccggaccggtattccgtcgaaatcaccgccgtcaaccgccccttcctgctcgccgacatggcggaagtcttcttcgcccacaacgtcagcctgcgctacgccaaaatctccacgttggacgaacgcgtcgaagacagctttaccgtcttcagccccgacttgaaaaacccaaaaatccagtcctcattgaaacaggctttgctggaacagttggca

SEQ ID NO: 28888 - DNA, 867 bp, Neisseria gonorrhoeae
ttgccgcaaccagaccctcaaggtttccgccgcagcctgttcctgtaccggcgtgcgggaatggcggaaatcggggatttcgccgtcaaatttatgatagggatacggagcaaacgaatgattaccctgccttccttaaacaatctgccgtcaaaatgggatgaaatccgccattgcctcgaaacccgggtttttgagtgcggcgttatgccgtatcccaatctgacggaatgcgaagccgggcagttcgagcgggatttttgggacaatatcggctgcgcgcctgaagaatatgtccgtatccgccgcgccatccgtctgttggaattacgttatcccgacagcttgaacgagctggtgtgtgccgctattgccacgcctttgggcgagatgttggcggtgttcggcgttaagggattgtgcctgctggagtttgtcggacagaagtatttggaacaggaaattgccgccgtccaaaaagccttgcgcggacggtttgtgtttcgggaagacgggcggatgcaatttttgcgtcaggaattggacttatacttcaagggtcatctgaaaacctttgccacgcctttggagcagattggcaccgagtttcaaaagcaggcatgggacgcgctcttggcgattccttacggcgaaacgcgcagctacaaagagcaggcgcagcgtttgggcaaccccaaagccgtccgcgccgttgccgccgccaacgggcagaacaaggtgtctgtcatgattccctgccaccgcgtcatcggcagcgacggcaaactgaccggctacgcgggcgggttgaaccgcaaacagtttttactggctttggaacgcggcgaagttcagacggcattgttt

SEQ ID NO: 28889 - DNA, 1809 bp, Neisseria gonorrhoeae
atgaaacaaatccgcaacatcgccatcatcgcacacgtcgaccacggcaaaaccacattggtcgaccaactgctgcgccaatccggcacattccgcgccaaccagcaggttgacgagcgcgtgatggacagcaacgaccttgaaaaagaacgcggcatcaccatcctcgccaaaaacaccgccatcgattacgaaggctgccacatcaatatcgtcgacacgccgggacacgccgacttcggcggcgaagtggagcgcgttttggggatggtggattgcgtcgtcttgttggtggacgcacaggaaggtccgatgccgcaaacccgtttcgtgaccaaaaaagccttggctttggggctgaaaccgattgtcgtcatcaacaaaatcgacaaaccgtccgcccgtccgagctgggttatcgaccagactttcgagttgttcgacaacttgggtgcgaccgacgagcagttggatttcccgattgtttacgcttcaggtttgagcggctttgccaagctggaagaaaccgacgagagcagcgatatgcgcccgctgttcgacaccatcctaaaatacacgcctgcaccgagcggcagcgcggacgagccgctgcaactgcaaatttcccaactcgactacgacaactacaccggccgcctcggtatcggtcgtatcttgaacggacgcatcaaacccggccaaaccgttgccgtgatgaaccacgagcagcaaatcgcccaaggccgcatcaaccagcttttgggtttcaaaggcttggaacgcgtgccgcttgaagaagccgaagccggcgacattgtgattatttccggtatcgaagacatcggcatcggcgtaaccatcaccgacaaagacaaccccaaaggcctgccgatgttgagcgtggacgaaccgacgctgacgatggactttatggtaaacaccagcccgctcgcaggtacagaaggcaaattcgtgaccagccgccaaatccgcgaccgcctgcaaaaagaattgctgaccaacgttgccctgcgcgtggaagacaccgccgatgccgacgtgttccgcgtatccgggcgcggcgaactgcacctgacgattttgctggaaaatatgcgccgcgaaggctacgaactcgccgtcggcaagccgcgcgtcgtgtaccgagacatcgacggtcaaaaatgcgaaccttatgaaaacctgactgtggacgtacccgacgacaaccaaggcgcggtaatggaagaactcggccgccgccgtggcgaactgaccaatatggaaagcgacggcaacggacgcacccgcctcgaataccatattccagcgcgcggcttgatcggtttccaaggcgaattcatgaccctgacgcgcggcgtcgggctgatgagccacgtgttcgacgactacgcgcccgtcaaacccgatatgcccggccgccacaacggcgtactggtgtcccaagagcagggcgaggcggttgcttacgccttgtggaatcttgaagaccgcggccgtatgttcgtatcgcccaacgacaaaatctacgaaggtatgattatcggcatccacagccgcgacaacgatttggtggtcaacccgctcaaaggcaaaaaactcaccaatatccgtgccagcggtaccgacgaagcggtgcgcctgaccacgccgatcaaactgacgctggaaggcgcggtcgagtttatcgacgatgacgagctggtggaaatcacgccgcaatccatccgcctgcgcaagcgttacctgagcgaattggaacgccgccgtcattttaaaaagctggat

SEQ ID NO: 28890 - DNA, 2752 bp, Neisseria gonorrhoeae
atgctgacaaacattgccaagaaaatcttcggcagccgcaacgaccgcttgctgaaacaataccgtaaatccgttgccagaatcaacgcgctcgaagaacagatgcaagccctaagcgatgctgatctgcaagccaaaactgccgaattcaaacaacgcctcgccgacggtcagactttggacggcattttgcccgaagccttcgccgtctgccgcgaagcgtcccgccgcgtactcggtatgcgccacttcgacgtgcagcttatcggcggtatggtgctgcacgacggcaaaatcgccgaaatgcgtaccggcgaaggcaaaaccctggtcgccaccctcgccgtctatctcaacgcgctggccggcaaaggcgtgcacgtcgttaccgtcaacgactacctcgcctcgcgcgacgcaggcattatggagccgctctacaatttcctcggtctgaccgtcggcgtgattatttcagatatgcagccgttcgaccgtcaaaacgcctacgctgccgacattacctacggcacgaacaacgaattcggcttcgactacctgcgcgacaatatggtaaccgaccaatacgacaaagtgcagcgcgaattgaattttgccgttgtcgatgaagtggactccatcttgattgacgaagcgcgcaccccgctgattatctccggtcaggcagacgacaacatccagctctaccaaatcatgaacaccgttccgccccacctcgtccgtcaagagacagaagaaggcgaaggcgactattgggtcgacgaaaaggcacatcaggtcatcctgagcgaaacaggtcacgaacacgccgaacaaatcctgacccaaatggggctgctggcagaaaacgactcgctgtactcggcggcaaatatctccctgatgcaccaccttatggcagcattacgcgcgcactcgctgttccacaaagaccaacattacgttatccaagacggcgaaatcgtcatcgttgacgaatttacaggccgtctgatgtccggccgccgctggtccgaaggcctgcatcaagccgtagaagccaaagaaggcgtggaaatcaaacgcgaaaaccaaaccctcgcctccatcaccttccaaaactatttccgcctgtacaccaagctctccggtatgaccggtacggcagataccgaggctttcgagttccaaagcatctacaacctcgaaaccgtcatcatcccgaccaaccgccccgtacagcgcaaagacctcaacgaccagattttccgttccgccgaagaaaaattcgaagccgtcgtcaaagacatcgaggaatgccacaaacgcgggcagcccgtcctcgtcggtacgaccagcatcgaaaactccgaactggtctcccgccttctgcaaaaagccggactgccgcacaacgtcctcaacgccaaagaacacgaacgcgaagccctgattgtcgcccaagccggcaaagtcggcgcaattaccgtcgccaccaatatggcgggacgcggtacggacatcgttttaggcggcaacctgaagcaccaaaccgatgccatccgcgccgacgaaaccttgagcgacgaagagaaacaggcacaaatcgccgcactcgaaaacggctggcaggcagaacacgataaagtgatggaagcaggcggtttgcacatcatcggtacggaacgccacgaaagccgccgtatcgacaaccagttgcgcggacgttccggccgtcagggcgaccccggatccagccgtttctacctctcgtttgaagacccgctgttgcgcctcttcgcactcgaccgcgccgccgccatcctcaaccgcctcgcccccgaacgcggcgttgccatcgagcacaacctgctgacgcgccaaatcgaaggggcgcaacgcaaagtcgaaggcagaaacttcgatatgcgcaaacaggttttggaatacgacgacgttgccaacgaacagcgcaaagtcatttacagccagcgcaacgaaattctgaccagcaaagacatcggcgacctgatgcaggaaatccgttctgatgccgtcagcggacctcgtggatacctatatgccgcccgacagcatggaagaacaatgggacatcccgacactggaaaaccgcctggctgccgaattcaggcttcaggaagacatccaatcctggctgaaggcggacaatgcgattgacggtcaagacatcaaagagcgcctgatcgaacgtatcgaaaacgaatatgccgccaaaaccgaactggtcggcaagcaggcaatggctgatttcgagcgcaacgtgatgttgcaggccatcgacaaccaatggcgcgaacatcttgccgccatggactacctgcgacaaggcatacacctgcgcagctatgcccagaaaaatccgaagcaggaatataaacgcgaagcctttaccatgttccaagacctgtggaacggcatcaaattccatatcgcctccctgcttacttcggttcaaatcgaacaaaaccctgtcgcggcggttgaagagcaacccgtcggcaacatccagtccatccattccgaatcgcccgatatagaagaacttttgggtcagtcgcaaaccgatctggttaccgaagcctttaatcccgatgggacggatttcagccccgaagccttggaagcgcggggacaaatcgtccaccgcaacgacccctgcccctgcggcagcggtttgaaatacaaacaatgccacggcaaattggcttaa

SEQ ID NO: 28891 - DNA, 1770 bp, Neisseria gonorrhoeae
atgattccatccgacttcattgacgagcttctggccaaaaccgatattgtcggcatcatcgacgagcaggttccgctgaaaaaaggcggggcgaactatatggcgtgttgcccgttccacaaggaaaaaacaccgtcgttttcggtcagtccgaccaagcagttttatcattgtttcagttgcggggcgcatggttcggcgattggttttgtgatggaacatcagggactgtcgtttccggaggcggttcagttccttgccgaccgcgtaggtatgattgtgcctaaagtgcgcgggcagaacgataatcccgaagtccgtgccgagcgcaagaaaaaacagcagacgctggaagaaacgacggcggcggcagctgatttttacgcgcagcagctgaaattcaatccggctgcgaaagcttatttggacaaacgcggcttgagcgcggaagtcatcgcgcattatggtttgggctacgcgcccgacggctggcagcctttggcgcaagtgttccaaccgtatccgaataccgcgttggtggatacggggatggtgattgacaatgaggggcggcattacgaccgcttccgccatcggattatgttccccatccgcaatccgcgcgggcaggtcatcggtttcggcggcagggtgctggacgactcgaaaccgaaatatttgaattcgcccgatacgcctttgttcgataaggggaaaaacctttacggcttgtatgaggggcgtgctgctgtaaaagaggcagaacggattttggtggtcgaaggctatatggacgtggtcgcgctggcacagttcggcgtgggctacggtgtggcggccttgggcacggcgacgacggcggaacacgtcaaaatcctgatgcggcaggcggacagtatttatttctgtttcgacggcgacagcgcggggcgaaaagcggcttggcgcgcgctggaaaacgcgctgccgcagttgaaagacgacaaatcgctgcattttttattcctgccggaagaacacgaccccgacagctacatccgcgcctacggcaaagcgcaatttgaagacgcgcttctgaatcaaagcaagcctttgtcggaatatttctgggaacacctttcagacggcattcatctcaatacgcaggaaggcaaggcggaattggtgaaaaccagttcgccgcttttggtgcagattaccgcaccggcattggcttatttgttaaaacaacggcttagcgagctggtcggcatcgaccccgacaacctcgcgcaactgctcggacaggaagcgccaaagcggcacgtcaaacaaaaaaactacaaactgcctccgatttccgtcaaacagcccgttatgccgacattggtgcaacggcaaatccgcagcctcttgataaatccggattgggctgcatatatagacctgcccgattatctggcgttggacggcgatttcgcctgccttgccaacctcgccgaaaccattaaaaaccatccttccgtgccggcaaccgcacaggttttggaacatatgcgcggttcgccctacgaagaaacaatcaaccgcatcttccggtcggcccttcaatcggaagaaatggaaggcggcggcgaagaagattgcgaaaacttccaaatcggcatcaaaaaactgctcaatgagttaaaatacagccaaattgaaacattaaaacaaaaaagcctgcaatccggcttaaatgaaagcgagaaaaaacttttgctgtcgctgctgaccgcaaaacaaaat

SEQ ID NO: 28892 - DNA, 1926 bp, Neisseria gonorrhoeae
atgtccaaaaaccaaaatcacgaagaataccaagacgatgcccgccccctgacgattgaggaacaacgtgcgcgcctgcgccaactcatcattatgggcaaagaacgcggctacatcacctactccgaaatcaacgacgcactgcccgacgatatgtccgatgccgatcaaatcgacaacatcgtcagtatgatttccggtttgggtatccaagttaccgaacacgcccctgatgcggaagacatattgttaagcgacaatgccgccgttaccgacgatgatgccgtcgaagaagccgaggccgccctttccagcgcagattccgagttcggcaggacgaccgaccccgtccgtatgtatatgcgcgaaatgggacaggtcgacctgctgacccgcgaagacgaaatcatcatcgccaaaaaaatcgaaaacgccctgaaaaatatggttcaggccatctccgcctgcccgggttccattgcggaaatcttagaactcatcgaaaaaatctgcaaagacgaaatccgcgtcgacgaagtcgtagaagccattatcgacccgaatgaagtattgctcaacgaattgggcttggggcacttggaaaccacagcacccgagaaaccttccaacgacaattcggacgaaaacgaagacgacgaagaatcggaagaagatgcggatgaaatctcggcagccaatctcgccgaattgaaacaaaaagtcatcggccactttgcccaaatcgaaaaagactacaaaaaaatgatcggctgtttggaaaaacaccacagccggcacaaagactatctcgcctaccgcgacgcgattgccaacaaactgctggaagtccgtttcgccacccggcaaatcgacagcctcagcagcagcctgcgcggaaaagtagaaaacatccgcaaactcgaacgcgaaatccgcgacatctgcctcgaccgcgtccatatggaacgcgactacttcatccaaaacttcctgcccgaaatcaccaatctgcaatggattgaagaagaaatcgccaaaggcagggtttggagcaacgcactcgaccgcttccgccacgccatcctcgaaaaacaaaccgagttggcggatatggaaaaagaaacccgcatttccatcgaagagttgaaagaaatcaacaaaaatatggtgtcgagcgaaaaagaaaccgcagccgccaaacaggaaatgattcaggcaaacttgcgcctcgtcatttccattgccaaaaaatacaccaaccgtggcttgcagttccttgatttgattcaggaaggcaacatcggcctgatgaaggcggtcgacaagttcgaataccgccggggctacaaattctccacctacgcaacctggtggatccgccaggcaattacccgctcgattgccgatcaggcgcgtaccatccgtattccggtacatatgattgaaaccatcaacaagatgaaccgcatctcgcgccaacaccttcaagaaaccggcgaagaacccgattccgccaaacttgccgaactgatgcagatgcccgaagacaaaatccgcaaaatcatgaaaatcgccaaagagccgatttcgatggaaacccccatcggcgacgacgacgattcgcacttgggcgacttcatcgaagatgccaacaatgttgcgccggccgatgcggcaatgtacaccagcctgcacgaagtaaccaaagaaatcctcgaaagcctgacaccgcgtgaggcaaaagtcctgcgtatgcgtttcggcatcgatatgaacaccgaccacacgctggaagaagtcggcagacagtttgacgtaacgcgcgaacgcatccgtcaaatcgaggcaaaagcactccgcaagctgcggcatccgacaagaagcgaccgtttgagaagtttcttggacagcgaagacagcaagctg

SEQ ID NO: 28893 - DNA, 1857 bp, Neisseria gonorrhoeae
atgccagaataccgctccaaaacctccacccacggccgcaatatggcgggcgcgcgcgcattgtggcgcgccaccggcgtgatggaaaccgacttcggcaagcccatcatcgccgttgccaactccttcacccaattcgtgccaggccacgtccacctgcacaatatgggccagctggttgcccgcgagattgaaaaagcgggtgcaattgccaaagaattcaacaccatcgccatcgacgacggcatcgccatggggcacagcggtatgttgtactccctgcccagccgcgatttgattgccgactccatcgaatatatggtcaacgcccactgcgccgacgcgctggtgtgcatttccaactgcgacaaaatcaccccgggaatgctgattgccgccatgcgcctgaacatccccaccatcttcgtctccggcggcccgatggaagcgggcaaggtcatcggcgtggcaaacatccaacccgaacgccgtttggacttgattgacgccatgatcgaatcggcggacgacaatgtcagcaaccggcaagtcgaagaagtcgaacaaaacgcctgcccgacctgcggctcgtgttcgggtatgtttacggcaaactcgatgaactgcctgaccgaagcgctcggtctgtccctgcccggcaacggttcgtatttggcgacccacgcaggccgcaaagaattgttcctcgaagcagggcgtatgattgtcgaaatcaccaaacgctattacgagcaagacgacgaaaccgtgctgccgcgcagcattgccaccaaaaaagcgtttgaaaacgccatgacgatggatattgcgatgggaggcagcaccaataccatcctgcacttgctcgccgtcgccaacgaagcgggcgtggatttcaaaatggcagacatcgaccgcttaagccgcgtcgtgccctgcatctgcaaaaccgcgcccaacaaccacgactactatatggaagacgtgcaccgcgccggcggcatcttcgccattctgaaagaacttgacaaagcgggcaaactgcacaccgacgtgtacacgatccacgcgccgacactgaaagacgcgattgaaaaatgggacgtcaccaatcccgaaaacacccgcgccatcgaacgtttcaaagcggctcccggcggcgtgcgcaccactcaggcgttctcgcaaaaccgtatttggaaaaccctcgaccttgaccgcgaaaaaggctgtatccgcgacgtggcacacgcctactcgcaagacggcggtttggcggtcttattcggcaacatcgccgagcgcggctgcgtggtaaaaaccgcaggcgtggacgagagcatcctcaaattcaccggccgcgcgcgcgtgtttgaaagccaggaagccgccgtcgaaggtattttgggcaaccaaatcgtcgccggcaacatcgtcatcatccgctacgaaggcccgaaaggcggcccgggtatgcaggaaatgctatacccgacctcctacctgaaatccaaaggcttgggcaaagcctgcgccctcttaaccgacggacgcttctccggcggcacatcaggtttgtccatcggacacgcctcgcccgaagcggcggaaggcggcgcaatcggtttggtacacgaaggcgatacgattgaaatcgacatccccaaacgcagcatccgccttgtcatttccgatgaagagcttgccgcacgccgtgccgaaatggaagctcgcggcagcaaagcgtggaaaccggaaaaccgcgaccgctacgtctccgccgcattaagggcttacggcgcgatggcgacttccgccgacaaaggcgcggtgcgcgacgtatcgcaaatcgagaga

SEQ ID NO: 28894 - DNA, 1050 bp, Neisseria gonorrhoeae
atgaccgtatcccccgtcgccttgcgccgtaagaccgagtgcaagcctcatcccaccgcgcgctattggaaaaaatgcgatgtcgaggcacttttcggactgccgtttttagaacttgtctatcaggcggcagaagtccaccgccaaaatttcaacccgcgcgaaatccagctttccacgctgttgtccatcaaaaccggcggttgtcccgaagattgcgcctactgtccgcaatcagcgcaccacaacaccaatttgggcaaagagcagatgatggatgtggatgaaatcgtcgaaaaagccaaaatcgccaaatcgcgcggcgcaagccggttttgtatgggcgcggcatggcgcggccccaaacccaaagacgtggagacggtttccgcaatcatcaaagccgtcaagggcttaggtatggaaacctgcggcacgttcggtatgctcgaagaaggtatggcggaagacttgaaagaggcgggcttggattattacaaccacaacctcgacaccgaccccgaccgctacaacgacatcatccacacacgccggcacgaagaccgtatggataccttgggcaaagtccgcaacgccggtttgaaagtctgctgcggcggcatcgtcgggatgaacgaaacccgcgccgaacgcgccgggctgattgccagcctcgccaacctcgacccgcagcccgaaagcgtgccgattaaccggttggtcaaagtggaaggcacgccgcttgccgatgccgaagatttggattggaccgaatttgtccgtacggtttccgtagcgcggattacgatgccgcaaagttatgtccgcctctcggcagggcgcagcaatatgcctgaagcgatgcaggcgatgtgcttcatggcgggtgcgaactcgattttttacggcgacaagctgttgaccacaggcaatcctgatgaggacggcgatagaatcctgatggaaaagcttaacctgtatcccttgcagtttgagccggaaggcgaggtcgccgaagtggaaaaagcctccgggattaaagcggattat

SEQ ID NO: 28895 - DNA, 783 bp, Neisseria gonorrhoeae
gtgaaacacatcagttcgaccaataatgaacatatcagacacctgcaccgcctgttgtcgcaaggaaagttcagacggcagtatgcccaaaccgttttggagggcgtgcacctgcttcaggttttcctgcaatccggcagaaagccggtcggggtatatattcccgaagctaaaatgccgtctgaagaagtccttaaattgacagcggttttgccggaagacgggattttttccgtttcagacggcatattgaaaaaaatcagcagcttgagttgtgcagacgatatacttacactgattgatatcccattgggcggaaccttgccggacaaaggcgactgtgcggttttggacggcgtgcaagatccgggcaatgtcggcaccgtcttacggagtgcggcggcggcaggggtaggtacggtcgttttgggcaggggttgtgcggacgcgtggtcgcccaaggtattacgcgcgggtatgggcgcgcatttcttgttggacatttattcgcaggcggatttggaaatatggttggcgcactatgaagaccgtgtgtttgccaccgcgttgcgcgaggaaaagcaggcggttttgtacggcgaagatttgtgcgaaccgacagcttgggtgttcggcaacgaaggtgcgggtgtcggtaaagcagttttagacagggcggacaagtgtgtcaggataccgatgcacgatgcaaccgagtctttaaatgtcgcgatggcggcgacaatctgcctgtttgaacagatgcgccaacgggcggcgtat

SEQ ID NO: 28896 - DNA, 957 bp, Neisseria gonorrhoeae
atgaaacctgtttttttggattttgaacaacccatagccgaactgaccaacaaaatcgatgagctgcgtttcgtccaagacgagtctgccgtcgatatttcggacgaaatacaccgtttgcagaaaaaaagcaacgatttgaccaaatcgattttcagcaaactcacacccgctcaaatttcacaggtttcccggcatccgcagcgtccctatactttggattacattgacgcgctgtttaccgattttgaagagctgcacggcgaccgccactttgccgacgatcatgcgattgtcggcggattggcgcgtttcaacggacaaagcgttgtggtcgtcgggcatcagaaagggcgcgacaccaaagaaaaaatccgccgcaacttcggtatgccccgtcctgaaggctaccgcaaagccctgcgcctgatgaaaacggcggaaaaattcggcttgcccgtcatgacctttatcgatacgccgggcgcgtatcccggcatcggcgcggaagaacgcgggcagtcggaagccatcggcaaaaacctgtacgaactgacccgactgcgcgttcccgttttgtgtaccgtcatcggcgaaggcggttcgggcggtgcgttggcggtcgccgtaggcgattacgtcaatatgctgcaatattcgacctattccgttatttcccccgaaggctgtgcttcgattttgtggaaaaccgccgaaaaggcggctgatgcggcacaggctttgggtattactgccgaccgcctgcaaaagctggacttggtcgataccgtcattaaagagcctttgggtggtgcgcatagggatttcgggcaaaccatgaaaaacgtaaaagccgttttggaaaaacaactgcacgaagcgcaaagcatcccgcttgccgatttgctttcgcgccgtttcgaccgcattatggcttacggcaaattttcggaacaa

SEQ ID NO: 28897 - DNA, 1173 bp, Neisseria gonorrhoeae
atgcagaatatttttgaccctttgattattcgtggaaaatcccttattcccatcgtgcaaggcggtatgggggtcggtgtttccgcatcgggtttatccagcgcggtggcgcgtgaaaacggcatcggaacgattgccagtgtagatttgcgccaccttcacgaagacctgctcgccgaatcccaaatcaatccgagtgaagagaaatatacgtctttgaactgtaccgcattagacagggaaatccaaaaagccaaaagtgcttcagagggaaaaggactgattgcggtcaacgtgatgaaggcggtcaaagaccacgccgcgtatgtccgccaggcttgcgaatcaggggcggatgcggtcgtgatgggtgccggcctgcctttagacctgccggaaatgaccgagggctatcataaggatgtcgcgctgctgccgattctgtccgaatcgcgcggtattaatatcgtcttgaaacgttggatgaaaaaaggcatattgcccgatgcgattgtagtcgaacatcctgcccatgcggccggacatttgggtgcatcaaccgttgaaggcgtaaacgatgccaaattcgacttcaaacgcgtgattgaggaaacgtttgaagtgtttaaaaatttggggctggagggagaaaaaatcccgcttattcttgcgggaggcatggcaaattttgaaaaagtcaaaaccgccctaaagaactggggagcctccgccgttcaaatcggtacggcttttgccgttaccgaagaaggagatgcacacctcaactttaaaaaaacgctcgccagtgcggaaactgaaaaagtagtcgaatttatgtctgttgccggtttgccggcgcgcggtatccgcaccaaattcctagacagctatatcaggcgcgaaggcaaacttcaggcaaacgccaaagccgacccgcgccgctgtacccaaggtttaaactgcctgaccagctgcggtctgcgcgacgggctttccaaagcagggcaattctgtattgatatccagcttgctgccgcattccgtggagaagttgataaggggttgtttttcaggggaaaagaccagcttcccttcggtaatgccatccgcaccgtccgcgaaacgatacaatatctgctgacggggagcgaacctgttgcaacgctcggacgc

SEQ ID NO: 28898 - DNA, 772 bp, Neisseria gonorrhoeae
gtgcggcaaaacgctaaaatacattaaccgtcaaacccaaaggacaaccatgccgacactgaccgacaaaaccatcttagttaccggcgcatcgcaaggcttgggcgaacaggtcgccaaagcctacgccgccgaaggggcgaccgtaattctggtggcacgccatcagaaaaaactggaaaaagcctatgacgcgattgtcgaagccggacaccccgaacccttcgccatccgtttcgacctgatgagtgcggaagaaaaagaattcgaacggtttgccgccaccattgccgaagccacgcaaggcaaactggacggcatcgtccactgcgccggctatttttacgccctctcgccgctggatttccaaaccgtcgccgaatgggtcaaccaataccgcatcaacaccgtcgccccgatggggctgacccgcgccctgttcccgctgctgaagcagtcgcccgacgcgtccgtcatcttcgtcggcgaaagccacggcgaaacacccaaagcctactggggcggcttcggcgcgtccaaagccgcgttgaactacctgtgcaaagtcgccgccgacgaatgggaacgcttcggcaacctgcgcgccaacgtcctcgtccccggccccatcaattccccgcaacgcatcaaatcccatccgggcgaagccggaagcgaacgcaaaagctacggggacgtactgcccgcatttgtctggtgggcaagtgccgaaagcaaagggcggagcggcgaaatcgtttacctctaaatc

SEQ ID NO: 28899 - DNA, 1302 bp, Neisseria gonorrhoeae
ttgtcgggggtcggcaaacttgtccgccaaggcgcgaaattcggcacaagggcggttccctatgtcggaacagcccttttagcccacgacgtatacgaaactttcaaagaagacatacaggcacgaggctgccgatacgatcccgaaaccgacaaatttgtaaaaggctacgaatatgctaattgcctttggtacgaagacgaaagacgtattaatagaacctatggctgctacggcgttgacagttcgattatgcgccttatgcccgatcgcagcagattccccgaagtcaaacaactgatggaaagccaaatgtataggctggcacgtccgttttggaattggcgtaaagaagaactgaataaattaagttctttggattggaataattttgttttaaatcgttgcacatttgattggaacggcggaggttgtgcggtcaataaaggtgatgatttcagagctggggcttctttttcccttggccgcaatccgaaatacaaagaagaaatggatgccaaaaagccggaagagattttatcgttgaaagtcgatgccgatcccgacaaatacatagaggcaaccggatatcccggttattccgaaaaagtagaagtcgcacccggaacaaaagtgaatatggggcccgtcacggacaggaacgggaatcccgttcaggttgccgcaacattcggcagggacgcgcaaggcaacaccacggcggatgttcaagtaatcccgcgtcccgacctcacgcccgcaagcgcggaagcacctcacgcacagccgctgcccgaagtatcgcccgcggaaaaccccgcaaacaacccggaccccgatgagaaccccggcacgcgtcccaatcccgaacccgaccccgatttgaatcccgatgcaaatcccgatacggacggacagcccggaacaagccccgattccccggccgttccggaccgcccaaacggcaggcatcgcaaagaaaggaaagaaggcgaagacggcgggctttcgtgcgattattttccggaaatcctagcctgtcaggagatgggcaaaccttcggaccgcatgtttcacgatataagcataccgcaggttacagacgataaaacatggtcttcacataactttttaccgtctaacggcgtatgtccgcagccgaaaacctttcatgttttcggcaggcaatatcgggcaagctatgaaccgttgtgcgtgtttgccgaaaaaatccggtttgccgtactgctcgcctttatcattatgtcggcttttgtcgttttcggttcgttggggggggaa

SEQ ID NO: 28900 - DNA, 1977 bp, Neisseria gonorrhoeae
atgtctcaactggcaaacgtaatccgcttcctctcggccgatgccgttcaaaaagccaattccggccaccccggcgcgcctatgggtatggcggaaatggcggaaacattgtggacgaaattcctcaatcacaatcccgccaatcccaaattctacaaccgcgaccgcttcgtcctctccaacggtcatgcgtctatgctgttgtacagcctgctgcacctgaccggctacaacctgagcattgaagatctgaaaaacttccgccagctgcacagcaaaacccccggccatcccgaatacggctacaccgacggcgtggaaaccacgaccggcccgttggggcaaggtattgccaacgcagtgggcatggcattggcagaaaaaatccttgccgccgaatttaataaagacggtttgaacatcgtcgatcactacacttacgtctttatgggcgacggctgcctgatggaaggcgtatcgcacgaagcctgctcactcgccggcaccttgggcttgggcaaactgattgttttgtatgacgataacaatatctccatcgacggcaaagtggacggctggtttaccgaaaacatcccgcaacgctttgaaagctacggctggcacgtcgttcccaacgtaaacggccacgacaccgccgccattcagacggccatcgaagccgcccgcgccgaaaccggcaagccgtccatcatctgctgcaaaaccttaatcggcaaaggcagcgccaacaaagaaggcagccacaaaacccacggcgcgcctttgggtgcggacgaaatcgaagccacgcgcaaacatttgggttgggcttatcctgcgtttgaaatcccgcaagaaatttacgatgcgtggaatgccaaagaaaaaggcgcgaaactggaagccggatggaacgaactgttcgcgcaatatcaagccaaatatcctgccgaagccgcagaattcgtgcgccgcatggataaaaagctgccggaaaactttgacgagtacgttcagacggcattgaaagaagtgtgcgccaaagcggaaaccgtcgccacccgcaaagccagccaaaacagcatcgaaatcttggcaaaagagctgcccgaactggtgggcggttctgccgacctgaccccgtccaacctgaccgactggtcaaacagcgtctccgttacccgcgacaaaggcggcaactacatccactacggcgtgcgcgagttcggtatgggtgcgattatgaacggtttggtattgcacggcggtgtaaaacccttcggcgcgactttcctgatgttcagcgaatacgaacgcaacgccttacgcatggcggcactgatgaaaatcaaccccgtcttcgtatttacccacgattccatcggtttgggcgaggacggcccaacccaccagcctatcgagcaaaccgccaccctgcgcctgattccgaatatggacgtatggcggccgtgcgacaccgcagaatctctggtcgcttgggcagaagcggcaaaagccgaagaccacccgtcctgcctgattttcagccgtcaaaacctgaaattccaagcacgcagcgagcaacaactgaacgacatcaaacgcggtgcttacgtaatcagtgaagcccaaggcaacgcccaagccgtcatcattgccaccggttccgaggtaggattggctgtagaagcgcaaaaagtattggcaggacaaggtattgccgtgcgcgtcgtttccatgccgtccaccagcgtcttcgaccgccaagacgccgcctatcaagccgccgtcctaccggaaggcctgccgcgcatcgccgtagaagccggacacaccaacggctggtacaaatatgtcggactgaacggcgcagtcgtcggcatcaaccgcttcggcgaatccgcccctgccgatctgctgttcaaagcattcggctttaccgtggacaatgtggttgatacggtgaaatccgtgctg

SEQ ID NO: 28901 - DNA, 522 bp, Neisseria gonorrhoeae
atgtcattgaacaaagtcatccttatcggccgcctcggacgcgatcccgaagtgcgctatatgcccaacggcgaggcagtgtgtaatttcagcgtcgccaccagcgaaacttggaacgaccgcaacggccagcgcgtagagcgcaccgaatggcacaacatcacgatgtaccgcaaactggcggaaattgccgggcaatacctcaaaaaaggcgggctggtttatctggaaggcagaatccaaagccgcaaataccaaggcaaagacggcatcgaacgcaccgcttacgatattgtcgccaatgaaatgaaaatgttgggcgggcgcaatgaaaacagcggcggcgcgccttacgatgaaggttacggtcagagtcaggaggcttaccaacgccccgctcagcaaagccggcagcccgctcccgacgcgccgtcccatccccaagaagcacccgccgcgccgcgccgccaacccgtgccggccgccgccccggtcgaggacattgacgacgacatcccgttc

SEQ ID NO: 28902 - DNA, 648 bp, Neisseria gonorrhoeae
atgctttcagcgcttatctcttccgaacttagctacccggctatgcaactggcgttacaaccggtacaccagaggttcgtccactccggtcctctcgtactaggagcagcccccgtcaaacttccaacgcccactgcagatagggaccaaactgtctcacgacgttttaaacccagctcacgtaccactttaaatggcgaacagccatacccttgggaccgactacagccccaggatgtgatgagccgacatcgaggtgccaaactccgccgtcgatatgaactcttgggcggaatcagcctgttatccccggagtaccttttatccgttgagcgatggcccttccatacagaaccaccggatcactatgtcctgctttcgcacctgcccgacttgtcggtctcgcagttaagctaccttttgccattgcactatcagtccgatttccgaccggacctaggtaaccttcgaactcctccgttacgctttgggaggagaccgccccagtcaaactgcctaccatgcacggtccccgacccggatgacgggtctgggttagaacctcaaagacaccagggtggtatttcaaggacgactccacagagactggcgtctctgcttccaagcctcccacctatcctacacaag

SEQ ID NO: 28903 - DNA, 804 bp, Neisseria gonorrhoeae
atgaatatgaaaaaatggattgccgccgcccttgcctgttccgcactcgcgctgtctgcctgcggcggtcagggcaaagatgccgccgcgcctgccgccaaccccggcaaagtgtaccgcgtggcttccaacgccgagtttgccccctttgaatctttagactcgaaaggcaatgtcgaaggtttcgacgtggatttgatgaacgcgatggcgaaggcgggcaattttaaaatcgaattcaaacaccagccgtgggacagccttttccccgccttgaacaacggcgatgcggacgttgtgatgtcgggcgtaaccattaccgacgaccgcaaacagtctatggatttcagcgacccgtattttgaaatcacccaagtcgtcctcgttccgaaaggcaaaaaagtatcttcttccgaagatttgaaaaagatgaacaaagtcggcgtggttaccggccacacgggcgatttctccgtttccaaactcttgggcaacgacaatccgaaaatcgcgcgcttcgaaaacgtccccctgattatcaaagaactggaaaacggcggcttggattccgtggtcagcgacagcgcggtcatcgccaattatgtgaaaaacaacccggccaaaggaatggacttcgttaccctgcccgacttcaccaccgaacactacggcatcgcggtacgcaaaggcgacgaagcaaccgtcaaaatgctgaacgatgcgttggaaaaagtacgcgaaagcggcgaatacgacaagatctacgccaaatattttgccaaagagggcggacaggctgcgaaa

SEQ ID NO: 28904 - DNA, 618 bp, Neisseria gonorrhoeae
gggaggagacagtgtggccatcgttacgccattcgtgcgggtcggaacttacccgacaaggaatttcgctaccttaggaccgttatagttacggccgccgtttaccggggcttcgatccgatgcttgcacatcttcaattaaccttccggcaccgggcaggcgtcacaccctatacgtccactttcgtgttggcagagtgctgtgtttttaataaacagtcgcagccacctattctctgcgaccctccggggcttacggagcaagtccttaaccttagagggcataccttctcccgaagttacggtatcaatttgccgagttccttctcccgagttctctcaagcgccttagaattctcatcctgcccacctgtgtcggtttgcggtacggttcgattcaaactgaagcttagtggcttttcctggaagcgtggtatcggttgcttcgtgtccgtagacactcgtcatcacttctcggtgttaagaaaacccggatttgcctaagtcttccacctaccggcttaaacaagctattccaacagcttgccaacctaaccttctccgtccccacatcgcatttgaatcaagtacaggaatattaacctgtttcccatcgac

SEQ ID NO: 28905 - DNA, 915 bp, Neisseria gonorrhoeae
atgaccgttatcaagcaagaagactttattcaaagtatctgcgatgccttccaattcatcagctactaccatccaaaagactacatcgacgcgctttataaggcgtggcagaaggaagaaaatcccgccgccaaagacgcgatgacgcagattttggtcaacagccgtatgtgtgccgaaaacaaccgccccatctgccaagacacaggtatcgcaaccgtcttcctcaaagtcggtatggatgtgcaatgggatgcggacatgagcgtggaaaagatggttaacgaaggcgtacgccgcgcctacacttgggaaggcaacaccctgcgcgcttccgtcctcgccgatccggccggcaaacgccaaaacaccaaagacaacacccccgccgtcatccacatgagcatcgtgccgggcggtaaagtcgaagtaacctgcgcggcaaaaggcggcggctctgaaaacaaatccaaactcgctatgctcaacccttccgacaacatcgtcgattgggtattgaaaaccatcccgacgatgggcgcgggctggtgtcctcccggcatcttgggcatcggcatcggcggcacgcccgaaaaagccgtgttgatggcgaaagaatccctgatgagccacatcgacatccaagaattgcaggaaaaagccgcgtccggcgcggaattgtccaccaccgaagccctgcgcctcgaactctttgaaaaggtcaacgcgctgggcatcggcgcgcaaggcttgggcggtctgaccaccgtgttggacgtgaaaatcctcgattacccgacccatgccgcctccaaaccgattgccatgattcccaactgtgccgccacccgccacgtcgaatttgaattggacggctcaggtcctgtcgaactcacgccgccgcgcgtcgaagac

SEQ ID NO: 28906 - DNA, 374 bp, Neisseria gonorrhoeae
ttctgcctcgccttaggggccgactcaccctacgccgatgaacgttgcgtaggaaaccttgggctttgcggcgagcgggcttttcacccgctttatcgctactcatgtcaacattcgcacttctgatacctccagcacactttacaatgcaccttcatcagcctacagaacgctcccctaccatgccggtaaaccggcatacgcagcttgggttatagatttgagccccgttacatcttccgcgcaggacgactcgaccagtgagctattacgctttctttaaatgatggctgcttctaagccaacatcctggctgtctgtgccttcccacttcgtttaccacttaatctatcatttgggaccttagccggcgg

SEQ ID NO: 28907 - DNA, 1410 bp, Neisseria gonorrhoeae
gtgaaaatcctcattttaggcaacgggcaggtaggttctaccgtcgcgcaaaaccttgccgccatcaccaacaacgacgtaaccgttatcgacatcgacgaaaaagcattgcaggaaacaggcagccgcctcgatgtccaaaccgttttcggcaacggcgcatcccccttcacattagaacgcgccggcgcggaagatgccgacttgctgctcgcgctctcccgcagcgacgaaaccaacatcgtcgcctgcaaagttgccgccgacctgttcaacatccccggccgcatcgcgcgcgtccgttccagcgaatacctcgaatacctcagccccaagctcgaaaacaacgaaaacggcagcctttccatattcggcataaccgaaaccatcagccccgaacagctcgttaccgaacagcttgccggcctgatagactgcccgggcgcattgcaggttttacgttttgcagacgaccgcgtgcggatggtcatcatacaggcgcggcgcggcgggctgcttgtcggacgcagcattgccgacatcgcccaagatttgcccgacggggccgactgccaaatctgcgccgtttaccgcaacaaccgcctcatcgtccccgcgccgcaaaccgtcatcatcgaaggcgacgaaatcctgtttgccgccgccgccgaaaacatcggggcggtcatacccgaattgcgccccaaagaaaccagcacccgccgcatcatgattgccggcggcggcaacatcggctaccgcctcgccaagcagctcgaacacgcatacaacgtcaaaatcatcgaatgccggccgcgccgtgccgaatggatagccgaaaacctcgacaacaccctcgtcctgcaaggttcggcaaccgacgaaaccctgctcgacaacgaatacatcgacgaaatcgacgtattctgcgccctgaccaacgacgacgaaagcaacattatgtccgcccttttggcgaaaaacctcggcgcgaagcgcgtcatcggcatcgtcaaccgctcaagctacgtcgatttgctcgaaggcaacaaaatcgacatcgtcgtctccccccacctcatcaccatcggctcgatactcgcccacatccggcgcggcgacatcgttgccgtccaccccatccggcgcggcacggcggaagccatcgaagtcgtcgcgcacggcgacaaaaaaacttccgccatcatcggcaggcgcatcagcggcatcaaatggcccgaaggctgccacattgccgccgtcgtccgcgccggaaccggcgaaaccattatgggacaccataccgaaaccgtcatccaagacggtgaccacatcatctttttcgtctcgcgccggcgcatcctgaacgaactggagaaactcatccaagtcaaaatgggctttttcgga

SEQ ID NO: 28908 - DNA, 165 bp, Neisseria gonorrhoeae
atgacgtcaagtcctcatggcccttatgaccagggcttcacacgtcatacaatggtcggtacagagggtagccaagccgcgaggcggagccaatctcacaaaaccgatcgtagtccggattgcactctgcaactcgagtgcatgaagtcggaatcgctagtaatc

SEQ ID NO: 28909 - DNA, 2154 bp, Neisseria gonorrhoeae
atgcccgccccccaaccttccgccccttacgaccccctgaccgccgaagcgcgtaccctgcttttccataccgcctcctacctcaagcccgagcaacaggcggagcttgaaaaagctgtcgcctatgcgtttcgcgcccacgacgggcaaacccgcaaaagcggggatccctacatcacgcatccgattgccgttgcgacgcagctcgccctttggcatatggacatacagggtctttgtgcaggcgtgatgcacgacgtattggaagatacgggcgtgacaaaaggggaaatggcggcggtgttcggcaatactgttgccgagatggtggacgggctgtccaaactcgaaaaactcaaatttgaagatcatgcggaacatcaggcggagagtttccgcaaactgattttggcgatgaccaaagatgtgcgcgtcatcgttgtcaaacttgccgaccgcctgcacaatatgcggacgctcggttcgatgcgcccggacaaacgccgccggattgcaagggaaacccttgaaatctacgcacagattgccaaccgcataggtctgaataatgcgtatcgggagcttcaggatttatcgttccaaaacctgcatcccaaccgctacgagactttaaaaaaagcgatggacaagagccggaagaacaggcaggacgttgtcggcaaagttttgcgcgcgttcggccagcggctggtaggcgcgaatatagaggccaaaatcaaaggcagggaaaaaaacctgtacggcatccatcagaaaatgatggcgaaaaagctgcgctttgccgaggttatggatatttacggtttccgcgtcattgtcaacagcattcccgcctgttatgccgcactcggcacattgcacaccctctatcagcccaagcccggacggttcaaagactatatcgccattccgaaaagcaacggttatcaaagtctgcatacgattttggtcggcccctacggcttgccgattgaagttcagatacgcacgcgggaaatggatgccgtggcggaaggcggtattgtcggccattggagctataaatcagattccaaaacggtcgatcaggcagtgctgcacaccaatcaatggttgaaaaacattttagacttgcaggcaagcagcgccaatgccattgagtttctcgaacacgtcaaagtcgatttgtttccgaacgaaatctacatccttactccgaaaggaaaaatcctaactttgcccaaaggggcaacgcctgtcgattttgcttatgcggtgcataccgacattgggcataaaacagttgccgcgcgtgtcaataatgtgatgatgccgctgcgtacgaagctcaaaaccggtgattctgttgaaattatcacatccgaacacgccaaacccaatcccgcgtggttgaatttcgccgtgtccggcagggcgcgcagtgccatacgccaatatattaaaaatcttaaccggcacgatgcggtcgttttgggagagagcctcttacaaaaagccttgtccagtttgctgcccaaagatgtcctgctttcagacggcatcaaagaaaaataccttgccgatctcaacgacaaacagacttcatttgaggaagtgctgtacaacgtcggtatggggcataccctgcctgtttatgtcgccatgcatatcgccgaattggcaggggagcatttcggcagcgaggtcaggctcagttccattaaagttgatggtcaggaaagcgggcatattcattttgcagagtgctgccaccctgttcccggcgattccatccgtttgctgttggttaagggaaaaggcatgattatccatagggatacctgcccgacgttgttgaagtccgatcccgaacagcagctggatgcagactgggaaaatatgaacgggcagaactaccgtgtcgggcttcaagtccaatcggaagacagccacggcctgttggcattaatggcgcaagcgatttccgattccggtgcggacatcgagtcggtcgaaacaccgtctaaatcccagtcgggaacggaaggttttgtcgaattcaaattcttattgaaagtcaagaatttggatcagttgaatcagattattcaaaatctgcacagcatcccatatatccgcaaagtcatcagaagt

SEQ ID NO: 28910 - DNA, 1008 bp, Neisseria gonorrhoeae
atgagcaaaaaacgagttctgaccggcgtaaccaccaccggcaccccgcatctgggcaactacgtcggcgccatccgccccgccgtccgcgcggcgcaaaaccccgataccgaatccttcctcttcctcgccgattaccacggcatcatcaaatgccacgagcaggagatgattcaccaatccacccaagccgttgccgccacttggcttgcctgcggactcgaccccgagcgcaccaccttctaccgccaaagcgacattcccgaagtgatggagttgaactggattctgacctgcatcaccgccaagggtttgatgaaccgcgcccacgcctacaaagccgccgttcaagccaatgcggaaaacgggcaggaagaccccgatttcggtgtggaaatgggtttgttcagttatccgattctgatgactgccgacattttgatgttcaacgccaacgaagtccccgtcgggcgcgaccaaatccaacacgtcgaaatggcgcgcgacattgccggccgcttcaaccaccgtttccaagaactcttcaccctgcccgaagtgaaaatcgacgaaaacgtcgaactcttggtcggtttggacggacgcaaaatgtccaaatcctacggcaataccattccgctttgggaaaacgacaaaaaaacccaaaaatcggtcaacaaaatcattaccaacatgaaagagccgggcgagccgaaacagcccgacgaaagccctttgtttgaaatctataaagccttctccacgccgtctgaaacggcggaatttacgcaaatgcttgccgacggcttggcttggggcgaggcgaaaaaactttcggcggcgaaaatcaacgccgaattggcagaactgcgcgaacgctacaacgcattgacctctaatccttcgcaaatcgaagagattttgcaggcaggcgcgcaaaaagcgcgcaaagaagcgcgcgaattgttggataaagtacgcgatgcggtcggcatccgcccgttgaaa

SEQ ID NO: 28911 - DNA, 2577 bp, Neisseria gonorrhoeae
atgcgatacgacaaattaaccgccaaattccaacaagcccttgcagaagctcagagtttggcgttggctgcggacagcagctatctggaagcaggtttcgtactgaaagccctgcttgacgaccaaaacagcggagctgccgcgctcttggctcatgcgggcgtgaacgtgccgcaggttaaacagcgtttgcagcagcatttgaacagcctgccgaaagtgtccggacaaggtggtgagattctgcccagccgcgaattgcaggcggtgttgaacctgatggacaaagcggcaaccaaacgcggcgatgcctatatcgccagcgaacttttcctgctcgccttggtgcagcagaacgatgcggccggcaaaatcttgaaagaagccggtgcgaccgaacaaaatatcaatgccgcgatcgatgcggtacgaggcggacaaaacgtgaacgatgcgaatgccgaagaccaacgcgatgctttgaaaaaatacacgctcgatctgacccaacgcgcccgagacggtaagctcgaccccgttatcggtcgtgatgatgaaatccgtcgcgcgattcaggtgctgcaacgccgcaccaaaaacaaccccgtgctgattggcgaacccggtgtgggtaaaaccgccatcgtcgaaggtttggcgcaacgcatcgtcaacggcgaagtacctgaatccctgcgtaacaaacgcctgctggttttggatttggcggctttgattgccggtgcgaaataccgtggcgaatttgaagaacgcttgaaaggcgtattgaacgatttggcgaaagacgacggcaacaccctgattttcatcgatgaaatccatactttggtcggcgcgggcaaaaccgacggcgcgatggacgcgggcaatatgttgaaaccggccttggcgcggggcgaactgcactgtatcggtgcgactactttggacgaataccgccaatacatcgaaaaagacgcggcactcgaacgccgtttccaaaaagtattggttggcgaacccagcgtggaagacaccatcgctatcctgcgcggtttgcaggaacgttacgaaatccaccacggcatcgatattaccgaccctgctatcgttgccgcagcggagttgagcgaccgctacattaccgaccgcttcctgcccgacaaggcgattgatttgattgacgaagctgccagccgtgtcaagatggaaaaagaaaccaaaccggaagctatggacaaaatcgaccgccgtttgattcagcttcggatggaaaaggcgcacgttgaaaaagaaaaagacgatgccagcaaaaaacgtttggaactgatagacgaggaaatcgacggcttgcaaaaagaatacgccgatttggacgaaatctggaaagccgaaaaagcgatttcagacggtgctgccaatattaagaaacaaattgacgaagtcaaaattaaaatcgaacaggcaaaacggcaaggcgatttggcactggcttcaaaattgatgtatgaagatttggagcatttggaaaaacagcgtgcagccgccgaacgggcagatacggacagcacaaaaccggcaaacaaactcttgcgtaataatgtcggcgcggaggaaatcgcagaagtggtttcccgtatgaccggcatccccgtgtcaaaaatgatggaaggcgaacgcgacaaactgctaaagatggaagaagtattgcaccgccgcgtagtcggtcaaaacgaagccgtgcgcgccgtgtccgatgccatccgccgcagccgctccggccttgccgatccgaacaaaccttacggcagcttcctgttcttaggcccgaccggtgtgggtaagaccgagttgtgcaaagctttggcaggcttcctgttcgacagcgaagaccacctcatccgcatcgacatgtccgaatacatggaaaaacacgccgttgcccgcttaatcggcgcgcctccgggttatgtcggatacgaagagggcggctacctgaccgaacaagtccgccgcaaaccgtacagcgtgattcttttggacgaagtggaaaaagcccatcccgacgtattcaacatcctgctgcaagtattggatgacggtcgtttgaccgacggacaaggcaggacggtagattttaaaaataccgtgattgtgatgacttccaacatcggcagccagcacatccaacaaatgggcacgcaggactacgaagcggtgaaagaagttgtgatggaggatgtgaaagaacatttccgtccggaaatgatcaaccgcatcgacgaagtggtcgtgttccatggcttggatcaggccaatatccgcagtattgcgaaaatccagctcaaaggtttggaaaaacgtttggaaaaacaaaacctgcgcctgactgtttccgatgccgctctggacatcatcgccaaagccggtttcgacccgatttacggcgcacgtccgctcaaacgcgcgatccaatcggaaatcgaaaacccgctggccaaagccctgcttgccggaaactatgcgcccgaaagcgaaatcaaggtagaagccgacggcgacagactgaaatttgcc

SEQ ID NO: 28912 - DNA, 1302 bp, Neisseria gonorrhoeae; identical to SEQ ID NO: 28899

SEQ ID NO: 28913 - DNA, 1353 bp, Neisseria gonorrhoeae
atgaaagcacccgaactcttattgcccgccggcggattggaaagaatgcgcgccgcctacgattacggcgcagatgccgtttacgccggcagcccgcgttactccctgcgcgcccgcaacaacgaatttgccaaactcgacgtcctcgagcaaggcattaaagaagcgcacgaacgcaacaaaaaattctttttgaccgtcaacaccctgccgcacaattccaaactcaaaaccttcgttgccgacatggagccgctgattgccatgaaacccgacgcgctgattatggcggatccgggtttgattatgaccgtgcgcgaaaaatggccggaaatgccgatccatctgtccgtacaggcgaacaccaccaactactggggcgtgaaattttggcagaacattggtgtcgaacgcatcatcctgtcacgcgaattgggcatggaagaaattgccgaaatccgccaagaatgccccgacatcgaactcgaagtcttcatccacggcgcattgtgcatcgcctactcaggccgctgcctgttgtcgggctatttcaaccaccgcgatcccaaccaaggcacctgcaccaactcctgccgttgggactacaaagtccacaacgccacggaaagcgaggcaggcgatgcccagcttctgcaaggtttcaactttgaaaaagcccaagaagaagccaaccaaaactttgaaggcatcaacggtcaaaaacgccatccctacgccgacaaagttttcctgattgaagaatccaaccgcccgggcgagatgatgccgattatggaagacgaacacggcacctacatcatgaactccaaagatcttcgcggtatcgaagtcgtcgaaaaactcgccaaaatcggtgtggacagcctcaaagtcgaaggccgtaccaagtctctctactacgtcgcccgcgtcgcccagtcctaccgcaaagcgattcacgatgccgtcgcaggccgtccgtttgattacagcctgttgagcgaactcgaaggccttgccaaccgaggctacaccagcggcttcctcgaacgccaccaaactcaggattatcaaaactacctcagcggccattccaccgccaaacaaagccaatacgtcggacacgttaccgaaatcgacgaaaatggctgggcgaccatcgaagttaaaaaccgcttcgccgtcggcgattcgctcgaaatcatccacccgagcggcaaccaaaccatcaaattggaacaaatgacccgcaaaggccaacctgtcgatgttgccccgggcaacggcattcaggtcaaaatccccaatatgcagggcaaagaaaaagccctcatcgcacgcgtgttgaacccc

SEQ ID NO: 28914 - DNA, 459 bp, Neisseria gonorrhoeae
atgaaaccgcaaaaatccctacgcgcccgcgcgatggacatcctctcgcgccaagaagtcagccgcatcggtctgaaacgcaaacttgcaccgcacgccgaaagcgaagaggagttggaaaacgtgttaaacgaatttgccgaacgcaactggcagtcggatttgcgctacgccgaagcctatatccgcagcaaaagccgcaaacacggttcattgaggctgaaacaggctttggcgcaacagggcatagatgaaaaaaccagccgcaacctgcttcccgaccgctcaagcgaaaagcaagccgccatagccgtgttgcgtaaaaaattcaaacatcccgccgccaacctcaaagaaaaacaaaaacaggcgcgtttcctcgcctatcgcggttttgatgccgataccgttcagacggcattgaaacacgcttgggacgaaaattgggaagacagctgc

SEQ ID NO: 28915 - DNA, 1467 bp, Neisseria gonorrhoeae
ttgaaagcggttatcccgtataccggaggacacgaaatgaacgaatattcccaattaatcaagcatcccgatatttccctttccccgatttcagacggcatcggggtcggcaatccggcgacgggcgaaattttggcgtatgtccgcaacacgggttcggacaagctgaaaaacctgattcaaaaggcggcggcagcgcaaaaattatgggcggcgaaaaccgccttggaacgcgccgacatattgtggcgttggtattttttagttaaagaaaacaaagaagcactggcgcgtctcatgacgatggagcagggcaaaagcctgaccgaggcgcgcggcgaaatcgattatgcggcttcgtttgtgcgctggtttgccgaagaggcgcggcggattgacggcgatgtgctgacgagtgtgaaagcgtcgcaaaaactggttgtgttgaaacagcccgtcggcgttaccgctgcgattacgccgtggaatttcccgtccgcgatgattgcgcgcaaggccgcgcctgctttggcggtgggctgcgcgatgatagtcaaacctgcatcgctcacgcctttgagtgcgtatgcgttggctgtactggcctacgaagcgggcgtgccgcaggatttgcttcccgtcgtcagcggccgcgcttcggaaatcagccatgaatttgccacgaacccgaccgtgcgcaaaatcagcttcaccggctcgaccgaagtcggcgcgaaaatttttgccggcagcgcggcggacattaaaaaactcagtttggaactgggcggcaacgcgccgtttatcgtgtttgacgatgccgatttggacaaagccgtcgaaggcgcgctggcgagcaagttccgcaacagcggtcagacctgcgtctgcaccaaccgcgtttacgtccaatcgggcatttacgacgtattttgccgcaaattgagtgaaaaggcagccgcgctcaaattgggcgacggcttggacgaaggtgtgaaccaaggaccgctgattgaggaaaaagcggtagaaaaagtcgaacagcacatcgccgacgcactctccaaaggcgcggtctgtctgaccggcggcaaacgcagcgcgttgggcggaacgttttttgagccgactgtcttaagcggcgttacggcgcaaatggcggtagctcgcgaggaaaccttcgggcctttgtgtccggtgttccgttttgaaaccgaagccgaagtcatcgaggctgcgaacaatacggaatacggtttggcagcttaccttttcacctccgacaccgcccgtcaatggcgcgtcggcgaagtcttggaatacggcatggtcggcatcaatacgggcttaatcagtaatgaagcggcaccgttcggcggggtgaaacgcagcggtttgggacgtgaaggcagcaaatacggtgcggacgaatatctagaattgaaatatttgtgcattgatgccggg

SEQ ID NO: 28916 - DNA, 891 bp, Neisseria gonorrhoeae
ttgttgataatatcgaatgttagaaaaggagaaaacatgtctgaagaaaaattgaaaatgagtttcgagccaaccgtaatcgaacatttgggtgtaaagatgtattcgcacactgttcctgcgattgccgagttgatagcgaatgcctacgatgcatgtgctacggaagtggaagttaggttattcgataaaccggagcataaaatcgttattaaagataatggcataggaatgagcttcgatgaaatcaatgatttttatttgagaatcggtcggaacagaagggaagaaaaacaagcctccccgtgcggaagaattccaacgggtaaaaaaggtcttggtaaattggcattattcaggcttggcaacaaaatcgaaatctctactatccaaggaaacgaacgggttacttttactttggattatgcagagattaaaaaaagtgagcgtatttatcaaccggagtttcagaaagagtctgttaaacccaataccgaaaacggaacaactataactttaaccgagctgacgaaaaaacaaggatacccgttagataattatgtggggcatctttcccgtttatttgattttccggctcaggattttaaaatcaaagtaagcttgaacggctcggaaccaagaatcattgacggaaacctaaaatataatcttgttaccccacaattcgaatgggaataccaggatctagcaaccaatatttcatcgttatcttcaaaattcgaacagtatgaatacagcggattaatacaaggtaagttcattacaacggaaaaacctttaaagaataatatgaaaggtattaccttgtttgccaacggcagaatggtaaatatgcccgagtttttcactgatagcgaatccagccatttc

SEQ ID NO: 28917 - DNA, 374 bp, Neisseria gonorrhoeae
atgctttcagcgcttatctcttccgaacttagctacccggctatgcaactggcgttacaaccggtacaccagaggttcgtccactccggtcctctcgtactaggagcagcccccgtcaaacttccaacgcccactgcagatagggaccaaactgtctcacgacgttttaaacccaactcacgtaccactttaaaatggcgaacagccatacccttgggaccgactacagccccaggatgtgatgagccgacatcgaggtgccaaactccgccgtcgatatgaactcttgggcggaatcaagcctgttatccccggagtaccttttatccgttgagcgatggcccttccatacagaaccaccggatcactatgtc

SEQ ID NO: 28918 - DNA, 625 bp, Neisseria gonorrhoeae
gggaggagacagtgtggccatcgttacgccattcgtgcgggtcggaacttacccgacaaggaatttcgctaccttaggaccgttatagttacggccgccgtttaccggggcttcgatccgatgcttgcacatcttcaattaaccttccggcaccgggcaggcgttacaccctatacgtccactttcgtgttggcaagagtgctcgtgtttttaataaacaagtcgcagccacctattctctgcgaccctccggggcttacggagcaagtccttaaccttagagggcataccttctcccgaagttacggtatcaatttgccgagttccttctcccgagttctctcaagcgccttagaattctcatcctgcccacctgtgtcggtttgcggtacggttcgattcaaactgaagcttagtggcttttcctggaagcgtggtatcggttgcttcgtgtccgtaaacactcgtcatcacttcttcggtgttaagaaaacccggatttgcctaagtcttccacctaccggcttaaacaagctattccaacagcttgccaacctaaccttctccgtccccacatcgcatttgaatcaagtacaggaatattaacctgtttcccatcgactac

SEQ ID NO: 28919 - DNA, 192 bp, Neisseria gonorrhoeae
gtgaagcataagctcgcgtcttggtggaaaaccatcaagctgacggcaaacttgatggcaggcgtgcccgattatgaaaactacgttgcacaacaacgtaaacataatcccaacgcccccgtgatgaacaagctgcaatttcaagactattgccgcaaacgccgctgcggcgcaaacggcggacgctgctgt

SEQ ID NO: 28920 - DNA, 639 bp, Neisseria gonorrhoeae
atgccgtctgaaaaaccaatgaacagaagaaccttcctcctcggcgcaggcgcgttgcttcttaccgcctgcggcagaaaatccgcccgaacccacgccaaaattcccgaaggaagcaccgtgcttgccttgggcgattcgctcaccttcggctacggagcaaaccccggcgaatcctaccccgcgcaactgcaaaaactgacgggttggaatattgtcaacggcggcgtatcgggcgatacgtccgcgcaagccctatcgcgcctgcccgcgctgttggcacgcaaacccaagcttgtgattgtcggcataggcggcaacgactttctgcgcaaagttcccgaggagcagacccgcgccaatatcgcgaaaatcatcgaaaccgtgcaaaaggaaaacattcccgccgtcctcgtcggcgtgccgcacatcacactgggcgcgttgttcgggcatttgagcgaccatccgctgtatgaggatttgtccgaggaatacggcattccgttgttcggcggcgcgtgggcggaaattttgggcaataataatctgaaatccgaccaaatccacgccaacggcaaaggctatcggaaattcgccgaaaatttgaatcaatttttgagaaaacatgggtttaga

SEQ ID NO: 28921 - DNA, 2850 bp, Neisseria gonorrhoeae
atgaaactgtccgaactgttcaaccccaacgaatttgccgcgcggcatttgagtttcggcgacgaagcggcgttgcttgccgctgtcggcgagaagagcatggacgaatttgtcggcaacaccttgccgcaaagcatccgtatgccgtccgaactcgatttgcccgaagccctgaccgaggcggacgcattggcgaaattgaaaggcatcgcgtctaaaaacgtgatcaacaagtcctatatcggtttgggttattacccgacccgcgtgccgaacgtgattttgcgcaacgtattggaaaacccgggctggtacaccgcctacacgccgtatcaggcggagattgcccaaggtcgtttggaagcgttgttgaacttccagcaggtgtgcatcgatttgaccggtttccctgtggcaggcgcgtctttgttggacgaagcgaccgccgccgccgaagcgatggcgatggcgcaccgcgtgggcaaagtgaaatccgagcgtttctttgtggatgcgcgcgtgtatccgcaaactttggacgtgatgaaaacccgcgccaaatatttcggcttcgagctggtggtcagcgattttgcccaagcggatgaaggcgaatacttcggcgcgctgttccaatacgtcggtaaagacggcgacgtgcaagacttgcaggacgttatcggccgtctgaaagccaaaggcacaatcgttgctgttgccgccgacatcatgagcttggttttgctgaagtctccggctgaattgggcgcggatattgctttgggcaacacccaacgtttcggcgtaccgatgggctttggtggtccgcacgccgcttatttcgcgtttaaagacgagttcaaacgctccgccccgggccgcatcatcggcgtatccaaagacgcatcgggcaaacctgccttgcgcatggctttgtccacccgcgaacaacacatccgccgcgaaaaagcgacatccaatatttgtaccgcacaggcattgctggcgaacttggcgggcatgtacgccgtttatcacggccccaaaggcgtaaaacgcatcgccaaccgcattcacacactggcttccgtctttgccgacgcgctggtttcagacggcctcaaagtggttcacgaagtcttcttcgataccgttaccgtcgatttcggcagcaaagagaaagcagaccaagtgtttgccgctgctttggagtcgggttacaacctgcgcagcgtcaacaatactcaagttgcggctgcattccatgaaacgtcggtatacgaagatttggccgatttgtaccgcgcgtttaccggcaaggatacgttcacatttgccgatgatgtcaaaggccgtctgaatgccgaattactgcgtcaagacgacattctgcaacatcctgtgtacaacagttaccacaccgaacacgaaatgttgcgctacctgaaaaaactcgaagaccgcgacttggctatgaaccgcagcatgatttcgctcgggagctgcaccatgaagctcaatgcgactgcggaaatgttgccgattacttggactgagttctccgacatccacccttacgctcccgaagcgcaaaccgccggctaccgcgaattgcttgctgatatggaaaacagcctgaaagccatcaccggctttgacgcgatttccttccagcccaactccggcgcacaaggcgaatacagcggtatgctcgccatccgccgttatcaggaagcccaaggcgaagcacaccgcaacatctgcctgattcccaaatccgcccacggcaccaaccccgccaccgccgccatgctcggtttgaaagtcgtcgtcgtcgataccgacgaacacggcaacgtcaatattgacgatttgaaagccaaagccgaacaacaccgcgatgccttgtccgccatcatgattacctatccgtccacacacggcgtgtacgaagaaggcatccgcgacatctgccggatcattcacgaaaacggcggacaggtttacatggacggcgcaaacctcaatgcccaaatcggcatcatgcagcccgccgaagtcggcgcggacgtgttgcacatgaacctgcacaaaaccttctgtatccctcacggcggcggcggcccgggcatgggtccgattggcttgaaagcccacctcgccccgttcgcaccggggcataccctgaccgacacccacagcgcaagtgccgggcaaacctccgttgccgccgcagccttcggttctgcatccatcctgccgattacttggatgtacctgaccatgatgggcaaacaaggcatggaacaggcaacacgctgggcattgctcaacgccaactatgtcgctaaacgcttgagcgaagactatccgattctgtatacaggcaaaaacggccgcatcgcgcacgaatgcatcgtcgatttgcgtccgctcaaagccgaaagcggcatcaccgaaaccgacatcgccaaacgcctgatggactacggcttccacgcgccgacggtttccttccctgttgccggcacgctgatgatcgaaccgaccgagagcgaaagcaaagccgaactcgaccgcttcatcgccgccctgaaatccattcgccgcgaagtgcagaaagtcatcgacggcgaatggccgaaagacgacaacccactggtcaacgcgccgcacaccgccgcagatataaccggcgaatgggcgcatccgtactctcgcgaagaagccgtcttcccgctgcccttcgtgcgcgaacacaagttctggcccttcgtcaaccgcgtggacgacgtgtacggcgaccgcaacctcgtgtgcagctgcccgccgatggaaaattatgaagac

SEQ ID NO: 28922 - DNA, 370 bp, Neisseria gonorrhoeae
ttctgcctcgccttaggggccgactcaccctacgccgatgaacgttgcgtaggaaaccttgggctttcggcgagcgggcttttcacccgctttatcgctactcatgtcaacattcgcacttctgatacctccagcacactttacaatgcaccttcatcagcctacagaacgctcccctaccatgccggtaaaccggcatccgcagcttcggttatagatttgagccccgttacatcttccgcgcaggacgactcgaccagtgagctattacgctttctttaaatgatggctgcttctaagccaacatcctggctgtctgtgccttcccacttcgtttaccacttaatctatcatttgggaccttagccgg

SEQ ID NO: 28923 - DNA, 165 bp, Neisseria gonorrhoeae; identical to SEQ ID NO: 28908

SEQ ID NO: 28924 - DNA, 342 bp, Neisseria gonorrhoeae
atgaatttaccttttcgggcaatggtgtctgatttaggtggcacacttttaacacctgaacatttagtgggtgatcttaccattgatactctgagagtattagagcaaaaaggcgtagatattattttggcaacaggacgcaatcataccgatatgtcatccattcttggaaaaatcggtgcggaacgtgcggttatgattacatcaaacggtgctcgtgtacgggatttacagggtaatttgctttatagcaatagtttgcctgaagaattagttctcgagctttacaaaacatcatatgtgggaaatcttattcagacaccaagattttgtcgccatcaa

SEQ ID NO: 28925 - DNA, 3954 bp, Neisseria gonorrhoeae
atgtctgttgttttgcccttgcgcggcgttaccgccctttccgatttccgtgtcgaaaaactcttgcaaaaagccgccgcactcggcctgcccgaagtcaaattaagcagcgaattttggtatttcgccggcagcgagaaagcacttgatgccgcgactgtcgaaaaactgcaagccttgttggcggcgcaaagcgttgaacaaacgcccgaagcgcgcgagggtttgcatttgtttttggtaacgccccgtttgggtacgatttcgccgtgggcttccaaggcgaccaatatcgcggaaaactgcggtttggcaggcatcgaacgcatcgagcgcggtatggcggtgtggctggaaggtgcgcttaccgatgaacagaaacagcaatgggcggcgttgctgcacgaccgcatgaccgaatccgtgctgcccgattttcagacggcatccaaattattccaccatctcaaatccgaaaccttctccaccgtcgatgttttgggcggcggtaaagaggctttggtcaaagccaataccgaaacgggtttggcactctccgccgacgaaatcgattatctggttgaaaactatcaggctttgcagcgcaatccgtccgatgtggagctgatgatgttcgcgcaggcaaacagcgaacactgccgccacaaaatcttcaacgccgatttcatcctcaacggcgaaaaacaaccgaaatccctgttcggcatgatacgcgacacgcacaacgcgcatcccgaaggtacggtcgtcgcctataaagacaattcgtccgtgatcaaaggcgcgaaaatcgagcgtttctatccgaatgcagcggaaaaccaaggctaccgtttccacgaggaagacacccacatcatcatgaaagtggaaacgcacaaccacccgaccgccatcgcgccgtttgcgggcgcggcaacaggcgcgggcggcgaaatccgcgacgaaggtgcgacgggcaaaggttcgcgtccgaaagcgggcttgaccggctttaccgtgtccaacctcaacatccccgacctcaaacagccgtgggaacaagactacggcaagccggaacacatttcctcgccgttggacatcatgattgaaggcccgattggcggtgcggcgttcaacaacgaattcggccgcccgaacctcttgggctacttccgcacctttgaagaaaaatttgacggtcaggttcgcggctaccacaaaccgattatgattgccggcggtttgggcagcattcaggcgcagcagacgcacaaagacgaaatccccgaaggcgcactgctgatccaactgggcggcccgggcatgctcatcggcttgggcggcggtgcggcttcttcgatggataccggtacaaatgatgcgtctttggacttcaactccgtacaacgcggcaaccctgaaatcgaacgccgcgcgcaggaagtcatcgaccgctgctggcagctcggcgaccaaaacccgattatctccatccacgacgtgggcgcgggcggcttgtccaacgctttccctgaattggtcaacgatgccggacgcggcgcggtattcgagctgcgcgaagtgccgttggaagaacacggtttaacgcctttgcaaatctggtgtaacgaatcgcaagagcgttatgtcttgtcgattttggaaaaagatttggacaccttccgcgccatctgcgaacgcgaacgctgcccgtttgccgtagtcggcacggcgaccgacgacggtcatttgaaagtgcgcgacgatttgttctccaacaaccccgtcgatttgccgctgaacgtcttgctcggcaaaccgcccaaaaccacgcgtaccgacaaaacggttacgccgtccaaaaaaccgtttcacgcgggcgatatcgacatcaccgaagccgcctaccgcgttttgcgcctgcctgccgtagccgccaaaaacttcctgattaccatcggcgaccgcagcgtcggcggcatgacccaccgcgaccaaatggtcggcaaataccaaacccccgtagccgactgcgccgttaccatgatgggcttcaacacctatcgcggcgaagcgatgtctatgggcgaaaaaccggccgtcgccctgtttgacgcgcccgcctcgggcagaatgtgcgtcggcgaagccatcaccaacatcgcggcagtcaacatcggcgacatcggcaacatcaaactttccgccaactggatggcggcgtgcggcaacgaaggcgaagacgaaaaactctaccgcaccgtcgaagccgtttctaaagcctgccaggcattggatttgagcattcccgtaggtaaagacagcctgtcgatgaaaaccgtgtggcaggacggcgaagagaaaaaatccgtggtttcgccgttgagcctgattatttccgcgttcgcgcctgttaaagacgtgcgaaaaaccgttacgcccgaattgaaaaacgtcgaaggcagcgtattgctgtttatcgatttgggcttcggcaaagcgcgcatgggcggctcggcgttcggtcaggtgtacaacaacatgagcggcgacgcgcccgatttggacgatgcaggccgtctgaaagcgttttacagcgtaattcaacagcttgtcgccgaagacaaacttttggcgtatcacgaccgcagcgacggcggtttgtttgcgacgctggcggaaatggcgtttgcggcacggtgcggtattagtgccgatatagattgcctgatggataaattcctgccgattcatctcccggattttcaaggcgaccctgccgaagacttatctgacgaactttataatcatgccgccattaaaatcttattcaatgaagaattaggcgcggttatccaaatccgccaaaaagatagggattatgttgatgcggcatttgaaacggccggcttaaccgatgcggtcagccggattggctctcctgattttgacaatgagtttatttctttctttggttacggttatttcttggaacaaaaccgcgccgacctgcaacgcgcgtggcaggaaaccagccacgccatccaacgcctgcgcgacaaccctgcctgcgccgacagcgagttcgccctgattggcgacaacgaacgcagcgcattgtttgccgacgtgaagttcgacgtgaacgaagacatcgccgcgccgtttatcaacagtggcgcgaaacctaaaatcgccatcctgcgcgaacagggcgtaaacgggcaaatcgaaatggccgccgccttcacccgcgccggattcgatgcctacgacgtgcatatgtccgacctgatggctggccgcttccgccttgccgacttcaaaatgctggcggcgtgcggcggcttcagctacggcgacgtactcggcgcgggtgaaggctgggcgaaatccatcctgttccaccctgccttgcgcgaccaattcgccgccttctttgccgatccgaacacgctgacattgggcgtgtgcaacggctgccaaatggtcagcaaccttgccgaaattatcccgggcgcagaaacatggccgaagttcaaacgcaacctgagcgagcagtttgaagcgcgcctgaatatggttcacgtccccaaatcagcgtcgctgattttgaacgaaatgcaagactccagcctgcctgtcgtggtcagccacggcgaaggccgcgccgacttcgcgcttcacggcggcaatatttccgccgatttgggcatcgcgctgcaatatgtggacggtcaaaaccaggttacccaaacctatccgctcaaccccaacggctcgccgcagggcatcgccggcattaccaacgccgacggccgcgttaccattatgatgccccaccccgaacgcgtgtaccgtgccgcacaaatgagccggaaaccggaaggctggacggaactgtccggctggtaccgcctctttgccggcgcacgtaaagccttgggc

SEQ ID NO: 28926 - DNA, 1098 bp, Neisseria gonorrhoeae
atggcaggcaacactttcggacaaatcttcaccgtgaccaccttcggcgaaagccacggcgcgggtttgggctgcatcatcgacggctgcccgcccggcttggaattaagcgaagcggatatccaatttgacctcgaccggcgcaaacccggcaccagccgccacgttacccaacgccgcgaagccgaccaagtcgaaatcctctccggcgtattcgaaggcaaaaccaccggcacacccatcgccctcctaatccgcaacaccgaccagcgcagcaaagactacggcaacatcgccaccgccttccgccccggacacgccgactatacctattggcacaaatacggtacgcgcgactaccggggcggcggcaggagttccgcccgcgaaaccgcagcccgcgttgccgccggagccgttgccaaaaaatggctgaaagaaaaattcggcacggaaatcaccgcctacgttacccaagtcggcgaaaaaaaaatccggtttgaaggcagcgaacacatttcccaaaatcctttttttgccgccaaccaaagccaaatcgccgaactggaacactatatggacggtgtgcgcaaatccttggattccgtcggcgcgaaactgcatatcgaagccgccaacgtccccgtcggtttgggcgaacccgttttcgaccgcctcgatgccgaaatcgcctacgcgatgatgggcatcaacgccgtcaaaggcgtggaaatcggcgcaggttttgacagcgtaacgcaacgcggcagcgaacacggcgacgaactgaccccgcaaggcttcctgtccaaccattcgggcggcatcctcggcggcatcagcaccgggcaagacatctgcgtcaatatcgccatcaaacccaccagctccatcgccacaccgcgccgaagcatcgacattcacggcaaccccgtcgaactcgccacccgcggcaggcacgatccctgcgtcggcttgcgcaccgcgccgattgccgaagctatgctcgccttggttttaatcgaccacgccctgcgccatcgtgcgcaaaatgcggatgttgccgcggatacgcccgatatttcccgctcggacaag

SEQ ID NO: 28927 - DNA, 1452 bp, Neisseria gonorrhoeae
atgagcatcgaacacactcctccgacacacgacggcgaaaccggtcaaaaccatgccgaacgcccttccgccgatttcgaccgtgtccactccctctgcgaaatcctcgaacctgcttttgaacaaatcgaaaacggcacaccgctcgaagatgcgccgctgcgcgacaaactgaccgagctgaccgtcctcttggccgagttgcaccctgccgacgtggccgacgtcttggagtccctgccgccgcgcgaacgcaatatcgtttggcttctggtcaaacccgaagacgacggcgaagtattgctggaagtatccgacgcggtgcgagaaacgctgatcgagtcaatggacaaggacgaattgttggcggcggtcgatgatttggatgcggacgaattggcggagctggcagacgatttgccgcaccaagtggtttatgaagccttacagacgcgcgatgaggaagagcgcgcccaagtcaaggcggcaatgtcgtatgaagacaaccaagtcggtgcgattatggacttcgagttggtcagcatccgcgccgatgtcgcctgcgaagtggtgctgcgttatctgcgccgcttcgacagcctgcccgaccataccgacaagatttttgtcgtcgatgaaaacgacgtgctgcagggcgtgctgcccatccgcaaacttttggtcgccgatcccgaagatttggtggaaaacgtgatggcgaaagatgtcgtgcgtttccgcgccgaggacgacgtggaagaagcggcgcaggcgtttgaacgctacgacttggttaccgcgcccgtcgttgatgaaaacaaaaagctcatcggcaggattaccatcgacgagatggtggacgtgatccgcgaagaatccgaagcggatatgttgaacatggcaggtttgcaggaagaggaagacctgttcgcccccgtcttggattccgtcaaaaaccgctggatgtggctcgccgtcaacctctgcaccgccttcctcgccagccgcgtcatcggcgcgtttgaaggcagtatcgaaaaaatcgtcgcactcgccgcgctgatgcccatcgtcgccggcatcggcggtaactcgggcaaccagacgattaccatgattgtccgcgcgatggcgatggggcagctgacggatatgcaggcgggaaggctgttgaaaaaagaagtcggcgtcgccttggtcaacggcattatttgggggacggtgatgggagcggtttcgtggctgctttacggcagcctcggcatcggtttggtcatggttgccgcgatgacgctcaacctcctgctggcggcaacggtcggcgtattgattcccgtggtaatggaaaaattcggacgcgatcccgcgctgggcagctcggtgctgattaccgccgttaccgactccggcggcttcctcattttcttgagtctcgccaccctgttcctgctt

SEQ ID NO: 28928 - DNA, 906 bp, Neisseria gonorrhoeae
atgaatcaaaccgccatcaaccgcgccgatgcgcgtacccgctttatcttcgacgatatgcccgtgcgcgggctgcacgtccgtctggaaaacgtgtggcaccacattgtaaaacagaaaaactatcccgccgccatccgctgcgccttgggagagctactggctgccggcgttctgctgtcgggcaaccttaaaaacgaaggcacgctgattgtgcaggttcaggggcagggaaaactgaaaatgctggttgcggaagcgacttccgaccgtaccgtccgtgcaaccgcgcggtgggacgaaaccgcagaaatagccgatgacgaaagcctcggcgaccttttgggcggcaacggcgtgttcgtattgacgctgcaacccaaagacggcgaaccctggcagggcgtagtgcctttggaaggcggcagcatcgcgcaaatgttggtgaactatatgaaacgttccgaacagcttgatacgcacatcgccctgtctgcaagcgatgaagcggcgggcgggctgctggtgcagcgtctgcctgaagaggtgttggatgaagaggcatgggaacacgtcagtacgctggcgcgcacgctgacggcggaggagctggcagaattggacgcgcaacacgttttataccgcctgttccacgaaacgccgccgcgcgtgttcgagccggaaacgtttgaatcctcatgtacctgttctcggggcaaggtcagcgatatgctgttgatgctgggcggggaagaagtcggcggcgtggtggcggaacaaggcagcatcgaagtcgattgcgacttctgccacagcaaatacgtgtttgatgaaaccgatgtcaacgcgctgttcggggaggatgtggtcggcgttgccaaagggctgccccgacataccgtccaa

SEQ ID NO: 28929 - DNA, 1293 bp, Neisseria gonorrhoeae
atgttagatatccaattgctccgcagcaacaccgccgccgttgccgaacggcttgcacggcgcggttatgactttgataccgcacgttttgacgcactggaagaacgacgcaagtccgttcaggtgaaaaccgaagaactacaagcctcgcgcaacagcatttccaaacaaatcggcgcactgaaaggtcagggcaaacatgaagaggcgcaggcggccatggatcaagtcgcccaaatcaaaaccgatttggaacaggctgccgccgatttggatgccgttcaaaaagaattggacgcatggttgttgagcatacctaacctgccgcacgaaagcgtacctcccggtaaagacgaaaccgaaaacgtcgaagtccgcaaagtcggtacgccgcgcgaatttgattttgaaatcaaagatcatgtcgatttgggcgagcctttgggcttggatttcgaaggcggcgcgaaactttccggcgcacgatttaccgtgatgcgcggacaaatcgcccgtctgcaccgcgccttggcgcaattcatgctcgatacgcacatgctgcaacacggctacaccgagcattacacgccttatatcgttgacgatacgacgctgcaaggcacaggtcagctgcccaaatttgcagaagatttgttccacgttacccgcggcggcgatgaaaccaaaaccacgcaatatctgattccgacagccgaagttaccctgaccaataccgttgccggcagcattatcccgtccgaacaactgccgctgaagctgaccgcgcattcgccctgtttccgcagtgaagcgggatcatacggcaaagacacgcgcggcctaatccgccagcaccagttcgacaaagtagaaatggtacaaatcgttcatcccgaaaaatcatacggcgcgctggaagaaatggtcggccatgccgaaaacatcctgaaggctttggaactgccctaccgcgtgattaccctgtgtaccggcgacatgggtttcagcgcggccaaaacgtatgacttggaagtttgggttcccgcacaaaatacctaccgcgaaatctcaagctgctccaactgcgaagatttccaagcacgccgcatgaaggcgcgtttcaaagacgaaaacggcaaaaaccgcttggtacataccttaaacggctccggtttggcagtcggtcgcactttggtcgcggttttggaaaaccatcaaaacgccgacggcagcatcaatatccccgccgcactgcaaccgtatatgggcggtgttaccaagttggaagtgaaa

SEQ ID NO: 28930 - DNA, 1074 bp, Neisseria gonorrhoeae
atgaagccgtctatcttagaaaaactgcaacaactcggcgaccggttggaagaagttacccaccttttagggcaacccgaagccacatccgatatggacaactaccgcaagctcacgcgcgaacacgccgaactgacccccgtcgtcgaagtattccaaaactatcggcttgcccaaagcgacttggcggatgccgaagaaatgttgtccgaccccgaaatgaaagactttgccgccgaagaaatcgaagcggcgaaagccaaaatcgacgaactggataccgaattgcaaaaactgctgctgcccaaagatgccgacgacgacaaaaacatctttatcgaaatacgcgccggcacgggcggcgacgaagccgcgctgtttgccggcgatttgctgcgtatgtacagccgctacgccgaacgcaaccgctggcaggttgaaatcgtgtccgccaacgaaagcgaattgggcggctataaagaagtcatcgcccgtattgtcggactcggcgcgtacagccgtctgaaatttgaatcgggcggacaccgcgtgcagcgcgtccccgccaccgaaagccaaggccgcatccacacctccgcctgtaccgttgccgtcatgcccgaagcggacgagctcgaagacatcgaactgaaccccgccgacctgcgcaccgataccttccgcgcatccggcgcgggcggtcagcacattaacaaaaccgactccgccgtccgcattacccacttgccgacaggcatggtggtcgaatgccaagacggccgcagccaacacgccaacaaagcgcaggcgatgaaagtcctcgccgcccgcctgaacgacgcgcaaaaacgcgaagtccaagccaaagaagccgccgaacgcaaatccctcatcggcagcggcgaccgcagcgaacgcatccgcacctacaactatccccaaggcagggtaacagaccaccgcatcaacctcaccctgcacaagctggattttgtgatggacggcgatttggcagaaatcaccgatgccctgattgccgaacatcaggcggagcttctggcggcgatgggcgat

SEQ ID NO: 28931 - DNA, 1335 bp, Neisseria gonorrhoeae
atgatggcaaaaaaatatttcggcacggacggcgtgcgcggcgaagtcggtcagtttccgattacgcccgattttgtattgaaactcggctatgcggcggggcaggtgctggtgcagcacgataccgatcagaaaccgaccgtcctcatcggcaaagacacgcgcatttcaggctatatgctggaagccgcgctggtagcgggctttacggcggcgggtgtgaatgtggtacagaccgggccgttgcccacgcccggtgtggcttatctgacccgcgcattgcgcctgtccgccggcgtgatgatttccgcgtcgcacaacacctattccgacaacggcatcaaattctttgccgaaggcggcgtgaaactttccgatgaagtcgagttggaaatcgaagccaaaatcgatgaagaaatgaaaacccaaccgtccgcacgtctcggacgcgcccgccgcatcagcggtgcggacgaccgctatatcgagttttgcaaatccaccttccccggccattccgaccttcggggtttgaagttggttatcgataccgccaacggtgcaggatacggcgttgcacccaaagtgttccacgaactcggcgcacaggtcgtcagcatcggcaacgaacccaacggctacaacatcaacgaaaaatgcggcgcgacccataccaaaaccctccaagccgccgtgttgcaaaacgaagccgattacggtattgccttggacggcgatggcgaccgcctgatgatggtcgataaaaacaggcaggtttacgacggcgacagcctgatttacgtcatcgccaaagcccgcgcccgagaaggtatcaacatcggcggcgtggtcggaacggtcatgaccaatatggcgatggaaatcgccctgaaagagcagggcgtcgatttctgccgcgccaaagtcggcgaccgctatgtgttggaacagctgaaccaacgcggctggctcatcggcggcgaagccagcggccatattttgtgcatggacaaacataacaccggcgacggcattatttccgcgctgcaagtcttggcggcgctgcaaatcctgaaccaagacctcgccaccgtttgcgccgactggcagccgtatccgcaaacgatgattaacgtgcgcatccaaaagggtcagaaatggcaggaggcttcgaaagacgtgttggccgaagtggaaaaagaactcgaaggcaaagggcgtgtcgtgttgcgcgcttcgggaaccgaacccgtcgtgcgcgtgatggtcgaggcgcgtcaggccgattgggcgcgcgacggggcggagcgtatcgccgccgccatcggcggcatt

SEQ ID NO: 28932 - DNA, 852 bp, Neisseria gonorrhoeae
atggcacgacacgtttggcgggcaggacggtttgaaatcggtttggacaaaccgaaaatcatgggcatcgtgaatctcacgcccgattctttttccgacggcggcgcgtattcgcaaaacgcccaaacagctttggcgcatgccgaacggcttttgaaagagggtgcggacattctcgacatcggcggcgaatcgacgcggccgggtgcggatttcgttccgcccgaagaagaagaatgggcgcgggttgagcctgtattggcggaagcggcggggtggggcgttcccgtcagtttggacacgcgccgcacggtggttatggaaaaggcgttggcactcggcggcatcgatattatcaatgatgtggcggcgttgaccgacgaaggtgcggtcgaattgctggcgcgccaggcggacacgggcatttgcctgatgcatatgcggggcttgcccgaaaccatgcaggacaatccgaaatatcaggatgtggtcggcgaagtggcacgttatctgaaaacacggtcagaaacctgtgtcgcggcaggcatcgcgccgcaacggattacgctcgacccgggtttcggcttcggcaagaacctgcaacacaatatcgcactgatgcggcatttgcccgaattgatggcggaaaccggtttgccgctgctgatcggtgtgtcgcgcaaacgcatgataggtgagctgaccggtgaggcggacgcggcggcgcgcgtacacggcagcgtggcagcggctttggcttccgtggcacgcggagcgcaaatcgtgcgcgtgcacgatgtgaaggcgacggcggacgcgttgaaggtgtgggaagcgttgggcgtgaaccgg

SEQ ID NO: 28933 - DNA, 1146 bp, Neisseria gonorrhoeae
atgactgaaactactcaaaccccgaccttcaaacctaaaaaatccgttgcgctttcaggtgttgcggccggtaataccgctttgtgtaccgttggccgtaccggtaacgatttgagccatcgcggttacgacattctaaatttggcacaaaaatgcgagtttgaagaagtcgcacacttgctgattcacggccatctgcccaacaaattcgagctggccgcttataaaaccaagctcaaatccatgcgcggcctgcctatccgtgtgattaaagttttggaaagcctgcctgcacatacccatccgatggacgtgatgcgtaccggcgtgtccatgctcggctgcgttcatcccgaacgcgaaagccatcccgacagcgaagcgcgcgacatcgccgacaaactgatcgccagcctgggcagcatcctgctgtactggtatcaatattcgcacaacggcaaacgtattgaagttgaaagcgacgaagagaccgtcggcggtcatttcctgcacctgttgcacggcaaacgcccaagcgaatcacacatcaaagccatgcatgtttcactgattctgtatgccgaacacgagttcaacgcctccacctttactgcccgcgtgattgccggtacgggttcggatatgtattcctgcatcaccggcgccatcggcgcgcttaaaggtccgaaacacggcggtgcgaacgaagtcgcctacgacatccaaaaacgctaccgcaacgccgacgaagccgacatccgcgaacgcatcggccgcaaagaaatcgtgatcggtttcggccatccggtttacaccatttccgacccgcgcaacgtcgtgattaaagaagtggcgcgcggtttgagccgggaagcgggcgacatgcgcctcttcgacatcgccgaacgcttggagagcgtgatgtgggaagagaaaaaaatgttcccgaatctggactggttctctgccgtttcctaccaaaaattgggcgtaccgaccgctatgttcacaccgctgttcgtgatttcgcgatccaccggctgggcggcacacgtcctcgaacagcgcaaagacggcaaaatcatccgtccgagcgcaaactacgccggccctgaagatttggcgtttgtggagattgaagaacga

SEQ ID NO: 28934 - DNA, 447 bp, Neisseria gonorrhoeae
atgagcaccttcttccggcaaaccgcccaagccatgactgccaaacacatcggccgcttcccgctatcggagttggaccaggtgattgattggcagccgatcgaacaatacctgatccgtcaaaaaacccgttacctccgagaccgccgcggccgtcccgcccatcccctgtcgtccatgttcaaagccgtcctgcccggacaatggcacagcctctccgatcccgaactcgaacacagcctcatcacccgcatcggtttcaacctgttttgccgttttgacggaccgggcatccccggttgcagcaccttatgccgctaccgtaaattccgctatgcgcgggcagcctatttcgggctgctcaaagtgggtgcgcaaagccacctgaaggcgatgtgtttgaacctgttgaaagccgccaacaggctaagtgcgcccgctgccgcc

SEQ ID NO: 28935 - DNA, 1026 bp, Neisseria gonorrhoeae
atgattacaccgcaacaggctatcgaacgattaatcagcaataacgagttgttttacgatgaaatgaccgacttgatgcgccaaatgatgagcggaaaagtgccgcccgaacaaattgcggcgattttgaccggcttgcgtatcaaggttgaaaccgtttccgaaatcaccgccgccgccgccgtgatgtgcgagtttgcgtcaaaagtgccgctggaggatgcggacgggctggtcgatatcgtcggtacgggcggggatggcgcgaaaaccttcaatatttcgacgacttcgatgtttgttgctgcagcggcaggcgcaaaggttgccaaacacggaggccggtcggtctcttcctccagcggtgcggctgacgtgatggagcaaatgggcgcaaacctcaacctgactcccgaacagattgcccaaagtatcaggcagaccggtatagggtttatgttcgcacccaatcaccacagtgccatgcgccatgtcgccccggtgcgccgttcgctcggtttccgaagcattttcaacatattgggtccgttaaccaatcctgcgggcgcgccgaaccagcttttgggcgtgttccacaccgatttgtgcggcattttgtcgcgggtcttgcaacaactcggctcaaaacacgttttggtcgtttgcggggagggcggtttggatgaaattacactgacgggcaaaacgcgcgttgccgaactcaaagacggaaaaatcagcgaatacgacatccgcccagaagatttcggtatcgaaacccgccgcaatttggatgaaatcaaagttgccaatactcaggaatctttgttgaaaatgaacgaggtactggacgggaaagaaggggcggcgcgcgatatcgtattgcttaataccgccgccgccttatatgccggaaatatcgctgcttcgctttcagacggcatatctgccgcacgggaaggcatcgattcaggtagggcgaaggcgaaaaaagaggagtttgtcggttttacacggcaattcgcc

SEQ ID NO: 28936 - DNA, 1176 bp, Neisseria gonorrhoeae
atggaatttgtttacgacgtggcagaatcggcagtcagccctgcggtaattaaagtaatcggcttgggcggcggcggttgcaatgcaatcaataacatggttgccaacaatgtgcgcagtgtggagtttatcagtgccaatacagatgcgcagtctttggcaaaaaaccatgcggcgaagagaatccagttgggtacgaatctgacacgcggtttgggcgcgggtgcgaatcccgatatcggccgtgcggcagcacaggaagatcgggaggccattgaagaagccattcgcggtgccaatatgctgtttatcacgaccggtatgggcggcggtaccggtaccggttccgcgccggttgttgctgagattgccaagtctttgggcattctgaccgttgccgtagttacccgtccgttttcttatgaaggcaaacgcgtccatgtggcacaggcagggttggaacagttgaaagaatacgtcgattcgctgattatcatcccgaacgacaaactgatgaccgcattgggtgaagacgtaactatgcgcgaagccttccgcgcggcggacaatgtattgcgcgatgcggtcgcaggcatttccgaagtggtaacttgcccgagcgaaatcatcaacctcgactttgccgacgtgaaaaccgtgatgagcaaccgcggtatcgctatgatgggttcgggttatgcccaaggtatcgaccgtgcgcgtatggcgaccgaccaggccatttccagtccgttgctggacgatgtaactttggatggtgcacgcggtgtgctggtcaatattacgactgctccgggttgcctgaaaatgtccgagttgtctgaagtcatgaaaatcgtcaaccaaagcgcgcatcccgatttggaatgcaaattcggtgccgctgaagacgagaccatgagcgaagatgccatccggattaccattatcgctaccggtctgaaagaaaaaggagcggtcgatcctactccggcaagggaagtagaagcggttgccccgtccaaacaggagcaaagccacaatgtcgaaggtatgatccgcaccaatcgcggtatccgcaccatgaatctgacagcagcggatttcgataaccagtctgtccttgacgattttgaaattcctgcaattttgcgtcgtcaacacaattcagacaaa

SEQ ID NO: 28937 - DNA, 1242 bp, Neisseria gonorrhoeae
atggaacagcagaaaagatacatcagcgtactggatatcggtacgtctaaagtcctcgcactgatcggggaagttcaagatgacgacaaaatcaacatcatcggtttggggcaggctccttcacggggcttgcgcgcgggcatggtaaccaatatcgatgccaccgtccaagccatcaggcaggcggtcaatgatgccgagctgatggcggataccaaaattacccacgttaccacaggtatcgcaggcaaccacatccgcagccttaattcgcaaggtgtggttaaaatcaaagacggagaagtaacacaggcagacatcgaccgcgccattgaaacggcaaaggcaatcaatatcccgcccgatcaaaaaattctcgatgccgtggttcaagactacattatcgacacccaacttggtgtaagggagcccatcggtatgagcggtgtgcgtctggatacgcgggtgcacatcattaccggtgcaagtacggcagtgcagaatgtccaaaaatgtatcgagctgtgcggcttgaaaagcgatcagatcatgcttcaaccgttggcaagcgggcaggcggtgctgactgaagatgaaaaagacctcggcgtatgcgtcatcgacattggtggcggaacgaccgatattgccgtttatatgaacggcgccatccgccatacgtccgtcattccggccggtggtaatctgattaccaaagatttgtccaaatcgttgagaacacctctcgatgccgccgagtacattaaaatccattatggcgtggcatcatgcgatacggaaggcttgggcgagatgattgaagttccgggcgtgggtgaccggacatcgcgtcaggtttccagtaaggttttggcagcaatcatcagcgcacgtattcaggagatttttggcgtagtgctgggcgaactgcaaaaatcgggtttccccaaagaagtgctgaatgcgggtatcgttctgaccggcggtgtgtccatgatgaccgggattgtggaatttgccgaaaaaatcttcgatttgcctgtacgcaccggtgcgccccaagaaatgggcggtttgtccgaccgtgtccgcacaccgcgcttttctaccgctatcgggctgcttcatgcagcatgcaagctggaaggaaacttgccgcaaccggaaaacggtacagtgcaagagagagaagggggcggcggtttgttggcaagattgaagcggtggattgaaaacaacctc

SEQ ID NO: 28938 - DNA, 726 bp, Neisseria gonorrhoeae
atgtgggataatgccgaagcgatggaacggctgacgcgctggctgcttgtcatgatggcgatgctgcttgctgcgtccgggctggtttggttttacaattcgaatcatctgcccgtcaagcaggtgtcgctgaagggcaacctggtttattccgataagaaggcattgggcagtttggcgaaagaatacatccatgggaatattttgaggacggacatcaatggcgcacaggaagcctaccgccggtatccgtggattgcgtcggtcatggtgcgccgccgttttcccgatacggttgaggtcgtcctgaccgagcgcaagccggttgcacgttggggcgaccatgccttggtggacggcgaaggcaatgtttttgaagcccgcttggacagacccggaatgccggtattcagaggcgcggaaggaacgtctgccgaaatgctccgccgttatgacgaattttcgactgttttggcaaaacagggtttgggcatcaaagagatgacctatacggcacgttcggcgtggaatgtcgttttggacaacggcatcaccgtcaggctcggacgggaaaacgagatgaaacgcctccggctttttaccgaagcgtggcagcatctgttgcgtaagaataaaaatcggttatcctatgtggatatgaggtataaggacggattttcagtccgccatgctcccgacggtttacccgaaaaagaatccgaagaa

SEQ ID NO: 28939 - DNA, 912 bp, Neisseria gonorrhoeae
atgcagaattttggcaaagtggccgtattgatgggtggtttttccagcgaacgagaaatctcgctggacagcggtaccgccattttgaacgccttaaaaagcaaaggcatagacgcatacgccttcgaccctaaggaaacgccgttatccgaactgaaggagcggggctttcagacggcattcaacatccttcacggtacttacggcgaagacggggctgttcagggtgcattggaactgttgggcattccctataccggcagcggtgtcgccgcctccgccatcggcatggacaaataccgctgcaaactgatttggcaggcattgggattacccgttcccgagttcgccgtactgtacgatgataccgatttcgatgccgtcgaagaaaaattgggtctgccgatgtttgtgaagccggcggccgaaggcagcagcgtcggcgtggtaaaagtcaaagaaaaaggccgtctgaaaagcgtttacgaagaattgaaacaccttcagggcgaaatcattgccgaacgttttatcggcggcggcgaatattcctgccccgtcctgaacggcaaagggctgcccggcatacacatcatccccgcaaccgagttttacgactacgaagccaagtacaaccgagacgacaccatttatcaatgtccttcggaagatttgaccgaagccgaagaaagcctgatgcgcgaactggcggttcgcggcgcacaggcaatcggtgcggaaggctgcgtgcgcgtcgatttcctcaaagataccgacggcaaactctatctgttggaaatcaacaccctgcccggtatgaccggccatagtttagtaccgaaatccgctgccgttacgggcgtgggttttgccgatttatgtattgaaattttgaaggccgcacatgtggga

SEQ ID NO: 28940 - DNA, 1407 bp, Neisseria gonorrhoeae
atgatgaaaaatcgagtaagcaacatccattttgtcggtatcggcggcgtcggcatgagcggtatcgccgaagtcttgcacaatttgggctttaaagtttccggttcggatcaggcgcgaaatgccgctaccgagcatttgagcagcctgggcattcaagtttatcccggccataccgcagaacacgttaacggtgcggatgtcgtcgttgcctctaccgccgtcaagaaagaaaatcccgaagttgtcgctgcgttggagcggcaaattcccgttattccgcgcgccttgatgctggcagagctgatgcgcttccgtgacggcatcgccattgccggtacgcacggcaaaaccacgaccaccagcctgaccgcctccatcctcggcgcggcaggactcgaccccactttcgttatcggcggcaaactcaacgccgcaggcaccaacgcccgcttgggcaaaggcgaatacatcgttgccgaagccgacgaatccgatgcctctttcctacatctgaccccgattatgtccgtcgttaccaatatcgacgaagaccatatggatacctacgggcacagcgtcgaaaaactgcatcaggcgtttatcgatttcatccaccgtatgcccttctacggcaaagcctttttgtgtgttgacagcgaacacgtccgcgcgattttgcccaaagtgagcaaaccttatgctacttacggtttggacgataccgccgacatctacgccaccgacatcgaaaacgtcggcgcgcaaatgaaattcaccgtccatgttcaaatgaaaggacatgagcaggggtcgtttgaagtcgtgctgaatatgcccggcagacacaacgtgctgaacgcattggcagccatcggcgtggcgctggaagtcggcgcatcggttgaagcgatccaaaaaggcttgctcggctttgaaggcgtcggccgccgcttccaaaaatacggcgacatcaagttgccaaacggcgggaccgctttgctggtggacgattacggacaccaccccgtcgaaatggcggcaacccttgccgctgcacgcggcgcgtatccggaaaaacgtttggtgctcgccttccagccgcaccgctatacccgcacgcgcgatttgtttgaagactttaccaaagtactcaataccgttgatgcgctggtactgaccgaagtttatgccgccggcgaagagccggttgccgccgccgactcccgcgccttggcgcgtgctatccgcgtattgggcaaacttgagccgatttactgcgaaaacgtcgccgacctgccgcaaatgctgatgaatgttttacaggatggcgatgttgtgttgaatatgggtgcgggaagcatcaaccgcgttccctccgcgctgttggaattgtcgaaacagatt

SEQ ID NO: 28941 - DNA, 1065 bp, Neisseria gonorrhoeae
atgggcggtaaaacctttatgctgatggcgggcggaacgggcggacacattttcccagctctggctgtggcggattcattgcgcgtgcgcggtcatcatgtaatttggctgggcagcaaggattcgatggaagagcgcatcgtgccgcaatacggcatacgcttggaaacgctggcgattaaaggaatacgcggcaacggcatcaaacgcaagctgatgcttccgtttactctgtacaaaaccgtccgcgaagcgcagcggattatccgcaaacaccgtgtcgagtgcgtcatcggcttcggcggttttgttacctttcccggcggtctggcggcgaaactcttgggcgtgccgattgtgattcacgagcaaaacgccgtggcaggcttgtccaaccgccacctgtcgcgctgggcgaaacgggtgttgtacgcttttccgaaagcgttcagccacgaaggcggtttggtcggcaaccccgtccgcgccgatattagcaacctgcccgtgcctgccgaacgcttccaagggcgcgaaggccgtctgaaaattttggtggtcggcggcagtttgggtgcggacgttttgaacaaaaccgtaccgcaggcgttggcactgctgcctgaagaggtgcgcccgcagatgtaccaccagtcggggcgtaacaagctgggcaatcttcaggcggattatgacgcgttgggcgtgaaagcggaatgcgtggaatttattaccgacatggtgtccgcctaccgtgatgccgatttggtgatttgccgtgccggcgcgctgacgattgccgagttgacggcggcggggctgggcgcgttgttagtgccgtatcctcacgccgttgatgaccatcaaaccgccaacgcgcgtttcatggtgcaggcagaagcggggctgctgttgccgcaaacccagttgacggcggaaaaactcgccgaaatcctcggcagcctcaaccgcgaaaaatgcctcaaatgggcggaaaacgcccgtacgttggcattgccgcacagcgcggatgacgttgccgaagccgcgattgcgtgtgcggcg

SEQ ID NO: 28942 - DNA, 1269 bp, Neisseria gonorrhoeae
gtgggcgacggtgtccacactctgctgctcgacaggccgattgtgcgcgacggcaggaaattcgacgcgccgcttttgtggatggtggtgctgatgacggcgttcggcctgctgatgatttattcggcttctgtgtatttggcatcgaaggaaggcggcgatcagtttttctatttgaccaggcaggcggggttcgtcgttgccggccttatagcgagcggttttttatggtttctttgcaggatgaggacatggcggcggcttgtgccgtggatttttgccttatccggcctgttgctggtagccgtattgattgccgggcgcgaaatcaatggcgcgacccgttggatacctttgggtccgttgaatttccagccgaccgagctgttcaagctggcagtcatcctttatttggcaagcctgttcacgcgccgtgaagaagtgttgcgcagcatggaaagtttgggttggcagtcgatttggcgggggacggccaacctgattatgtccgccaccaatccgcaggcacgtcgtgaaacattagaaatgtacggccgtttccgggcgatcatcctgccgattatgctggtggcgttcggtttggtgctgataatggtacagccggatttcggttcgtttgtcgtcattaccgtcattaccgttggaatgctgtttctggcaggattgccgtggaaatatttttttgtcctggtaggcagcgtcttgggtgggatggtgctgatgattaccgccgctccctaccgtgtgcagcgggtagtggcatttttggacccgtggaaagacccgcagggtgccggctaccagcttacccactctctgatggcaatcgggcgcggagagtggttcggtatgggtttgggtgcgagtttgagcaaacgcggctttctgccggaagcgcataccgattttatttttgccatcatcgctgaagaattcggcttcttcgggatgtgcgtgctgatattctgttacggctggctggtggtgcgggcgttttccatcggcaagcagtcgcgcgatttgggtttgactttcaacgcctatatcgcttcgggtatcggcatttggatcggtatccaaagtttcttcaatatcggtgtgaacatcggtgctttgccgaccaaaggtctgacgctgccgttgatgtcctatggcggttcgtcagtctttttcatgctgatcagcatgatgctgctgttgcgtatcgattatgaaaaccgccagaaaatgcgcggttaccgggtggag

SEQ ID NO: 28943 - DNA, 1335 bp, Neisseria gonorrhoeae
atgactttccaaaacaaaaaaatcctcgtcgccggacttggcggcacgggtatttccatgattgcctatctgcgcaaaaacggcgcggaggttgccgcttatgatgcggagctgaaagccgagcgcgtggcgcaaatcggtaagatgtttgacgggctggtgttttacacgggtcgtctgaaagatgcgttggacaacggtttcgatattctggcgctcagtcccggcatcagcgagcggcagccggatatcgaggcgttcaagcaaaacggcgggcgcgtgctaggcgacatcgaattgctggcggacattgtgaaccgccgcggcgacaaggtgattgcgattaccggcagcaacggcaaaaccacggtaacgagcctggtcggctatctctgcatcaagtgcgggctggataccgtcattgcgggcaatatcggtacgccggttttggaggcagaattgcagcgcgaaggcaaaaaggcggacgtgtgggtgttggagctttccagcttccaactggaaaacaccgaaagcctgcgcccgactgcggcgacggtgatgaacatttccgaagaccatctcgaccgctacgacgatttgctcgactacgcgcataccaaagccgagattttccgtggcgatggagtgcaggttttgaatgcggacgacgtgttctgccgcgccatgaaacgggcagggcgtgaagtgaaacggttttccttggaacacgaagccgatttttggttggaacgcgggacgggctgtttaaaacaaggcaatgaagatttgatttctacgcaagacatcccgctgcaaggtttgcacaacgccgccaacgttatggctgccgtggctttgtgcgaggccgtcggtttgccgcgcgaagcattgctggaacacgtcaaaaccttccaaggcttgccgcaccgtgtggaaaaaatcggcgagaaaaacggcgtggtattcatcgacgacagcaaaggcacgaatgtcggcgcgaccgccgccgcgattgccggtttgcaaaacccgctcttcgtgattttgggcggcatgggcaaagggcaggacttcacgcccctgcgcgacgcgttgaaagataaggcaaaaggcgtgttcctgatcggcgtcgatgcgccgcaaatccgccgcgatttggacggctgcggcttgaacctgaccgactgcgtcactttggaagaggcggttcagacggcatacgcccaagccgaagcgggcgatattgtcttgctcagccccgcctgcgcgagtttcgatatgtttaaaggctacgcgcaccgttcggaagtgtttatcgaagcgtttaaggctttg

SEQ ID NO: 28944 - DNA, 798 bp, Neisseria gonorrhoeae
atgatgatgaaggcctatttggacttgatgcgccacgtcctcgacaacggtacggacaaatcagaccgcaccggtacgggtacgcgctccgtattcggttatcagatgcgttttgacttgggcaaaggttttccgctgctgacgaccaaaaagctgcatttgcgctcgataatccacgagctgctttggttcctcaaaggcgataccaatatcaaatacctgaaggataacaatgtttccatttgggacgagtgggcggacgaaaacggcgacttgggcccggtttacggctaccaatggcgcagctggcccgcgcccgacggcaggcatatcgaccaaatcgccaatgtggtggaacaaattaagaaaaaccccgactcgcgccgcctgattgtgtcggcgtggaatccggctttggtcgatgagatggccttgccgccctgccacgcgctgtttcagttttacgttgccgacggcaaactgtcctgccagctttaccagcgtagtgcagatattttccttggtgtgccgtttaatattgccagctacgcgctgttgacgatgatgatggcgcaagtgtgcgggctggaggcgggcgagtttgtccatacgtttggcgacgcgcatttgtaccgtaaccatttcgaacaggccgcattgcagttggaacgcgaaccgcgcgccttgcctgtgatgaaaatcaatcctgaagtcaaggatttgtttgccttcaagtttgaagatttcgagttggaaggctacgatccgcatccgcacatcaaggcggtagtgtcggtt

SEQ ID NO: 28945 - DNA, 1332 bp, Neisseria gonorrhoeae
atgactgacctgaacaccctgtttgccaacctcaaacaacgcaaccccaatcaggagccgttccatcaggcggttgaagaagtcttcatgagccttgatccgtttttggcaaaaaatccgaaatacacccagcaaagcctgctggaacgcatcgtcgaacccgaacgcgtcgtgatgttccgcgtaacctggcaggacgacaaaggacaagtccaagtcaaccgcggctaccgcgtgcaaatgagttccgccatcggcccttacaaaggcggcctgcgcttccacccgaccgtcgatttgggcgtgttgaaattcctcgcttttgaacaagtgttcaaaaacgccttgaccaccctgcctatgggcggcggcaaaggcggttccgacttcgaccccaaaggcaaatccgatgccgaagtaatgcgcttctgccaagcctttatgaccgaactctaccgccacatcggcgcggacaccgatgttccggccggcgacatcggcgtaggcggacgcgaaatcggctacctgttcggacaatacaaaaaaatccgcaatgaattcacttccgtcctgaccggcaaaggtttggaatggggtggcagcctcatccgccccgaggcgaccggctacggctgcgtctatttcgcccaagcgatgctgcaaacccgcaacgatagttttgaaggcaaacgcgttctgatttccggttccggcaacgtggcgcaatacgccgctgaaaaagccatccaactgggtgcgaaagtgctgaccgtctccgactccgacggcttcgtcctcttccccgacatcggtatgaccgaagcgcaactcgccgccttgatcgaattgaaagaagtccgccgcgaacgcgttgccacctacgccaaagagcaaggtttgcaatactttgaaaaccaaaaaccgtggggcgttgccgccgaaatcgccctgccctgcgcgacccagaacgaattggacgaagaagccgccaaaaccctgttggcaaacggctgctacgtcgttgccgaaggcgcgaatatgccgtcgactttgggcgcggtcgagcaatttatcaaagccggcatcctctacgctccgggcaaagcctccaacgccggcggcgtggcaacttcgggcttggaaatgagccaaaacgccatccgcctgtcttgggcgcgcgaagaagtggacagccgactgttcggcatcatgcaaagcatccacgagtcctgcctgaaatacggcaaagtcggcgacaaagtgaactacgtcaacggtgcgaacatcgccggcttcgtcaaagttgccgatgcgatgctggcgcaaggcttc

SEQ ID NO: 28946 - DNA, 1080 bp, Neisseria gonorrhoeae
atgtttttatggctcgcacatttcagcaactggttaaccggtctgaatatttttcaatacaccacattccgcgccgttatggcggcgttgaccgccttggcgttttccctgatgttcggcccgtggacgatacgcaggctgaccgcgctcaaatgcgggcaggcagtgcgtaccgacggcccgcaaacccacctcgtcaaaaacggcacgccgacgatgggcggttcgctgattctgaccgccattaccgtgtccaccctgttgtggggcaactgggcgaacccgtatatctggattctcttgggcgtactgcttgccaccggtgcgctcggtttttacgacgactggcgcaaagtcgtttataaagaccccaacggcgtgtccgccaaattcaaaatggtgtggcagtcaagcgttgccgttatcgccggtttggcattgttttaccttgccgccaattccgccaacaatattttgattgtcccgtttttcaaacaaatcgccctgccgctgggcgtggtcggctttttggtgttgtcttacctgaccatcgtcggcacatccaacgccgtcaacctcaccgacggcttggacggccttgccgccttccccgtcgtcctcgttgccgccgggctcgccattttcgcctacgtcagcggacactaccaattttcccaatacctccagcttccctatgtcgccggcgcgaacgaagtcgctatattctgcaccgccatgtgcggcgcgtgcctcggatttttgtggttcaacgcctatcccgcgcaagtctttatgggcgatgtcggcgcgctggcattgggtgccgcgctcggtaccgttgccgtcatcgtccgccaagaatttgtcctcgtcattatgggcggtctgttcgtcgtagaagccgtgtccgttatgcttcaggtcggctggtacaagaaaaccaaaaaacgcatcttcctgatggcgccgattcatcaccattacgaacaaaaaggctggaaagaaacccaagtcgtcgtccgtttctggattattaccatcgtcttggtattgatcggtttgagtaccctcaaaattcgc

SEQ ID NO: 28947 - DNA, 777 bp, Neisseria gonorrhoeae
atgaaactggtaaggcctcagaaaatcagcgatcaggtattgtcggtattggaaggccgtatcgtggaaggggtttacgcggaagggggcaagattccgcccgaacgcgttttggcggaagagttcggcgtttcgcgtccgtcggtccggtcggcattgaatattttggttgcccgtcagattttggaagcgaggcagggcgatggttattatgtttcggtcaagccgcagcaggattttttgcaaagttggcaggagcttttgggcaaacattccaattgggaacaggatgtttttgatttcagctgccacatcgagggctgtatggcggcattggcggcagaacgccggacggatgccgatttgaagcggattcggttttggcttgaaaagtttgaggaagcgtgcggaagcggcaatctggaacatcagggcgaagccgatgtcagcttccatcagacgattgcggatgcggcgcacaatttgttgttcagccatttgtcgggcggtttgttgaaaatgctgtaccggcagacgcgcagcagccttatttatctgaatcaggaagaagatccgcgtccgaaactgatggcgcagcaccgcgtgctgtatgaggcgatatcgaaccgccggccgggcgaggcttcggaggcggcaaaggctcatttgaattatgtggcgagcagcatattgaaagacagggaatatcagagccgtaaccgccacgcggatactttggcgcaaaacgatttgaagcgcgtgcaggattgggaggta

SEQ ID NO: 28948 - DNA, 1308 bp, Neisseria gonorrhoeae
atgccgtctgaaaacaaacccgtgtcgcgcatcgtaaccgacagccgcgatattcgggaaggcgatgtgtttttcgcattggcgggcgggcggtttgacgcgcatgattttgttggaggcgtattgtctgcgggcgcggcggcggttgtggtttcgcgcgaagattgcgcggctttgggcggcgcgttgaaagtcgatgacacgcttgccgcgttgcaaacgttggcgaaggcgtggcgcgataatgtgaacccgtttgtgttcggcattaccggttcgggcggcaagacgacggtgaaggagatgctggctgcggtattgcgccgccgtttcggcgatgatgccgtttcggcgacggcaggcaacttcaacaaccacatcggattgccgctgactttattgaaattaaacgaaaaacaccgctatgccgtgattgaaatgggcatgaaccattttggcgaactggcggttttaacgcaaatcgccaaacccgatgccgctttggtcaacaacgccctgcgcgcccatgtcggatgcggtttcgacggagtgggcgatattgccaaagcgaaaagcgagatttatgcaggcttatgttcagacggcatggcactgattcctcaagaagatgccaatatggctgtcttcaaaacggcaacgtttaatttgaatacgtgcactttcggcgtcgatagcggcgatgtccgcgcggaaaatatcgtgctgaaacctttgtcgtgcgaatttgatttggtgtgcggcgacgagcgcactgccgtggtgctgcctgttcccggccgccacaatgtccacaacgccgccgctgccgccgcgctggctttggctgccggtttgagtttgaacgatgtggcggaaggtttgcaaggcttcagcaacatcaaaggccgtctgaacgtcaaagccggcatcaagggcgcaaccctgattgacgatacttataatgcgaatcccgacagtatgaaagccgcggttgacgtgttggcgcgtatgcctgcgccgcgcattttcgtgatgggcgatatgggcgaactgggcgaggacgaagccgccgccatgcacgccgaagtcggcgcgtacgcccgcgaccaaggcatcgaagcggcttattttgtcggcgacaacagcgtcgaagcggcggaaaaatttggcgcggacggtttgtggttcgccgccaaagacccgttgattcaagtgttgagccacgatttgcccgaacgcgccaccgtgttggtgaaaggttcgcgctttatgcagatggaagaagtggtcgaggcattggaggataag

SEQ ID NO: 28949 - DNA, 528 bp, Neisseria gonorrhoeae
atgcacctgatgggttcgcacagtgatttttgcacacgtttggataaggatgcgcggcggtttcagtatcaaactgaaaaaatatcctgctatgtttccaccatcgcgcaaaccgataaatttttagaagatacggttaagatattgaatgaaaataaagaaagctggtctttggtttacttttccgaccacggtttgatgcatgtcggcaaaggcggcgagcgaacgttgacacacggcgagtggaagcgtcaaagctacggcgtgccgctggttaaaatttcgtccgatgacacgcggcgcgaaatgattaaagtgaggcgcagcgcgtttaattttttacgcggattcggcagttggacgggtatcgaaaccgacgagttgcccgatgacggctatgatttttgggggaatgtccccgatgtgccgggcgaaggcaataaccttgcctttatcgacagacagtccgacgaccccgcgccgtggtatgcgggaaaaggcaaatcggctaaaaatacgtctaaaaaa

SEQ ID NO: 28950 - DNA, 1476 bp, Neisseria gonorrhoeae
atgttcagcaagttaagccctttggctgaaaccggcatcccgaccctgtcgtgtgcaaacgcggcagggcgtttgttgcattcagacagccgccaaatcaaacaaggcgatattttcgttgcctgtccgggcgaatatgccgacggacgcagttatatccccgccgccgttgccaacggcgcggcttttgttttttgggacgacgacggcagattcgcgtggaatcccgaatggaaagtccccaatcaaggcatcaaagatttgaaacaccgtgccggcatattggcggcacaggtttacggcaacgtttcagacggtctcaaagtctggggcgtaaccggaaccaacggcaaaacctccatcacgcaatggctggcgcaagccgccgatttgttgggcgaaaaaaccgccattatcggcacggtcggcaacggcttttggggtgcattggaagaaaccgcgcacaccacccccgcccccgtcgatgtccaaaccctgctctaccgtttccgtcaacaaggcgcaacagccgccgcgatggaagtttccagccacggccttgaccagtcgcgagtcaacggcgtgccgttccgcagcgcaatcttcaccaacctcacccgagaccacctcgactaccacggcacgatggaagcctacggtgctatcaagtcgcgcctgttttactggcacggcttgaaacacgccgttatcaataccgatgacggatacggcgcggaactcgcaggtcgtctgaaaaaagactgtcccgatttagccgtttacagctatggtttcagcgaacacgccgacatccgcattaccgactttaccgcctcttcagacggcatggaagcagtattccaaaccccgtggggcgaaggaaaatgccgcacccgcctgctcggacggttcaacgcgcaaaacctcgccgcctgcatcgccttgctttgtgccaacggttatccgcttgataaggtattggatgtgctggcaaaaatccgtcccgcttcagggcgcatggactgcatcatgaacagcggcaagcccttggtcgttgtcgattacgcccacacgcccgacgcattggaaaaagcactctccactttgcaggaaatcaaaccgcagggtgcggccttatggtgcgtattcggttgcggcggcaaccgcgattgcggcaaacgcccattgatgggcgcggcagccgtacagggcgcggataaagtcgtcgtaaccagcgacaacccgcgtttggaaaatccgcacgacatcatcaacgacatcctgcccgccgtgcccgcgcccgaatgcgtcgaagccgaccgcgccgccgccatccgttatgcggttgagcaggccgccgcaaacgacatcatcctgattgccggcaaaggacacgaaaactatcaggatgtacagggcgtgaagcaccgtttttccgatcttgaaatcgtcgggcaggctttgttaactcgtaaa

SEQ ID NO: 28951 - DNA, 3201 bp, Neisseria gonorrhoeae
atggctaaattctttatcgaccgccccattttcgcgtgggttatttcgattttcattattgcggcaggtattttcggcattaaaagcctgccggtttcgcaatatccgtccgttgccgccccgaccattactttgcacgccatttatccgggtgcgtccgcacaagtgatggaaggcagcgtactttccgtgatcgaacggaatatgaacggcgtggaaggtttggactatatgtccacttccgccgattcgagcggcagcggcagcgtgagcctgacctttacgcccgataccgacgagaatctggcgcaggtggaagtgcagaacaagctttccgaagtattgagcacgctgccggcaaccgtccagcaatacggcgtaaccgtatccaaggcgcgttccaatttcctgatgattgtgatgctttcgtcggatgtgcagtcaaccgaagagatgaacgactacgcgcagcgcaacgtcgttcccgaattgcagcgtatcgaaggcgtggggcaggtccgcctgttcggcgcgcaacgcgcgatgcggatttgggtcgatcctaagaaactgcaaaactacaatttgtcgtttgccgatgtcggcagcgcgttgtcggcgcagaatatccaaatttccgcaggttccatcggttcgcttcccgctgtgcgcggacagacggttacggctaccgtaacggcgcaagggcagttgggtacggcagaagaattcggcaacgtcatcctccgcgccaataccgacggttctaatatttacctgaaggatgtggcgaaagtcggattgggtatggaagactattcttcctcaacccgcctgaacggggtaaataccaccggtatggcggtaatgttgtccaacagcggcaatgcgatggcgacggcaaaggcggtaaaagaacgcttggcggtgctggaaaaatactttccgcagggtatgagttggaaaaccccttacgatacttccaaattcgttgaaatttcgattgaaaaagtgattcacactttaatcgaagcgatggtgctggtgtttgtcgtaatgtacctcttcctgcaaaacatccgttatacgctgattccgaccatcgtcgtaccgatttccctgttgggcggtttcgccttcatctcttatatggggatgtcgattaacgtattgacgatgtttgcgatgatattggtcatcggcatcgtggtcgatgacgcgattgtggtggttgaaaacgtcgagcgcattatggcgggtgaaggcctgccgcccaaagaagcgaccaaaaaagcgatgggtcagatttcgggcgcggtcatcggtattaccgccgttctgatttccgtgttcgtgcctctggcgatgttcagcggggcggccggcaatatttacaaacagtttgccctgacgatggcgtcatcaatcgcattctccgccttccttgcgctgacccttacccctgctttgtgtgccacaatgttgaagacaatcccgaaagggcatcacgaagagaaaaaaggtttcttcggctggttcaacaagaaattcgacagttggacgcacggctacgaaggccgggttgccaaagtgctgcgtaagactttccgcatgatggttgtctatatcggcttggcggttgtgggcgtgttcctgtttatgcgcctgccgacttcgttcctgccgaccgaagaccaaggcttcgttatggtcagcgtgcaactgcctgcgggtgcgaccaaagagcgcaccgatgcgacgctagcacaagttacccaactggcgaaaagcattcccgaaattgaaaacatcattaccgtttccggcttcagcttttcgggcagcggtcagaatatggcgatgggttttgccatattgaaagattggaacgaacgtaccgcctccggcagcgatgccgttgcggttgccggcaagctgacgggtatgatgatggggacgcttaaagacggtttcggcatctccgtcgtcccgcctccgattctggagttgggcaacggttcgggcctgagcatcaacctgcaagaccgcaacaataccggccataccgcattgctggcgaagcgcaacgagctgattcagaaaatgcgtgccagcggtttgtttgaccccagcaccgtccgtgccggcggtttggaagactcgccgcagttgaaaatcgacatcaaccgtgccgcagcggcggcgcaaggcatttcgtttgccgacatccgcaccgcattggcaagcgcgctgagttcgtcttatgtcagcgacttcccgaaccaaggccgtctgcaacgcgtgatggtgcaggccgacgaggatgcccgtatgcagcctgccgatattttgaacctgaccgtgccgaacaaatccggcgtcgccgtaccgctttccaccattgctactgtttcttgggaaaacggtacggaacagagcgtacgcttcaacggttatccctcgatgaagctgtccgcttcgcctgcaaccggcgtttccaccgggcaggctatggcggcggttcaaaaaatggttgacgaattgggcggcggttacagcttcgaatggggtggacagtcgcgcgaagaggcaaaaggcggctcgcaaaccctgattttgtacggtttggcggttgcagccgtatttttggtacttgccgcgctttatgaaagctggtcgattccgctggcggtcatccttgtgattccgttgggtttgatcggtgcggctgcgggcgtaaccgggcgcaacctgtttgaaggactgttgggcagcgttccctcgtttgccaacgacatctacttccaagtcggtttcgttactgtgatgggtttgagtgcgaaaaacgcgattctgattatcgaatttgccaaagaccttcaagcgcaagggaaaagcgcggtcgaagccgctttggaggcagcccgcctgcgtttccgtccgattatcatgacctcgtttgcctttattttgggcgtggttcccctgtatattgccgctggtgcgagttctgccagccagcgcgccatcggcacgaccgtattctgggggatgttggtcggcacgctcttgtccgtgttccttgttccgcttttttatgtagtggtgcgcaaattcttcaaagaaactgcacacgagcatgaaatggcggtcagacatgcatcaaaagcgggtataaccggttcggacgataaacaatat

SEQ ID NO: 28952 - DNA, 1566 bp, Neisseria gonorrhoeae
atgagtcaaaccgacgcgcgtcgtagcggacgatttttacgcacagtcgaatggctgggcaatatgttgccgcacccggttacgctttttattattttcattgtgttattgctgattgcctctgccgtcggtgcgtatttcggactatccgtccccgatccgcgtcctgttggggcgaaaggacgtgccgatgacggtttgattcacgttgtcagcctgctcgatgccgacggtttgatcaaaatcctgacgcataccgttaaaaatttcaccggtttcgcgccgttgggaacggtgttggtttctttattgggcgtggggattgcggaaaaatcgggcttgatttccgcattaatgcgcttattgctcacaaaatccccacgcaaactcactacttttatggttgtttttacagggattttatccaatacggcttctgaattgggctatgtcgtcctaatccctttgtccgccgtcatctttcattcgctcggccgccatccgcttgccggtttggctgcggctttcgccggcgtttcgggcggttattcggccaatctgttcttaggcacaatcgatccgctcttggcaggcatcacccaacaggcggcgcaaatcatccatcccgactacgtcgtaggccctgaagccaactggttttttatggcagccagtacgtttgtgattgctttgattggttattttgttactgaaaaaatcgtcgaaccgcaattgggcccttatcaatcagatttgtcacaagaagaaaaagacattcggcattccaatgaaatcacgcctttggaatataaaggattaatttgggcaggcgtggtgtttgttgccttatccgccctattggcttggagcatcgtccctgccgacggtattttgcgtcatcctgaaacaggattggttgccggttcgccgtttttaaaatcgattgttgtttttattttcttgttgtttgcgctgccgggcattgtttatggccggataacccgaagtttgcgcggcgaacgggaagtcgttaatgcgatggccgaatcgatgagtactttgggactttatttggtcatcatcttttttgccgcacagtttgtcgcattttttaattggacgaatattgggcaatatattgccgttaaaggggcggtgttcttaaaagaagtcggcttgggcggcagtgtgttgtttatcggttttattttaatttgtgcttttatcaatctgatgataggctccgcctccgcgcaatgggcggtaactgcgccgattttcgtccctatgctgatgttggccggctacgcgcccgaagtcattcaagccgcttaccgcatcggtgattccgttaccaatattattacgccgatgatgagttatttcgggctgattatggcgacggtaatcaaatacaaaaaagatgcgggcgtaggcacgctgatttctatgatgttgccgtattccgctttcttcttaattgcatggatcgccttattctgcatttgggtatttgttttgggtctgcccgtcggtcccggcacacccacattctatccggtgcct

SEQ ID NO: 28953 - DNA, 462 bp, Neisseria gonorrhoeae
atgcttaccatcgttttatatcagccggaaatccccccgaacacgggcaacatcatccgcctgtgcgccaataccggcgcggatttgcaccttgtcaaaccgctcggcttcccattggattccgccaaaatgaaacgcgccgggctcgactaccacgaattcgccagcctgacggtgcacgaaaacttcgacgactgcctcaagtcgctggcaggccgacgtattttcgccctgaccaccaaaggcacggcgcgccccgatgaaaccgcgtttcaaaaaggcgacgttttactgttcgggccggaaacgcgcgggctgcctgccgacatcctcgacagcctgcccgccgcgcaaaaaatccgcctgccgatgcggcccggcagccggagtatgaacctttccaacaccgtctccgtgattctctttgaagcgtggcggcaacacggttacgcaggcggcgtt

SEQ ID NO: 28954 - DNA, 954 bp, Neisseria gonorrhoeae
gtgagtggagcagaaagttaccggcatatcacggtcttgctgaatgaggcggtggatgcgcttgccgtgcgcgaagacggtgtctatgtggacggtacgttcggcaggggagggcattcccggctgattttgtcgcgtttgggcgatgcggggcggttgattgttttcgacaaagacccgcaggcgattgctgtggcagaagagctggcgcgttcggacaaacgggtcggtgtcgtgcatggcggttttgcttcgtttcagacggcattggacggtttgggtatcggcaaggtggacggtgcgctgtttgatttggggatttcgtctccgcaaatcgatgacggcagccgcggtttcagcttccgtttcgatgcccctttggatatgcgtatggatacgacgcgcggtatgtctgccgcagagtggatagcggttgcgtcggaacaggatttgcacgaggtaatcaagaattatggtgaagagcggtttagccgccagattgtgcgcgccattgtcgcgcaacgggcggaaagtccaatcgatacaacccgcaagctggcgcagatcgtggcacaaaacgtccgtactcgcgagcgggggcaggatcctgcgacgcgcaccttccaggcaatccgcatctttattaaccgcgagcttgaagaagtaggggcggtattgccgcaggtcatgtgccgtctgaaagagggcgggcgtttggcggtcattgctttccattcgttggaagaccgcattgtgaagcagtttgtcaaaaaatattcgcaacacgagcccctgccgagctgggcggcggtcagagaagcggatttgcccgatccgcccctgaaaatcgtgggcagggcattaaagccgggtgaagcggaaattgccgccaacccgagggcgaggagcgcagttttgcgtgtggcggagcggactgccggtccgataccggaa

SEQ ID NO: 28955 - DNA, 453 bp, Neisseria gonorrhoeae
atgttcggcggcgcacacgaattaagcatcgacagtaaggggcggttggctgttcctgccaaattccgcgacattctgtcgcgcctctatacgcctgccgtagtggcaacgctcgagtcgaaacataagctgttgatgtaccctgttgcggagtgggaaaaggttgcggcgcaacttttaaacttaaaagtggcggataaccctgttttgcggcggtttcaaaatcttttgctgcataacgcggaaattttggaatgggacagcgccggcagggtgctggttcctgccggactgaggaaaagggtggatttcgaccgtgaagttgttttggtcggccgtgccaaccgtttggagctttggggtcgcgagcagtgggaggctgagatggttcaggctttggatgacgatcctgacgaacttgccttccagttgagtcagacggatttgcaattg

SEQ ID NO: 28956 - DNA, 894 bp, Neisseria gonorrhoeae
ttgaatccgacgaatgatttgaaagcgtggcaacagagggcgcaggcgcagacagagctgctgctggaacgctttttgccgtctggaaacgaaatcccgcacacgctgcacgaagcgatgcgctatgcggctttggacggcggcaagcgtctgcgcccgatgctggtgctggcggcttcggaattgggcggggccatggcggatgcggtcggacaggcaatggcggcaatcgaaatgatccacgtctattctttggttcacgacgatatgccggcgatggacaacgacagcctgcggcgcggcaaaccgacctgccacatcaaatatggcgaagccaccgcccttctgaccggcgacgctttacaaacccaagccttcgacgtgttgagccgtccgacagaactgcccgccgcacgccagttggcaatgttgtcggtgttggcaaaagcgggcggcagcgcgggtatggcgggcggacaggcaatcgatttggcaaatgtcggcaaacaaatggttcaagccgatttggaacggatgcacagcctgaaaacgggggcgttgatccgtgcggcggttttattgggggcgacggcgtgtcccgatctgtccgacgcggaacttgccgtattggacgcttacgcggcaaaactgggtttggcgttccaagtcatcgacgatgtgttggattgtgaagcggacacggcgactttgggcaagacggcgggcaaagatgccgacaacgacaagccgacttatgtgaaactgatgggcttggaagcggcgcgctcatacgcacacaaactggttgccgaagcagtcgcgctgctcgaacccttcggcgacaaagccctgcgcctgcggcagttggcagaatttgcagtcgcacgcaaatat

SEQ ID NO: 28957 - DNA, 1431 bp, Neisseria gonorrhoeae
atggacacacaaacttacaactacaaagtggtgcgccagttcgccatcatgactgtagtttgggggattgtgggcatgttggtcggcgttatcgtcgccgcccagctttttgctcctgccctcgacttgtctaatatcggaccttggttccacttcggccgcctgcgtccgctgcacaccaatgcggttattttcgcatttggcggttgcggtctgatcggcacatcatactacgttgtccaacgtacttgtaatacccgtcttttcggcggttggctgccggcatttaccttttggggttggcaggcggtaatcgttgccgccgtcgtcagcttccctatgggttggacccaaggtaaggaatatgccgaactggaatggccgattgacattctgattactttggtttgggtggcttacgccatcgtattcttcggtacgattgccaaacgcaaggtaaaacacatttacgttgccaactggttctacggcggctttattttggcggtcgcacttttgcacatcgtcaacaatatcagcatcccggccggtttgatgaagtcataccccgtctattccggtgcgattgatgctatggttcaatggtggtacgggcataacgccgtgggcttcttcctgactgccggctttttgggtatgatgtactatttcgtacccaaacaagcagcccgccccgtttactcctaccgcctgtccgtcgttcacttctgggcgttgattttcacctatatgtgggcgggtccgcaccatcttcactacactgcgctgcctgactggacgcaatctttgggtatggttctgtccttgattttgttcgcaccctcttggggcggtatgattaacggcattatgaccttgtccggcgcgtgggacaaactgcgtacagacccgattcttaaattcctgattgtatccttgtccttctacggtatgtctacctttgaaggcccgatgatgtcgattaaaacggtcaatgcattgagccactatacggactggaccgtcgcgcacgttcatgcgggtgcgttgggctgggtaggctttgtaaccatcggttccgtctattacatgattccccgtctgttcggcaaagagcagatgcacagcaccaagctggtagaggcgcatttctggattgcgactatcggtgtggttctgtatatcgccgcgatgtggattgcaggtgtgatgcagggtttgatgtggagttctctgaacgatgacggtacgctgacctactcgtttgtcgaatccgtaaaacgcaccatgccttactacatgatccgttttgcaggtggtttattgtatctgagtggcatgtgcattatggcgtacaacgtgtaccgcacagccatcggtggtaaagcagtcgatgccgaaatccctgcggtttcccaaacacagcaccac

SEQ ID NO: 28958 - DNA, 2022 bp, Neisseria gonorrhoeae
atgaacgatatgactttatatttgataattgcccttgttccgttggcaggctcgctgattgcgggtttgttcggcaacaaaatcgggcgtgccggcgcgcatacggttacgatactcggtgtcgctgtatctgccgtgctgtcggcttatgtgctgtggggattcctcaatggcagccgtaccaagtttgacgaaaacgtctatacctggctgacaatgggcggcttggatttttccgtcggcttcttggtcgatacgatgacggcgatgatgatggtcgtggtaacgggcgtgtcgttgatggtgcatatctataccatcggttatatgcacgatgaaaaagtcggctaccaacgcttcttcagctatatttctttgtttactttcagcatgttgatgctgattatgagcaacaacttcatccagctcttcttcggttgggaagcggtgggcttggtgtcgtatctcttgatcggtttctatttcaaacgtccgagcgcgacatttgccaacctgaaagcctttttgatcaaccgtgtcggcgacttcggctttttgctcggtatcggcttggtgcttgcctatttcggcggcagcctgcgttatcaggacgtattcgcctatctgcccaacgtacaaaatgccactatccagcttttccccggcgtggaatggtctttgattaccgtaacctgtttgctcctgtttgtcggtgcgatgggtaaatcggcacaattcccgctgcacgtctggctgcctgattcgatggaaggcccgactccgatttctgcattgattcacgccgcgacgatggttaccgccggtttgtttatggtgtcgcgtatgtcgccgatttatgagatgagcagcaccgcgctgtcggtcattatggtaatcggcgcgattaccgccctgtttatgggcttcttgggtgtgattcaaaacgacatcaaacgtgtggttgcgtattctaccctgtcgcaactgggctacatgaccgtggctctgggcgcgtccgcctattctgtggcgatgttccacgtcatgacccacgccttctttaaagccttgctgttcttggcggcgggcagtgcgattatcggtatgcaccacgatcaagatatgcgccatatgggcaacctgaaaaaatacatgccgattacttggctgactatgctgatcggcaatttgtctctgatcggtacgccgttcttctccggcttctactccaaagattcgattatcgaagcagtgaaatacagcaccctgccgggcagcggcgttgcctattttgccgtcctcgccagcgtgttcgttaccgcgttttacgcgttccgccaatactttatggtgttccacggcgaagaaaaatggcgcagcctgcccgaacaccattcagacggccatggtgaagaacatcacggcttgggcaaaaacgacaatccgcacgaaagcccgctggtcgttaccctgccgctgattctgcttgcgattccgtccgtcatcatcggctacatcgccatcgaacccatgctctacggcgatttcttcaaagacgtgattttcgtcaacgccgacgcgcatccgaccatgcacatcatgaaagaagagttccacggcgcattggcaatggtgtcgcacagcttgacatcgcctgttttgtatttggcggctgccggtgttgccgccgcgtggcttttgtacgtcaaactgccgcacctgcccgctaaaatcgcgcaggcgttccgtccggtttacgttttgtttgaaaacaaatactacctcgacgccttgtatttcaacgtcttcgccaaaggcacgcgcgcattgggaaacttcttctggaaagtcggcgataccgccattatcgacaacggcatcgtcaacggctccgccaaactggtcggcgcgattgccgctcaggtacgcaaagcccaaaccggctttatctacacctacgccgccgctatggtgttcggcgtattggtcttgctcggcatgaccttctggggcttgttcaga

SEQ ID NO: 28959 - DNA, 2259 bp, Neisseria gonorrhoeae
atgttacaaatcgaaatcgacggcaaacaggtatctgtggagcagggcgcgacggtaattgaagccgcgcacaagctcggtacttatattccgcatttctgttaccacaaaaagctctctattgccgccaactgccgtatgtgtctggtggatgtggaaaaagcccccaaaccgctgcctgcctgtgccacgccggtaacggacggcatgattgtgcgtacgcattcggcaaaagcccgagaggcgcaggaaggcgtgatggagttcctgctcatcaaccatccgcttgattgtccgacctgcgaccagggcggcgaatgccagttgcaggatttggcggtgggctacggcaaaaccaccagccgttataccgaagaaaaacgttccgtcgtcggcaaggacatgggtcctttggtttccgccgaggaaatgagccgctgtatccactgtacccgctgcgtacgtttcaccgaagaaatcgccggtttgcaggaaattgcgatggtgaatcgtggtgaacactccgaaatcatgccctttatcggcaaagcggtggaaaccgagctgtcgggcaacgtcatcgatttgtgtcccgtcggcgcattgaccagcaaaccgttccgcttcaacgcgcgtacttgggaattgaaccgccgcaaatccgtttccgcacacgacgctttgggcagcaacctgattgtacaaaccaaagaccataccgtccgccgcgtgttgccgttggaaaacgaagccatcaacgaatgctggctgtccgaccgcgaccgttttgcctacgaaggcctgtatcacgaaagccgtctgaaaaatccgaaaatcaaacagggtggcgagtggatggacgtggattggaaaaccgcgttggaatatgtccgcagcgcgattgaatgtatcgccaaagacggcaaccaaaaccaagtcggcgtttgggctaatccgatgaatacggttgaagagctgtatctggccaaaaaatttgccgacggcttgggtgttaaaaactttgcaacccgtttgcgccaacaagacaaacgtctttcagacggccttaaaggtgcgcaatggttgggacaaagtattgaatctttggctgacaacgatgccgtattggtagtcggtgcgaacttgcgcaaagaacagccgctcctgaccgcccgcctgcgccgcgccgccaaagaccgtatggccttgagcgtattggccggcagtaaagaagaattgtttatgccgcttctgtctcaagaagccgcacatcccgacgagtgggcaggccgtctgaaaaacctgtctgccgatgcggaacatgccgttaccgccagcctgaaaaacgctgaaaaagcagcggtgattttgggtgcggaagtgcaaaaccatcctgattacgccgccatttatgccgccgcgcaagagttggcggacgcgaccggcgcagtgctgggcattttgccgcaagccgccaacagcgtcggtgcggacgtattgggtgtgaactcgggcgagagcgttgccgaaatggcaaacacgccgaaacaggcagtcttgctgctcaacgtcgagcctgaaatcgatacggttgacggtgcaaaagccgtagccgcgttgaaacaggcgaaaagcgtgatggcgtttacgccgtttgtcagcgaaacgctgctggacgtgtgcgacgtattgctgccgattgcgccgtttaccgaaacatcaggcagcttcatcaatatggaaggccgtctgcaatctttccacggcgtggtacaaggcttcggcgattcacgtccgatgtggaaagtgttgcgcgtattgggcaacctgtttgacctgaaaggttttgaataccacgataccgctgcgattctgaaagacgcgctggatgcggaaagtctgccgtccaaactggacaaccgcagcacatgggcaggggagggcgttcagacggcctcaaaccgcctcgtccgtgtcggcggcgtcggtatttatcatactgattctatcgtgcgccgttccgcaccgttgcaagaaaccagccatgccgccgtgcctgccgcgcgtgtgaatccgaacacattggcacgcttgggcctgcaagacggacaaaccgctgtcgccaaacaaaacggtgcaagcgtatcggttgccgtcaaagccgatgccggtttgcctgaaaacgtggtgcatctgccgctgcataccgaaaatgccgcgctgggtgcgttgatgggcattattgaactggcgggagct

SEQ ID NO: 28960 - DNA, 1299 bp, Neisseria gonorrhoeae
atggctatttaccaatcaggcgtgatttttgaccaagtggataccgccaatcccgattgctggacattggacgaatacgtcaaacgcggcggctataccgccctgcgtaaaatcctgtccgaaaacatctcgcaaaccgatgtgattgacgaagtcaaaacctccggcttgcgcgggcgcggcggtgcgggcttcccgaccggtttgaaatggagctttatgccccgttctttcccgggcgaaaaatatgtggtttgcaacaccgacgaaggcgagccgggtacatttaaagaccgcgacatcatcatgttcaatcctcatgccctgattgaaggcatgatcattgccggttacgcgatgggcgcgaaagccggctacaactatatccacggcgaaattttcgaaggttatcaacgctttgaagccgctttggagcaggcgcgtgccgcaggctttttgggtaaaaatattttgggttcggattttgaattcgaactcttcgcccaccacggctacggcgcatatatttgcggcgaagaaaccgcattgcttgaatcgttggaaggcaaaaaaggccagccgcgcttcaaaccgccgttccccgcctcgttcggcctgtacggcaaaccgaccaccatcaacaataccgaaacgttctcctccgtcccgtttattatccgtgacggcggacaggcgtttgccgataaaggtattccgaatgcaggcggtaccaaattattttgtatttccggccatgtcgagcgtccgggcaactatgaagtgccgttgggcacgccgtttgccgaagtcttgaaaatggcgggcggtatgcgcggcggtaaaaaactcaaagccgttattcccggcggttcgtccgcccccgtattgcctgccgacattatgatgcagaccaatatggactatgactcgatttccaaagccggctcgatgctcggttccggcgcgattatcgtgatggacgaagacgtgtgcatggtcaaagccctcgaacgcttaagctatttctactacgacgaatcctgcggccaatgcaccccctgccgcgaaggtaccggctggctttaccgcatcgtccgccgcatcgtagaaggcaaaggccgcatggaagacttggatttgctggattctgtcggcaaccaaatggcaggccgcaccatctgcgcccttgccgatgccgccgtcttccctgtccgcagctttaccaagcatttccgtgatgagtttgcgcattacatcgaacacggcgggccgatgaaagagcataagtggggagggtgg

SEQ ID NO: 28961 - DNA, 471 bp, Neisseria gonorrhoeae
atgttatccgcaaaatccttaaaacaaatcgacattgagttggcgaaatatcccgccgaccaacgccgttccgccatcatgggcgcgttgcgtatcgcccaaaccgaaaaaggctggctcgcccccgaaaccatcgcttttgttgccgactacatcggcatcacgccggcgcaggcatatgaagtcgccactttctacaatatgtacgaccttgagcctgtcggcaaatacaaactgaccgtttgtaccaacctgccctgcgctctgcgcggcggtatggcgaccggcgaatacctcaaacaaaaactcggtatcggctacggcgaaaccacgcccgacggcaaatttacccttgtcgaaggcgaatgcatgggcgcgtgcggcgatgcccccgttatgctggtcaacaaccacagcatgtgcagctttatgaccgaagaggcgattgagaagaaactggcggagttggag

SEQ ID NO: 28962 - DNA, 279 bp, Neisseria gonorrhoeae
atgaacacaataccgctccacaccatactcaaacttatggcgcatcccgaacgtatggcgatactgatccaactgttggacagcgaacgcaatatcgtcgaactggcaaaatccttatccctgacggccaccgcggtttcctgtcatttgaaccgcctgagggcgggcggtctggtggactttacgcgttaccaccgcattatcgaataccgcctggtttccgaagacgcggcaacgattctgcggacaatccgcgatttggaaaacaaacgcgcggca

SEQ ID NO: 28963 - DNA, 2211 bp, Neisseria gonorrhoeae
atgaccgccatcagcccgattcaagacacgcaaagcgcgaccctgcaagaattgcgcgaatggttcgacagctactgcgccgctctgccggacaacgataaaaacctcatcggtaccgcatggtcgctggcgcaggaacattatcctgccgatgccgccacgccgtatggcgagccgctgcccgaccacttcctcggcgcggcgcaaatggtcgacgaactcgacctgctgcccgatgccgtcgccgccaccctgcttgccgacatcggacgctacgtccccgattggaacctattggtttccgagcgctgcaacagcaccgtcgccgagctggtcaaaggtgtggacgaagtgcagaaacttacccacttcgcccgggtggacagcctcgccacgccggaagaacgcgcacagcaagcggaaaccatgcggaaaatgctgctggcgatggttaccgacatccgcgtcgtattaatcaaactggcgatgcgtacgcgcaccctgcaatttttaagcaacgcccccgacagccctgaaaaacgcgccgtcgccaaagaaaccctcgacatcttcgccccgctcgccaaccgcttgggcgtgtggcagctcaaatggcagctcgaagatttgggcttccgccatcaagaacccgaaaaataccgcgaaatcgccctgcttttggacgaaaaacgcaccgaacgcctcgaatacatcgaaaacttcctcgatatcctgcgtacggaactcaaaaaatacaatatccactttgaagtcgccggccgtccgaaacacatctactccatttacaaaaaaatggtgaagaaaaaactcagcttcgacggcctgttcgacatccgcgccgtgcggattctggtcgataccgtccccgagtgttacaccacgctgggcatcgtccacagcctctggcagcccattcccggcgagttcgacgactacatcgccaaccccaaaggcaacggttataaaagtttgcacaccgtcatcgtcggcccggaagacaaaggtgtggaagtgcaaatccgcaccttcgatatgcaccaattcaacgaattcggtgtcgccgcccactggcgttacaaagaaggcggcaaaggcgattccgcctacgaacaaaaaatcgcctggttgcgccaactcttggactggcgcgaaaatatggcggaaagcggcaaggaagacctcgccgccgccttcaaaaccgagcttttcaacgacacgatttatgttttgaccccgcacggcaaagtcctctctctgccaacgggcgcaacccccatcgacttcgcctacgccctgcacagcagcatcggcgaccgctgccggggcgcgaaagtcgaagggcagattgtgccgctgtccaccccgctcgaaaacggacagcgcgtcgaaatcattaccgccaaagaagggcatccttccgtcaactggctttacgaaggctgggtcaaatccggcaaggccatcggcaaaatccgcgcctacatccgccagcaaaacgccgacaccgtgcgcgaagaaggccgtgtccaactcgacaagcagcttgccaaactcacgcccaaacccaacctgcaagagcttgccgaaaatctcggctacaaaaagccagaagacctctacaccgccgtcggacaaggcgaaatttccaaccgcgccatccaaaaagcctgcggcacgctgaacgaaccgccgcccgtgcccgtcagcgcaaccaccatcgtcaaacagtccaaaatcaaaaaaggtggcaaaaccggcgtgctcatcgacggcgaagacggcttgatgaccacgcttgccaaatgctgcaaacccgcgccgcccgacgatattgccggcttcgttacccgcgagcgcggcatttccgtccaccgcaaaacctgcccctctttccgacaccttgccgaacacgcgcccgaaaaagtactggacgcaagttgggcggcgttgcaggaagggcaagtgttcgccgtcgatatcgaaatccgcgcccaagaccgctccgggcttttgcgcgacgtatccgacgcgctcgcccgccacaaactcaacgttaccgccgtgcaaacccagtcccgcgacttggaagccagcatgaggttcacgctcgaagtcaaacaagtcaacgacctcccgcgcgtcctcgccggcctcggcgatgtcaaaggcgtattgagcgttacccggctt

SEQ ID NO: 28964 - DNA, 447 bp, Neisseria gonorrhoeae
atgagcaccttcttccggcaaaccgcccaagccatgactgccaaacacatcggccgcttcccgctatcggagttggaccaggtgattgattggcagccgatcgaacaatacctgatccgacaaaaaacccgttacctccgagaccgccgcggccgtcccgcccatcccctgtcgtccatgttcaaagccgtcctgcccggacaatggcacagcctctccgatcccgaactcgaacacagcctcatcacccgcatcggtttcaacctgttttgccgttttgacggaccgggcatccccggttgcagcaccttatgccgctaccgtaaattccgctatgcgcgggcagcctatttcgggctgctcaaagtgggtgcgcaaagccacctgaaggcgatgtgtttgaacctgttgaaagccgccaacaggctaagtgcgcccgctgccgcc

SEQ ID NO: 28965 - DNA, 2205 bp, Neisseria gonorrhoeae
atgtttcccgaccaatccgcccccaatctgctgcaaggcttgaaccccgaacaactctccgccgtaacctggccgccgcaatccgccctcgttttggcaggcgcaggcagcggcaaaacgcgcgtgctgaccacgcgtatcgcatggcttttgcaaagcggacaagccagcgtacacagcattatggcggtaacgtttaccaacaaggccgccaaagagatgcaaacccgactcggcgcaatgattcccatcaacgtccgcgctatgtggctcggcacgttccacggtttgtgccaccgctttttgcgcctgcaccaccgcgacgcaggcctgccgtcttcctttcaaatcctcgacagcggcgaccagctttccctcatcaaacgcctgctcaaaagcctcaacatcgccgaagaaatcatcgcgccgcgttcgctgcaaggctttatcaacgcgcaaaaagaatccggtttgcgcgcttccgtcttgggcgcgcccgatccgcacacaagccgcatgattgggtgctacgccgaatacgacaaaatctgccaacgcgaaggcgtggtcgatttcgccgaactcatgctccgcagctacgaaatgctgcaaagtaacgaaatcctgcgccggcactaccaaaaccgcttcaaccacattctggtcgacgagtttcaagacaccaacaaactgcaatacgcctggctcaaactcatggcgggcggtaacgcagcggtatttgccgtcggcgacgacgaccaaagcatttaccgcttccgcggcgcaaacgtcggcaacatgaccgcactgatggaagaattccacatcgacgcgcccgtcaaactcgaacaaaactaccgctccgtcggcaacatcctcgccgccgccaacgccgttatcgaaaacaacgacgaacgtctcggcaaaaacctgcgcaccgacgccgaagcaggcgacaaaatccgctactactccgcctttaccgacctcgaagaagcccggttcatcgtggatgaaaccaaagccctcgaacgcgaaggctgggatttggacgaaatcgccgtcctctaccgcagcaacgcccaatcgcgcgtcatcgaacaaagcctgttccgcagcggcatcccctacaaaatctacggcggcctgcgcttttacgaacgccaagaaatcaaacacgccctcgcctacctgcgcctcgccgtcaatcccgacgacgacaacgccctcttgcgtgtcatcaacttcccaccgcgcggcatcggcgcgcgcaccgtcgaaaaccttcagacggcctcaaacgaacaaggcatcaccctctggcaggcagcctgcaacgccggcgcgaaagccgccaaagtcgtcgccttcgtccgcctgattgaagccctgcgcaaccaagtcggacaaatgcacctgtccgaaatcatcgtcggcatcctcaaagacagcggtctgaccgagcactaccgaacccaaaaaggcgacaaccaagaccgcctcgacaaccttgacgaactcgtcaacgccgccatcgagttcaaacccgaagacagcaactttgaaaccctgcccgaaaacatttcagacgatcccgccttccccatcctcgccttcttgagcaacgccgccctcgaatccggcgaaaaccaagcaggggcaggcgaaaaagccgtccaactgatgaccgtccacgccgccaaaggcttggaattcaacgccgtcttcctcaccggtatggaagaggggcgtttccccagcgaaatgagccttgccgagcgcggcggcctcgaagaagaacgccgcctcatgtacgtcgccatcacccgcgcccgcaaacgcctctacatcaccatggcacagcaacgcatgctgcacggacaaacccaattcggcatcgcatcccgcttcgtcgaagaaatcccgccagaagtattgcactacctgtccgtcaaaaaacccgccttcgacagctacggcaacacgcgccaaaccaccgtacaacgggacaaaatcatcgatgacttcaaacagccgcaaacctacgcaggcttccgcatcggacaaaacgtccgtcacgccaaattcggcaccggcgtgattatcgatgccgcagacaaaggcgaatccgcccgactgaccatcaacttcggcaaacagggcgtgaaagagctggataccaagtttgcgaaattggaagcgatg

SEQ ID NO: 28966 - DNA, 234 bp, Neisseria gonorrhoeae
atgtcaaacatcgaacaacaagttaagaaaattattgctgaacaactgggcgtaaacgaagccgacgtgaaaaacgaatcttccttccaagacgacttgggcgcggattctttggataccgtggagttggttatggctttggaagaagccttcggctgcgaaatccccgacgaagatgccgaaaaaatcaccaccgtccaactggctatcgactacatcaatgcccacaacggc

SEQ ID NO: 28967 - DNA, 1674 bp, Neisseria gonorrhoeae
atgtcccaacaatacgtctattctatgctgcgcgtgagcaaggttgtgccgccgcagaaaaccatcattaaagatatttccctttctttcttccccggcgcgaaaatcggcctcttgggcttgaacggcacgggcaagtccaccgtgctgcggattatggcgggcgtggataaagaatttgagggcgaagccgtgccgatgggcggcatcaaaatcggctatctgccgcaagagccggagcttgatccggaaaaaaccgtgcgcgaggaagtggaaagcggtttgggcgaagtggctgccgcacagaaacgtttggaagaagtgtatgccgagtacgccaatcccgatgcggattttgacgcgctggcggaagaacaaggccgcttggaagcgattatcgcggcgggttcgtcaactggcggcggtgcggaacacgaattggaaatcgctgccgacgcgctgcgcctgcctgattgggatgccaaaatcggcaatctttcgggcggtgaaaaacgccgcgtcgctttatgcaaacttttgttgagcaagcccgatatgctgctcttggacgagccgaccaaccacttggatgcggaatcggtggaatggctggagcaattcctcgtgcgcttccccggcacagtggtcgcggtaacgcacgaccgctacttcctcgacaacgccgccgaatggattttggaactcgaccgcggacacggcattccgtggaaaggcaattactcgtcttggctggagcagaaagaaaaacgcttggaaaacgaggcgaaatccgaagccgcgcgcgtgaaggcgatgaagcaggaattggaatgggtgcgccaaaatgccaaaggccgccaagccaagcccaaagcgcgtttggcgcgttttgaagaaatgagcaactacgaataccaaaaacgcaacgaaactcaggaaatctttatccctgttgccgagcgtttgggtaacgaagtgattgaatttgtgaatgtttccaaatcgttcggcgataaagtgctgattgacggtttgagcttcaaagtgccggcgggcgcgattgtcggcatcatcggcccgaacggcgcgggtaaatcgacgctgttcaaaatgattgcgggcaaagagcagcccgattcgggcgaagtgaaaatcgggcaaaccgtgaaaatgagcttgattgaccaaagccgcgaaggtttgcaaaacgacaaaaccgtgttcgacaacattgccgaaggtcgcgatattttgcaggtcggacagtttgaaatccccgcccgccaatatttgggacgcttcaactttaaaggcagcgaccaaagcaaaatcgcaaggcagctttccggcggcgaacgcggccgtctgcacttggcaaaaaccttgttgggcggcggcaatgtgttgctgctggacgaaccgtccaacgatctcgacgtggaaaccctgcgcgcgttggaagacgcattgttggaatttgccggcagcgtgatggtgatttcgcacgaccgctggtttctcgaccgcatagccacgcatatcttggcgtgtgaaggcgactccaaatgggtgttcttcgacggcaactatcaagaatacgaagccgacaagaaacgccgactcggcaaagaaggcgcgaaaccgaaacgcatcaaatacaaaccggtaacgcgt

SEQ ID NO: 28968 - DNA, 954 bp, Neisseria gonorrhoeae
atgaaagaattcgacttcatcaaacggtatttgcaaacaggtacggataaggatgtcgtattgggcataggcgacgatgcggcgattgtccgcccgcgcgaaggcttcgatttgtgtttcagtgcggatatgcttttgaaggacaggcatttttttgcagatgtcaaacctgaaggcttggcttggaaggttttggccgtcaatatttcagatatggcggcgatgggtgcgataccgcgttgggtgctgctgagcgcggcgttgcccgaattggatgaagtatggctggaacggttttgcggcagctttttcggtttggcaaaaaagtttggcgtaacgttaatcggcggcgatacgaccaagggcgatatggcgttcaatgtaaccattatcggcgaattgccgaagggtagggcgttgcggcgtgatgcggcggttgcgggcgacgatatttgggtgtcggggcgtgtcggtatggcggcggcggctttgaactgccgtctgaaacggtgtgtgttgccggatgatgtgttcgccgaatgcgaacaaaagctgctccgtcccgagccaagggttgggctggggcttgcgctgttgccgtttgcccgggcggcacaggatgtttcagacggccttgcgcaagatttggggcatatcctgaccgcttccggcgtgggggcggaaatttgggccgattcgctgccatctttatctgtattgaaagatattttgccccgagcgcaatggctgtcttatactttggcgggcggcgacgattacgagctggtttttaccgctccggaaagttgccgcagccgcgtgcttgatgcggcggaacggtgcggcgtgccggtaacgtgcatcggcaaaatcaacggaggatgccgtctgaaggttttagatgccggcggcagggaattggaactacattctttaggattcgatcattttggc

SEQ ID NO: 28969 - DNA, 1341 bp, Neisseria gonorrhoeae
atggcaaactgtttgaacccctgccgcaaattacagacggcatctgcacgacagccgcatatgccccccattccgacaaccaacagcgaggttatcatgagtcagagaagagtagtcattacaggcttaggtcaggtttcccctgtcggcaacactgccgcagaggcttgggacaacctgctcgccggcaaaagcggcatcggcgcgattacccgctttgacgcatccgacatcaacagccgtgtcgccggcgaagtgcgcggtttcgacatcggacaatacatcagcgcgaaagaagcgcgccggatggacgtgttcatccactacggcatcgccgccgcattgcaggcgattgccgattcgggtttggacgatgtggaaaacctcgacaaagaccgcatcggcgtgaacatcggttccggcatcggcggactgcccagcatcgaggccaccggcaaagccgtaatcgaaggcggcgcgcgcaaaatcaaccctttctttatccccggttcgctgatcaacctgatttccggacacgttaccatcctcaaaggctaccgcggcccgagctacggcatggtttccgcctgtaccaccggcgcgcacgccatcggcgattccgcccgactgatcaaatacggcgacgcggacataatggttgccggcggcgcggaaggcgcaatcagcaccttgggcgtgggcggttttgctgcgatgaaagccctctccacccgcaacgacgaccccgccaccgcttcccgtccgtgggacaaaggccgcgacggcttcgtcatcggcgaaggcgcgggcatattggtgttggaagaattagaacacgccaaaaaacgcggcgcgaaaatctacgccgaaatcgtcggcttcggcatgagttccgatgcttaccatatcaccgcgccgaacgaagaaggccccgcccttgccgttacccgcgcgctgaaagatgccggcatcaatcccgaagacgtggattacgtcaacgcgcacggcacgtccacccccttgggcgatgccaacgaaaccaaagccctcaaacgcgcgttcggcgaacacgcctgcaaaaccgtcatcagctcgaccaaatccatgaccggccacctgctcggcgcggcgggcggcgtggaggccgtgtacagcattttggcgatacacgacggcaaaatcccgccgaccatcaacatttttgaacaagacgttgaagccggctgcgatttggactactgcgccaacgaagcgcgcgacgcggaaatcgacgttgccatttccaactccttcggcttcggcggcaccaacggtacgctggtcttcaaacgcttcaaaggc

SEQ ID NO: 28970 - DNA, 1512 bp, Neisseria gonorrhoeae
atgactacctccaaatgccccgtaacccatctgaccatgaacaacggcgcgcccgttgccgacaatcaaaacagcctgaccgccggcccgcgcggccccctgctgacgcaagatttgtggctgaatgaaaaactcgccgacttcgtgcgcgaagtcatccccgaacgccgtatgcacgccaaaggttcgggcgcgttcggtacgtttaccgtaacacacgacatcaccaaatacacccgcgccaaaattttcagcgaagtcggcaaaaaaaccgagatgttcgcccgtttcaccaccgtggcaggcgagcgcggcgcagccgatgcggaacgcgacatccgcggttttgcgttgaaattctataccgaagaaggcaactgggatgtggtcggcaacaacacgcccgtgttcttcctgcgcgacccgcgcaaattccccgacctgaacaaagccgtcaaacgcgatccgcgcaccaatatgcgttccgccacaaacaactgggacttctggacgctgctgcccgaagccctgcaccaagttaccatcgtgatgagcgaccgcggtattcccgccagctaccgccatatgcacggcttcggttcgcatacctacagcttctggaacgaagcgggcgaacgtttttgggtgaaattccatttccgcagccagcaagggattaaaaacctgaccaacgaagaagctgcaaaaatcatcgccgacgaccgcgaaagccatcagcgcgacctgtacgaagccatcgagcgcggcgagttcccgaaatggacgatgtacatccaagtcatgcctgaagccgatgccgaaaaagtgccttatcatccgtttgacttgaccaaagtttggccgaaaaaagactatccgctgattgaagtgggcgaattcgagttgaaccgcaatcccgaaaacttcttcgccgatgtggaacaatccgccttcgcaccgagcaacctcgttcccggtatcggcgcgagcccggataaaatgttgcaagcccgtttgttcaattacgccgacgcgcaacgttaccgcttgggtgtgaacttccgccaaatccccgtcaatcgtccgcgttgccctgttcacagcaaccagcgcgacggacaaggccgcgccgacggcaactacggcagcctgccgcactacgaacccaacagcttcggccaatggcagcaacaacccgacttcgccgaaccgcctttgaaaatcaacggcgacgcggcacactgggactaccgccaagacgatgacgactacttcagccaaccgcgcgccttgttcaacctgatgaacgacgcgcagaaacaggctttgtttgacaacaccgccgcagccatgggcgatgcgcccgacttcatcaaataccgccatatccgcaactgctaccgttgcgacccggcatacggtgaaggcgtagccaaagccctcggactgaccgtcgaagacgcacaagccgtccgcgcgaccgatcccgcactgggtcaggccggtttgctg

SEQ ID NO: 28971 - DNA, 1572 bp, Neisseria gonorrhoeae
atggctcaaatccaaatgagcgcaaatgttaaaaccatcaacgccgtctttgccgccatgctggtaggtacagtcggctattttatttattggggcttgggttatacccattacaattacgccgccttattcattattgccacgatgttcggtgtgtttatggcgttcaacatcggcggcaacgatgttgccaattctttcggcaccagcgtcggtgcaggcacgctgaccatcccgcaggctttgctgattgcggcggtatttgaggtcagcggcgcggtcatcgcgggcggcgaggtaaccgataccatacgcaaaggcatcgtcgatttgaagggtgttgatttcgaacccatacagtttgtgtttattatgatgtccgcgcttttggcggcggcgttgtggctgctgttcgcgtcccgcaaaggcctgccggtttcgacgacgcacgcgattatcggcggcatcgtcggcagtgcgttgtgtatggcgtttacgcataatgcggacggggtggcgttgatacggtggggcaagctgggcgaaatcgggatgtcttgggtattgtcgcccgtgttgggcggcgcggtgtcctatttcctgttttcgcgcgtcaagaaaaacgtcttagattacaacgcttgggcggaaggaacgctcaagggcatcaagcaggaaaaaaaggcctataaagaacggcaccgcctgtttttcgagggtttgtccgaagccgaaaaagtcgagtacgccaccaaaatggcgcacgacgcgcaaatttacgacgaacccgaattcgatcctcaagagctgcaatcggagtattaccgcggtctttatgcgttcgacaaccgtaaaaacaatgtcgattcctacaaggcgctgcattcttggattccctttatcgcttcgttcggcacgatgatgatttccgctatgctgattttcaagggcttgaaaaacctgcatttggggatgagcaacgtcaacagcttcctgaccatctttatgataggcgcggcggtgtggatggggacgtttgtgtttgccaaaagcctcaagcgtaaagacttgggcaaatcgacctttcagatgttttcatggatgcaggtctttaccgcctgcggcttcgcattcagccacggtgcgaacgatatcgccaacgccatcggcccgtttgccgcgattatggatgttttgcggacgaacagcgttgccgcgcaaagcgccgtccctccgattgcgatgctgactttcggcatcgcgctgattgtcggtttgtggtttgtcggtaaagaggtgattaaaaccgtcggtacgagtttggcggaaatgcatcctgcttcgggttttaccgccgaactgtccgccgcatccgtcgtgatgggcgcgtcgctgatggggctgcccgtgtccagtacgcatatcttggtcggcgcggtactcggtatcggtctggtcaaccgcaatgccaactggaaactgatgaaacccatcggtttggcgtgggtcattaccctgcctgccgccgctgtattgtcgatggccagctatttgattttgcaggcagtgttc

SEQ ID NO: 28972 - DNA, 2613 bp, Neisseria gonorrhoeae
gtggcaaaaaaacgcttttgccactttgccggcaaattccgcgcccgtaccggccgcaaatgcgccgcacgccctttcagacggcatccggatgcggataacgctgaatcaggcggcgaaatcggctataatacacaattatatgcgccgtcccgcccgctttttccacaaggtgcggactgttttggcggcatcgcaaaatcttttcaaaatccggcaaaaaatatgactgaacaaaaacacgaagaatacggcgccgacagcatccaggtgctcgaaggcttggaagcggtacgcaaacgccccggcatgtacatcggcgacacgcaggacggcagcggcctgcaccatatggtgtttgaagtattggacaacgccatcgacgaagcactcgccggacattgcgacaaaatcacggtaacgatacacgccgaccattccgtcagcgtcgccgacaacgggcgcggtatgcccaccggcatccacccgaaagaagggcgttccgccgccgaagtcatcatgaccgtcttgcacgcgggcggcaaattcgacaacaacagctacaaaatctccggcggcctgcacggcgtgggcgtatccgtcgtcaacgcgctgtccgactgggtaacgctgaccatctaccgcgacggcaaagaacacttcgtccgcttcgtacgcggcgaaaccgaagagccgctgaaaattgtcggcgattccgacaaaaaaggcacgaccgtgcgcttcctcgccggcacggaaaccttcggcaatatcgaatacagcttcgacatcctcgccaaacgtattcgcgaactttcgttcctaaacaacggcgtggacatcgaattgaccgacgagcgcgacggcaagcacgaaagcttcgccctttccggcggcgtggcgggcttcgtgcaatacatgaaccgcaaaaaaacgcccttgcacgaaaaaatcttctatgcgttcggcgagaaagacggcatgagcgtcgaatgcgcaatgcaatggaacgacagctatcaggaaagcgtgcagtgcttcaccaacaacatccctcagcgcgacggcggtacgcacctgaccgcgctgcgccaagtgatgacgcgcaccatcaacagctacatcgaagctaacgaagtcgccaaaaaagccaaagtggaaaccgccggcgacgatatgcgcgaaggtttgacctgcgtgttgtccgtcaaactgcccgaccccaaattctcatcccaaaccaaagacaaactggtttccggcgaaatcggccccgttgtcaacgaagtcatcaaccaagcactaaccgacttcctcgaagaaaatccgaacgaagccaaaatcatcaccggcaaaatcgtcgatgccgcccgcgcacgcgaagccgcccgcaaagcccgcgaaatcacccgccgcaaaggcgtgatggacggcttgggactgcccggcaaactcgccgactgccaagaaaaagaccctgccctgtctgaactctacctcgtcgagggcgactccgcaggcggttccgccatgcagggccgcgaccgcaaattccaagcgattttgccgctcaaaggtaaaattttgaacgtcgaaaaagcacgttttgaaaaaatgctcgccagccaagaggtcgccaccctgattaccgcgctgggtgcaggcatcggcaaagaagagttcaaccctgaaaaactacgctaccaccgcatcatcatcatgaccgatgccgacgtggacggtgcgcacatccgcaccctgctcctgaccttcttctaccgccaaatgcccgaactggtcgagcgcggctacatttacatcgcccagccgccgctctacaaagccaaatacggcaagcaggagcgttacctcaaagacgaactggaaaaagaccaatggctgctcggccttgccttggaaaaagccaaaatcgtttcagacggccgcaccatcgaaggcgcagaacttgccgacaccgccaaacaattcttgttggcgaaaaccgtcatcgaacaggaaagccgcttcgtggacgaactcgtcctgcgtgccatgctgcacgcgtcgcccattgatttgacgtcgtctgaaaacgccgataaagccgttgccgaactttccggtttgcttgacgaaaaagaagccgccctcgaacgcatcgaaggtcatgaaggacaccggttcatcaaaatcacgcgcaagctgcacggcaacgtcatggtcagctacatcgaacccaagttcctcaacagcaaagcctaccaaaccctcacccaaaccgccgccgcgctcaaaggcttggtcggcgagggcgccaagctctacaaaggcgagaacgagtacgacgcggacagctttgaaaccgctttggacatcttgatgagcgttgcccaaaaaggtatgtccatccaacgatacaaaggtttgggcgagatgaaccccgagcagctttgggaaaccacgatggatcccgccgtgcgccgcctgttgaaagtgcgcatcgaagatgccattgccgccgacgaagtgttcgttaccctgatgggcgacgaggtcgaaccgcgccgcgcctttatcgaaaacaatgcgctgattgcgcaaaatatcgacgca

SEQ ID NO: 28973 - DNA, 447 bp, Neisseria gonorrhoeae
atgagcaccttcttccggcaaaccgcccaagccatgactgccaaacacatcggccgcttcccgctatcggagttggaccaggtgattgattggcagccgatcgaacaatacctgatccgtcaaaaaacccgttacctccgagaccgccgcggccgtcccgcccatcccctgtcgtccatgttcaaagccgtcctgcccggacaatggcacagcctctccgatcccgaactcgaacacagcctcatcacccgcatcggtttcaacctgttttgccgttttgacgaaccgggcatccccggttgcagcaccttatgccgctaccgtaaattccgctatgcgcgggcagcctatttcgggctgctcaaagtgggtgcgcaaagccacctgaaggcgatgtgtttgaacctgttgaaagccgccaacaggctaagtgcgcccgctgccgcc

SEQ ID NO: 28974 - DNA, 267 bp, Neisseria gonorrhoeae
atggcactgaccgtagaacaaaaagcacaaatcgttaaagatttccaacgtaaagaaggcgacaccggctcttctgaagtacaagttgccctgttgactttccgcatcaacgatctgaccccccacttcaaagccaaccccaaagaccaccacagccgtcgcggcctgttgaaaatggtcagccaacgccgccgcctgttggcctatttgcgccgtacccagcccgatacgtatcgcgcgttgattacccgcttgggtctgcgtaaa

SEQ ID NO: 28975 - DNA, 885 bp, Neisseria gonorrhoeae
atgcagaaatccaaattatcttggttcttgaaactgatgttggcactatcgctggcgtttctgtatatcccgctggttgttttggtcatctattcgttcaacgaatccaaacttgttaccgtttggggcggcttttcgaccaagtggtacggcgcattgctggaaaacgacaccattttggaagccgcttggctgtcgctgcggattgccgttgtgtcttcgcttgccgccgtcgttttgggcacgctggcgggctatgcgatggcgcgtatcaaacgctttcgcggcagcacgctgtttgccggtatgatttccgcgcccatggtcatgcccgacgtgattaccggtctgtctatgctgctgctgattattcaggtgcagatatttttgcagggcagcgaatggttgcaacatctctacttcgatcgcggctttttcaccatcttcctcggacatacgacgctgtgcatggcatacattaccgttgtcatccgttcgcggctggtcgagcttgaccagtcgctcgaagaagccgcaatggacttgggcgcgcgtccgctgaaaatcttttttgtcatcactttgcctttgattgcccctgccattgcttcaggcttcctactcggcattaccttgtctttggatgatttggtaattacctcattcctctccggccccggttcatccacattgccgcaggttattttctccaagatcaagttgggtctcgatcctcagatgaatgtcttggcaaccatcctgatcggcatcatcggaacattggtcatcatcgtcaattattggatgatgaggcaggcaaccaagcgcaaccgagaagcggcagaagcctaccgccaagaaaaattggctgccgagaaagcaaat

SEQ ID NO: 28976 - DNA, 966 bp, Neisseria gonorrhoeae
atgaaaattttgcttgtccgtttgtccagtatgggtgatttaattcacactttgcccgcaatcgaagatttggcgcgacaatgctctgatgtagaactgcattggctatgtgaagccgggtttgcgggtattgcacggttgcatccgtttgtaaaaaaggtccatgtaatgaagtggcggcaatggcgcaaacatctctttcaggctgaaacttggcgggagatgggtcgtctgaaacaggctttgctgcaggaagcatttgattttgtattggacagtcagggtctgattaaaagcgcgtgtttcgccaaaatggcaaaatcccctatttatggtttggataaacacagtgcgcgtgagggggtggctgctttggcgtatgataaaaagtatgtcgtaccgaaaggtagaaatgccgtttggcgcaaccgtgatctgtttgcccaggtgtttgggtatgcaatgcctgagacgcaggtatttggtttgtccgttcctgaagcaagccgtctgaaaaatttagcgcagccgtattatgcggctttgcacgcgaccagtcgggacagtaagttatggcctatggaaaattggcgggagttgctgcagaaactgaatcaaaaacaacaatgcaatgtttatctgccttggggaaacgaggctgaaaaagtgcgtgcggaacagattgcagacgggctgccgtttaccatagtgtgcgctaaaatgaatttattacaggcggcgtatctgttgaaacacgcggttggaatagttggtgtagataccggtttgctgcatttggcaaatgccttggaaaaacctgtggtcggcatttataccgataccgatccgattaaaacaggcgttcaagtttcggctattgcaaaaaatgtgggcaatatcgggcagattccgaccgcagatttggtttatcaaacgctgatggattgtgtttcagcagataaaggc

SEQ ID NO: 28977 - DNA, 747 bp, Neisseria gonorrhoeae
atgaaagcactggtcgcagtaaagcgcgtagtggactacaacgtcaaagtccgtgtgaaagccgatggttcggatgtggacatcggcaatgtcaaaatgtcgatgaacccgtttgatgaaatcgctgtggaagaagccgtccgtttgaaagaagccggaaaagtaagcgaaattgtagcggtttctttgggtgaaaagaaatgcgaagaaaccttgcgtaccgctttggcaatgggtgccgaccgtgccattcatattgaaaccgatgtgaaattagagccgctggcagttgccaaactgctgaaagctgttgcggacaaagaaaatccgcaaattttctttttgggcaaacaagcgattgatgacgatgccaatcaagtggcgcaaatgctggcagctttgctgaatgcggcgcaaggtacatttgtttcaaaagtacaaattgaaggtgatgaagtacagattgtgcgcgaaattgatggcggcgaagaaacgattgcgttgaaactgcctgcagtcatcagcgcagatttgcgtttgaacgagccgcgctttgtcaaactccccaatattatggtggcaaagaaaaaacctctggaaaaactggattctgccgatttggctaccgatatttcgcctcgtctgaaaacggtgaaatttgccgaacctaaggcgcgtcaggcaggcgtaaaagtagcaagcgttgccgaattggttgaaaaattgaaaaacgaagccaaagtgatt

SEQ ID NO: 28978 - DNA, 1383 bp, Neisseria gonorrhoeae
atgatcagcatttttgatattttcaaaatcggtatcggcccttccagttcgcatacggtcggcccgatgaaggccgccgccgcctttgccgcaggcttggacgcgcaaaccgcccgcatcgccatcgacatttacggctcgcttgccctgaccggatacggacacggcacatttgacgcgctgatgctcggtttggaaggcagcctgccgcacgacatcccgcttgccggcattcccgaacgcctcggacgcatccgcacgcagcacatcctccggctcaacgggcaagaaatccgcttcatccccgaccgcgacctgaacatacgcggcaatcaagtgctgcccaaacaccccaacggcctgcgatttaccgcctatgcttcagacggcacggtattgaaggaacaggtttattattcggtcggcggcggctttgtcgttaccgaagaagacttcgagtggcagtcggaaacggaaaaagccgttccttatccttacaacagttgtgccgggctgcttgcccgatgccgtctgaaccggctcgacatctccgaagtcgtgttggcaaacgaagccgcgcttgccggatgcggcgaagccgaaatccgccgccgggttgccggtgttgccgagattatggaagagtgcatcaaacggggcttaaacgcaggcggcgaactgcccggcggattgaacgtccgccgccgcgccccgcagcttgccgccaaactcaaagtcctgcgcgaaaccgaaatcgtcaacacccggctctggccgatggtgtacgccatggcggtcaacgaagaaaacgccgccggcggacgcgtcgttaccgccccgaccaacggcgcggcaggcatcattcccgccgtattgcattatttccgcaagttcaacccccacgccacacaggaacgtgtcgaaaacttcctgctcaccgcaggcgcaatcggcatcctctacaaaaccaacgcctccatttccggcgcggatgtcggttgtcagggcgaagtcggcgtagcgtgttcaatggcggcgggtgcatacgccgaagtcatcggcggcacgcccaaacaagtggaaaacgccgccgaaatggcaatggaacaccatttgggcttaacttgcgaccccgtcggcgggttggtgcaaatcccctgcatcgaacgcaacggcatcgccgccgaaaaagccctcaaactcggcacgctcgcgctcttggaagacggcacggacaaaaaagtctcgctcgacgaagtcatccgaaccatgctgcaaaccggccgggacatgaaggcgacctacaaagaaacctcgcttgccggactcgccgccacgctccggaaaaaagccgtccccgtatccgtgcgcgtggtcgagtgc

SEQ ID NO: 28979 - DNA, 933 bp, Neisseria gonorrhoeae
atgagcgtattgattattgccgaacacgacaacaaacagttgaatcctgccactttgcatgctgttgccgctgccgccaaactgggcaaggtcgatttattggttgtcggaaacggcgcatcgtccgtcgtggaattcgcgaagcaagtagcgggagtggaaaaagttttggttgcagatgctgctcattatgctgaaggtttggctgaagagttggctccgctggttgtcaaattggcggcggattaccgctatgttgcagcaacggcaaccacattcggtaaaaaccttttgccccgcgtagccgccttattagacgtaccgcaaatttctgatttgaccgagattgtagataacacgacttttgtacgtccgatttatgcaggtaatgcatttgaaaccgtgcaagccgattcagaaaaattggtgctgaccttccgtgtgacggcttttgacgcagtggcggcgcaaggtggtaatgctgaggtaattaatgttaaaacaacccctgcccaaaacctgagtcgttttgttaaccgtcaactttcccattccgatcgtcccgaactgactcaggcaaaagtgattgtttccggtggtcgtgcgttgggtagtgtggaaaaattcagtgaagtgctgacaccgttggcggatgttttaggtgcggcaatcggtgcatcccgtgcggcggttgatgccgagtatgcaccaaacgatgctcaagtcggacaaaccggtaaggtggttgcgccgcagctctattttgcaatcggtatttcaggtgcgattcaacacgttgccggtatgcaggacagtaaggtgattgttgcaatcaacaaagatgccgatgcgccgattttcaatgtagccgattacggattggttggcgatttatttgaaattgttccacaattaatagaattattgaaaaat

SEQ ID NO: 28980 - DNA, 1029 bp, Neisseria gonorrhoeae
atgggcatcaaagtcgccatcaacggctacggacgcatcggccgccaggttttgcgcgccatctacgactatcagattcaagaccaactccaaatcgtcgccgtcaacgccagcggcagccttgaaaccaacgcccatctgaccaaattcgacaccgtacacggacgctttgaagccgacgtatcccacgacggcggcaacctcatcgtcaacggcgacaaaatccccttcttctcgacccgcaaccctgccgaactgccgtggaaagaactcggtgtcgatttggtcatggaatgcaccggcgcgttcaccagcaaagaaaaagccaaaatccacctcgaaagcggcgcgaaaaaagtcctcatttccgcaccgggcggcgacgatgtcgatgcaaccgtcgtgtacggcgtgaacgacagcgtcctgaccgccgacatgaccgtcgtttccaacgcttcctgcaccaccaactgcctctcgccggttgccaaagtgttgagcgaaagcgtcggcatcgtcaaaggcgcaatgaccaccatccacgcactgaccaacgaccaaaccgttaccgacgtgcgccacaaagacctgcgccgcgcccgcagcggcgtggaaaacatgattccgaccaaaaccggcgcggcaaaagccgtcggtttggtcttgcccgaattgaaaggcagactcgacgggcttgccatccgcgtgccgaccgtcaacgtatccttggtagatttgagcttccaagccgcgcgcgacaccacagtcgaagaaatcaacgcactgatgaaagccgtctcggaagcaggcgcgctcaaaggcgttttgggctacaacaccctgccattggtttccatggacttcaaccacaccaccgaagccagccacttcgacgcaacgctgaccaaagtcgtcgacggcaacatggtcaaagtgttcgcgtggtatgacaacgaatggggcttcagctgccaaatgctgaacaccgcacgccgtatgttcggacttgaagtgcgcccgctcaaa

SEQ ID NO: 28981 - DNA, 807 bp, Neisseria gonorrhoeae
atgataccgctcaaaatcgccatcgccggcgcaaacggccgcatgggacgcgtcctcgtcgaagccgtcaacaaccatcccgacaccgtcctttccggcgcgctcgaacactcaggctcagaagccctcgggctggacgcgggctacgccgtcggactcaaaaccggcatcgccatttcagacgacgttgacgccgttctcgcccaaagcgacgtactcatcgacttcacccgccccgagccgaccctcaagcacctgcaaaaatgcgttgaaaaacaagtcaacatcatcatcggcacaacaggcttcgacgatgcgggcaaagccgccatccgcgccgccgccgaaaaaacaggcatcgttttcgccgccaacttcagcgtcggcgtcaacctcaccttccacatcctcgacaccgtcgcccgcgtcctcaacgaaggctacgacatcgaaatcatcgaaggccaccaccgccacaaagtcgatgcccccagcggcacagcattacgaatgggcgaagtcatcgccggcgcgctcggccgcgacctcaaacaatgcgccgtttacggccgcgaaggccacactggtccgcgcgatccttccaccatcggctttgccaccgtccgcgcaggcgacatagtcggcgaccacaccgccctcttcgccaccgacggcgaacgcgtggaaatcacccacaaagccggcagccgcatgacctttgccgccggtgccgtccgcgccgcagtttgggtaaacggcaaaacgggtttgtacgatatgcaggacgtactcgggctgaacaaccgt

SEQ ID NO: 28982 - DNA, 1152 bp, Neisseria gonorrhoeae
atggttgataaaaaaagccctttgattgccgtcagtgtcggcgaagcgtcgggcgacctgttgggggcgcacctgatacgcgccatccgaaagcgttgcccgcaggcacggttaaccggcatcggcggggaactgatgaaggcggaaggtttcgagagcctttatgatcaggagcggctggcggtgcgcggctttgtcgaagtggtcaggcggctgccggaaattttacggatacgcagggagctggtacgggatttgctgtcgttgaaacctgatgtctttgtcggtatcgatgcgcccgattttaatctgggtgtggcggaaaagctgaaacgggcgggcattccgaccctgcattatgtcagtccgtcggtttgggcgtggcggcgcgaacgcgtgggcaaaatcgtgcatcaggtcaaccgcgtgctgtgcctgttcccgatggagccgcagctttatctcgatgcgggcggacgtgcggagtttgtcggtcatccgatggcacagcttatgcccttggaagacgaccgtgaaacggcgcggaaaactttgggcgcggatgtcggcatccccgtattcgccctgctgcccggcagccgcgtcagcgaaatcgactatatggcgccggtgttttttcagacggcattattgttgttggaacgctatcccgccgcccgcttcctgctgcctgccgcaacggaggcgacgaagcggcgtttggcggaagttttgcagcggccggagtttgccggattggcgctgacggtaaccgacagacagtctgaaacggtgtgcagggcggcggatgcggtgctggtaacgagcggtacggcgactttggaggtggcgttgtgcaagcgtccgatggtcatcagctacaagatttcgccgctgacctatgcttatgtgaaacgcaaaatcaaagtgccgcatgtcggcctgccgaatatcctgttgggtaaggaggccgtgccggaattattgcaatctgaagcaaaaccggaaaaactggcggcggcattggcggactggtacgaacaccccgataaggttgccgcgctgcaacaggatttcggggcgttgcacctgctgttgaaaaaagatacggcggatttggccgcgcgcgcggttttggaagaggcgggatgt

SEQ ID NO: 28983 - DNA, 1257 bp, Neisseria gonorrhoeae
atgcacgtctccgaattacaaaccctgcacatttccaaactcttagaattggcggaagaacacggcatcgaaaacgccaaccgattccgcaaacaagacctcgtatttgccatcgtccgccagatgatgaaaaaaggcgagggttttacctgctccggcacgctcgaaatcctgcccgacggcttcggcttcctccgcagcgcggacacgtcctatcttgccggccccgacgacatctatgtctcgcccactcaaatccgccgcttcaacctgcatacgggcgacaccatcgaaggcagcgtgcgcgtccccaaagacaacgaacgctattttgccttggtcagactggattccatcaatggcgaccacccggaagtatgccgccataaaatcctgtttgaaaacctgaccccgctgtttccgaccgaacagttgaagctggaacgcgacttaaagtccgaagaaaacctgaccggacgcgccatcgacctgatttcgcccatcggcaaaggtcagcgcgccctcttggttgccccgcccaaaatcggtaaaaccgtgatgctgcaaaacattgcccacgccgttaccgcaaactatcctgaagtcgaactcatcgtcctcttgattgacgaacgccccgaagaagtaaccgaaatgagccgttccgtccgaggtgaagtagtctcctccacctttgacgaaccggcgcaacgccacgtccaagttgccgaaatggtgcttgaaaaagccaagcgtatggtggaacacaaaaaagacgtggtcatcctgctggattcgattacccgccttgcccgcgcctacaataccgtcgtccccgcctcgggcaaaatcctgaccggcggtgtcgatgccaacgcgctgcaccgccccaaacgtttcttcggtgcggcgcgcaacgtggaagaaggcggttcgctgaccattatcgccaccgcattggttgaaaccggcagccgtatggacgatgtgatttacgaagaattcaaaggtaccggcaatatggaattgcacctcgaccgccgtatggcggaaaaacgcctcttccccgccatcaacatcaacaaatccggcacgcgccgcgaagagctgcttgtgccgaacgaccagttgcaacgtatgtggttactgcgcaagttcctgcacccgatggacgaaatcgaagctaccgagttcttaaacggaaaaatcaaagcatctaaaaataatgatgatttctttgaactgatgcgcggaaaa

SEQ ID NO: 28984 - DNA, 819 bp, Neisseria gonorrhoeae
atgagcagtccgcgccaagtgttttatatttccgaccgcaccggtctgactgccgagaatatcggcgaggctttgctgaaccagtttggcaatctgtcgttcaaacgccatacgcatccgtttgtcgatacgccggaaaaggcgcgcgcggtggtggagaaggtcaatcggagccggcaggaaaacggtcagcgtccgattgcgtttgtcagcgtggttgatgacgaaatccgccggattattaaaggggcggatgcttttcagattaatttctttgagacttttttgggactgttggagaaggaactcaataccgaagcaacggtatccgggcaggggcatcacagtatcggcaatacgaagcgttacgatgcgcgtatggaggcggtcaatttttctttgaaccatgatgacggggtcagcgataagaaccttcaggaggcggatgtgattctgatgggcgtgtcccgttcgggcaaaacgccgacctgcctgtatctggcgttgcaatacggtatccgtgcggcaaactatccgctgattcccgacgatttggaatcggccgatctgccgcgtatggtcaagccgtataaagacaaactgttcgggttgactatccagccggaacgtttgcaggccatccgtcaggaacgccgcccgaattcggcttatgcgcgcatcgacacctgccgcagcgaagtggcggacgcgcagagtatgttcagacggcatggcattccgtttgcgaatacgacggacaagtcggttgaggaactggcggtacacatccttcaggcgtgcaagctcaaacgcaggttt

SEQ ID NO: 28985 - DNA, 864 bp, Neisseria gonorrhoeae
gtgccatccgaaccgggtaaaaatatgattcaacacgcaggcttgggctaccgccgcgatttggcggaagactttctctcgctttccgaaaacagcccgatatgctttatcgaagccgcaccggaaaactggctgaaaatgggcggcagggcgcgcaaacagtttgaccgtgtggcggaacggctgccgctggcgttgcacggattatctatgtcgctgggcggacaagccccgctggataccgatttgatagacggcatcaaagaaatgatgtgccgttatgactgcacgtttttctccgatcatttgagctactgccacgacggcggtcatctttacgatttgttgccgctgcctttcactgaagaaatggtgcatcatacggcgcggcgtatccgcgaagtgcaagaccgtttgggctgccgcatcgccgtggaaaacacgtcctactacctgcattctccgcttgccgagatgaacgaggtcgagttcctcaacgcggttgcccgtgaagccgactgcggtattcatttggatgtgaacaatatttacgtcaacgctgtcaatcacggcctgctgtcgcctgaggcctttttagagaatgtggacgcagggcgcgtgtgctacatccacatcgccggacacgatgccgaaacccccgagcttttgattgatacccacggcgcggcggttttaccgaccgtttgggacttgctcgaactcgcctacaccaagcttcccaccatccctcccaccctgttggaacgcgatttcaatttcccaccttttgccgaactcgaagccgaagttgccaaaattgccgattatcaaacgcgtgccggaaaggaataccgccgtgcagcc

SEQ ID NO: 28986 - DNA, 1533 bp, Neisseria gonorrhoeae
ttggaatttgacgcaaaaccggtttcagacggcatcggcgtggtaaaatcgtgccgactttgcgtcaagccgccgcgttccgcatattttgccatttccctttttcaggagctgaagatgtccattaaaaacgccgtaaaattgattgaagaaagcgaagcccgctttgtcgatttgcgcttcaccgataccaaaggcaagcagcaccactttaccgtgcctgcgcgcatcgtgttggaagaccccgaagagtggtttgaaaacggaccggcgtttgacggctcgtccatcggcggctggaaaggcattgaggcttccgatatgcagttgcgccccgatgcgtccacagccttcgtcgatcctttttatgatgatgttaccgtcgtcattacctgcgacgtcatcgaccctgccgacggtcagggttacgaccgcgacccgcgctccatcgcacgtcgcgccgaagcctatttgaaatcttccggtatcggcgacaccgcctatttcggccccgaacccgaattcttcgtcttcgacggcgtagaatttgaaaccgacatgcacaaaacccgttacgaaatcacgtccgaaagcggcgcgtgggcaagcggcctgcatatggacggtcaaaacaccggccaccgccccgccgtcaaaggcggctacgcgcccgtcgcgccgattgactgcggtcaagatttgcgctccgccatggtgaacattttggaaggactcggcatcgaagtcgaagtccaccacagcgaagtcggtaccggcagccaaatggaaatcggcacccgtttcgccactttggtcaaacgcgccgaccaaacccaagatatgaaatacgtcatccaaaacgttgcccacaatttcggcaaaaccgccacctttatgcccaaaccgattatgggcgacaacggcagcggtatgcacgtccaccaatccatttggaaagacggtcaaaacctgttcgcaggcgacggctatgccggtttgtccgataccgcgctctactacatcggcggcatcatcaaacacgccaaagccctgaacgcgattaccaatccgtccaccaactcctacaaacgcctcgtgccgcactttgaagcaccgaccaaattggcctattccgccaaaaaccgttccgcttccatccgtatcccgtctgtgaacagcagcaaggcgcgccgcatcgaagcgcgtttccccgacccgaccgccaacccgtatttggcatttgccgccctgctgatggccggtttggacggcattcaaaacaaaatccatccgggcgaccctgccgataaaaacctgtacgacctgccgccggaagaagacgcgctcgtcccgaccgtctgcgcttctttggaagaagcacttgccgccctcaaggccgaccacgaattcctgctgcgcggcggcgtgttcagcaaagactggatcgacagctacatcgcctttaaagaggaagatgtccgccgcatccgtatggcgccgcacccgctggaatttgaaatgtattacagcctg

SEQ ID NO: 28987 - DNA, 1893 bp, Neisseria gonorrhoeae
atgacccacatgatttaccccaaaacctacgatgtcatcgtcgtcggcggcggacacgccggcacggaagccgcgcttgccgccgcccgtatgggcgcgcagacgcttttgctcacacacaatatcgaaacgctcggacaaatgtcgtgcaacccctctatcggcggcatcggcaaagggcatttggtacgcgaactcgacgcattgggcggcgcgatggcgttggcgaccgacaaatccggcatccagttccgccgcctgaacgccagcaaaggcgcggcagtacgagccacgcgcgcgcaggcagaccgcatcctgtataaagcctccatccgcgaaatgttggaaaaccaagaaaacctcgaccttttccaacaagccgtcgaagacgtaacactcgagggcgaacgcatcagcggcgtgatcaccgcgatgggcgtggagtttaaagcacgcgccgtggtgctgaccgcaggcacgttcttgtccggcaaaatccacatcggtttggaaaactacgaaggcggccgcgccggcgacccagccgccaaatcgctcggcggacgtttgcgcgaattgaagctgccgcaaggccgtctgaaaaccggcacgccgccgcgtattgacggacgcacgattgacttttcccaacttaccgaacagcccggcgacacgcccgttcccgtcatgtccgtgcgcggcaacgccgaaatgcacccgcgccaagtgtcctgctggattacgcataccaacacgcaaacccacgacatcatccgctcaggcttcgaccgcagcccgatgtttaccggcaaaatcgaaggcgtgggtccgcgttattgtccgtctatcgaagacaaaatcaaccgcttcgccgacaaagacagccaccagattttcctcgaacccgaaggtctgaccacgcacgaatactaccccaacggtatctccaccagcctgccgttcgacatccaaatcgcgctcgtgcgcagtatgaagggtcttgaaaacgcccatatcctgcgccccggctacgccatcgaatacgactacttcgatccgcgcaacctcaaagcaagcctcgaaaccaaaaccattgagggactgtttttcgccgggcaaatcaacggcacgacaggctatgaagaagccgccgcgcaaggattgctggcgggcgcgaacgccgtgcaatacgtccgcggacaagatccgctcctgctgcgccgcgaacaagcctacctcggcgtattggtggacgacctcattaccaaaggcctgaacgaaccttaccggatgtttaccagccgcgccgaataccgcctgcaactcagggaagacaacgccgatatgcgcctgaccgaagacggctacaaaatcggcttggtgggtgaagcgcaatggcgcatgttcaacgaaaaacgcgaagccgtcgaacgcgaaatccaacgtttgaaaacaacgtggtacacgccgcaaaaactcgccgaagacgaacaaatccgcgtgttcgggcaaaagctcagccgcgaagccaacctgcacgatttgttacgccgcccgaacctcgactacgccgcactgatgacgctcgaaggcgcgatgccgtctgaaaacctctctgccgaagtcatcgagcaagtcgaaatccaagtcaaataccaaggctatatcgaccgccaaaacgaagaaatcgacagccgccgcgacatcgaaaccttaaaactgcccgacggcatcgattacggcagagtcaaaggcttgtcggcagaagtgcaacaaaagctcaaccagcacaaacccgaaaccgtcgggcaggcaagccgcatttccggcgttacgcctgccgccgtcgcactgctgatggtgcatttgaagcgcgggtttaaagacgcgaaa

SEQ ID NO: 28988 - DNA, 837 bp, Neisseria gonorrhoeae
atgaccgccccgcctttatggaatatgactatgcacgccctcccccgctacgccgttttcggcaaccccgccgcccacagcaaatcgccgcagattcatcagcaatttgcccttcaggaaggcgttgacatcgaatacggacgcatttgcgccgacatcggcggtttcgcgcaggcggtttcgacattttttgaaacaggcggttgcggggcaaacgttaccgtaccgttcaaacaggaagcgtttcatctggcggacgaacattccgaccgcgctttggctgccggtgcggtcaatacgctggtgtggttggaagacggcagaatacgcggcgacaataccgacggtatcggtttggccaacgacatcacgcaggtcaaaaacattgccatcgagggcaaaaccatcttgcttttgggcgcgggcggcgcggtgcgcggcgtgattccggttttgaaagaacaccgccctgcccgtatcgtcattgccaaccgtacccgcgccaaagccgaggaattggcgcggcttttcggcattgaagccgtcccgatggcggatgtgaacggcggtttcgatatcatcatcaacggcacgtccggcggcttgagcggtcagcttcctgccgtcagccctaaaattttccgcgactgccgccttgcctacgatatggtttacggcgaagcggcaaaaccgtttttagattttgcacgacaatcgggtgcgaaaaaaactgccgacggactgggtatgctagtcggtcaggcggcggcttcctacgccctctggcgcggtttcaaaccggacatccgccccgtcatcgaacacatgaaagccctg

SEQ ID NO: 28989 - DNA, 582 bp, Neisseria gonorrhoeae
atgcacatactgaccgccggcgtggacgaggcaggacgcggacctttggtcggcagcgtgtttgccgccgccgtcatccttccggaaacattcgacctgcccggactgaccgactccaaaaaactcagcgagaaaaaacgcgacgcgcttgccgaaatgattaaagaacaggcggtcgcgtggcacgtcgccgcctccacgcccgaagaaatcgcaagcctcaacatcctgcacgccaccatgctcgccatgaaacgtgccgtttacggtttggctgcgcgtcccgaaaaaatattcatcgacggcaaccgcattcccgaacatttaggcatccctgccgaagcagtcgtcaaaggcgacagcaaaatcatcgaaatctccgccgcatccgttttggcaaagaccgcacgcgatgcggaaatgtacgcactggcgcaacgccgtccccaatacggtttcgacaaacacaaaggttacggcacaaagcagcatctggaagccctcaaacaatacggcgtgctgcccgaacaccgccgcgacttcgcccccgtcagaaacctgctcgcgcagcaggccttgttt

SEQ ID NO: 28990 - DNA, 699 bp, Neisseria gonorrhoeae
atgttccgcatcgtcaaatggctgattgccctgcccgtcggcatctttatctttttcaatgcctatgtgtacggcaacatcatcacctaccgcgccgtcgcgccccatcggactgcctttatgtcgatgcggatgaagcagtttgaacaagaaggtcgcgatgtcgcactggattaccgctgggtgccctacaaccgcatttccaccaacctgaaaaaagccctgattgcttccgaagatgtccgttttgccggacacggcggcttcgattgggacggcattcaaaacgccatcaggcgcaaccggaacagcggcgaagtgaaggcgggcggatcgaccatcagccagcagcttgccaaaaacctcttcctcaacgaaagccgcaactatctgcgcaaaggggaagaggcggccattacggcaatgatggaagctgttaccgacaaaaacaggattttcgaactgtatttaaactcaatcgaatggcactacggcgttttcggcgcggaagctgcgtcccggtatttttataaaaaaccggccgcagacctgaccaaacagcaggcggcgaaactgacggcactcgtccccgccccgctctactacgctgaccatccgaaaagcaaacggctgcgcaacaaaaccaatatcgtgctcagacgcatgggttcggcagaattacccgaaagcgatacggac

SEQ ID NO: 28991 - DNA, 1101 bp, Neisseria gonorrhoeae
atggaagccgaagtaatcaaccagctcaacaacaccctgaatgatttggagaagcgtagcgaagacatccgcgtttatatggattatcagggcaagaaagaccgattggaagaagtcatcgggctttccgaagaccccgagctttggaacgacccgaaacgtgcccaagaaatcggcaaagagagcaaaatccttgaaggcatcgtgctgacgctcgacaacatcgcttcgggtatcgaagacaaccgtatgctgattgaaatggccgtcgaagaaaacgacgaagaaggttttgccgccgtgaaggaagacgtggcggggctggaaaaacagatggcggatttggagttcaaacggatgttcaaccagcccgccgacccgaacaactgctttatcgacatcaccgccggcgcgggcggtaccgaagcggaagactgggcggggatgctgttccgtatgtacagccgctatgccgagcgcaaaggcttcaaaatcgaaatccttgaggaagacgacggcgaaatcgcaggcatcaaccgcgccaccatccgagtggaaggcgaatacgcttatggtttgctgcgtaccgaaaccggcgttcaccgtctggtgcgctactcgccgtttgattcgaacaacaaacgccatacctcgtttgcctccgtgttcgtttaccctgaaatcgacgattccatcgaaatcgaaatcaaccccgccgatttgcgcatcgacacctatcgcgcatcgggtgcgggcggtcagcacatcaacaaaaccgactccgccgtgcgtattacccacgagccgacggggattgtggtgcaatgtcaaaacgaccgttctcaacacgccaacaaagccgccgcgatggaaatgttgaaatccaaactgtatgaattggaaatgcgcaaacgcaacgaagagaaacaggcattggaagaaggtaaatccgatgtgggttggggcagccaaatccgttcgtatgttttggattcctcacgcatcaaagacttgcgtacaggctacgaagtcggcaacaccaaagccgtattggacggcgacttggacggctttatcgaagccagcctgaaacagggtgtg

SEQ ID NO: 28992 - DNA, 771 bp, Neisseria gonorrhoeae
atgagtgcgaacatccttgccatcgccaatcagaagggcggtgtgggcaaaacgacgacgacggtaaatttggcggcttcgctggcatcgcgcggcaaacgcgtgctggtggtcgatttggatccgcagggcaatgcgacgacgggcagcggcatcgacaaggcgggtttgcagtccggcgtttatcaggtcttattgggcgatgcggacgtgcagtcggcggcggtacgcagcaaagagggcggatacggcgtgttgggtgcgaaccgcgcgcttgccggcgcggaaatcgagctggtgcaggaaatcgcccgggaagtgcgtttgaaaaacgcgctcaaggcagtggcggaagattacgactttatcctgatcgactgtccgccttcgctgacgctgttgacgcttaacggcttggtggcggcgggcggcgtgattgtgccgatgttgtgcgaatattacgcgctggaagggatttccgatttgattgcgaccgtgcgcaaaatccgtcaggcggtcaatcccgatttggacatcacgggcatcgtgcgtacgatgtacgacagccgcagcaggctggttgccgaagtcagcgaacagttgcgcagccatttcggggatttgctttttgaaaccgccatcccgcgcaatatccgccttgcggaagcgccgagccacggtatgccggtgatggcttacgacgcgcaggcaaagggtgccaaggcgtatcttgccttggcggacgaactggcggcgagggtgtcggggaaa

SEQ ID NO: 28993 - DNA, 621 bp, Neisseria gonorrhoeae
atggaacgtaaagaacgcctgcgtgcaggcattgccgcgatggggccggatatttcggaaacggcgcaggacaggcttttggcctatgtggatttgttgaaaaagtggaacaaaacctacaatctgaccgccctgcgcgacgaggaaaaaatgattgtccatcatcttttggacagcctgacgctgctgccctatatcgaaggcgcacagacgatgctggatgtcggttcgggcggcggccagcccggcattccggcggcggtgtgccgtccggatgtgcagataaccttgttggatgcgaatacgaagaaaacggcttttttgcggcaggcggctatcgagttggggttggacaatgtgcgcgtggtgtcggggcgcgtggaggcggtttcggacgtgcgtgccgacgtggttaccagccgtgcgtttgcggaactggcggattttgtgtcgtggacggcgcacctgttgaaagacggcggctactgggcggcgatgaagggcgtatatccgcagggggaaatcggccgcctgccgcaggatgtgtgcgtcgaaaaagtccaaaggctcgacgtgccgggcttggatgcggaacgccatatcgtcatcctgagcaagcgt

SEQ ID NO: 28994 - DNA, 1227 bp, Neisseria gonorrhoeae
atgtcgggggttcgattcccttctccggcaccaataccaagcacagaccctccctcgggaagcctgtgctttttcacatttccgcttcagacggcatccgatatgaactcctcgcaacgcaaacgcctttccggccgctggctcaactcctacgaacgctaccgccaccgccgcctcatacatgccgtgcggctcggcggaaccgtcctgttcgccaccgcactcgcccggctactccacctccaacacggcgaatggatagggatgaccgtcttcgtcgtcctcggcatgctccagttccaaggcgcgatttactccaaggcggtggaacgtatgctcggtacggtcatcgggctgggcgcgggtttgggcgttttatggctgaaccagcattatttccacggcaacctcctcttctacctgaccatcggcacggcaagcgcactggccggctgggcggcggtcggcaaaaacggctacgtccctatgctggcggggctgacgatgtgcatgctcatcggcgacaacggcagcgaatggctcgacagcggcctgatgcgcgcgatgaacgtcctcatcggcgccgccatcgccattgccgccgccaaactgctgccgctgaaatccacactgatgtggcgtttcatgcttgccgacaacctggccgactgcagcaaaatgattgccgaaatcagcaacggcaggcgtatgacgcgcgaacgtttggagcagaatatggtcaaaatgcgccaaatcaacgcacgcatggtcaaaagccgcagccacctcgccgccacatcgggcgaaagccgcatcagcccctccatgatggaagccatgcagcacgcccaccgcaaaatcgtcaacaccaccgagctgctcctgaccaccgccgccaagctgcaatctcccaaactcaacggcagcgaaatccggctgctcgaccgccacttcacactgctccaaaccgacctgcaacaaaccgccgccctcatcaacggcagacacgcccgccgcatccgcatcgacaccgccatcaaccccgaactggaagccctcgccgaacacctccactaccaatggcagggcttcctctggctcagcaccaatatgcgtcaggaaatttccgccctcgtcatcctgctgcaacgcacccgccgcaaatggctggatgcccacgaacgccaacacctgcgccaaagcctgcttgaaacacgggaacacggc

SEQ ID NO: 28995 - DNA, 987 bp, Neisseria gonorrhoeae
atggatatgaatttaagtattgtcgttcctatttataatgtcgaaagttatttggaagcgtgtttaaattctatagaacctatattaagtaatgaaaatgtcgaacttattcttgtgaatgacgggtcaaaagacggaagtgaagatatatgttataaatatatagataaaatatcaaacaccaaacaccaaacaccaaacaccaaatatatatatcaggataaccaaggattgtcggaggcgagaaataccggaataaaaaattcaaatggaaaatatatagcatttattgattcggatgattttattaattgtcaggttttgctggattttcttggtaaagatgatagtgatatgccggatgtggtttttttaaatgcagttaaatatgataagggaagagtttcatattttggcgaagattatcagcctgaaaaaatattaaatcaatccaaagtcgaagttttgaaaggattgtgccgatttagaaaatttccgggttcggcgtggaataagattataaaaagagaattgattattagagaaaaactgttttttgaaaagggaatttattctgaagatattgaatggtcaatgaggttatttaatgcggcaacaactttttcttatttggacggttgttattactattatcggcagggaagaaaagattctattacgggaactgtttcggaaaaaggtataaagtcattattatatattttggaaaaaaatgcgaaaatggaatttaatagggatatatcgagttatctttattcttttctttcctacgaatatctcgttttgctttttataatgacgagtaaaaatatagcgtgtgattctgatataaaaagaagggcatatcatttaaggtttatgctgttaaagtccaataagctgatatataagctgatattcccgataatcacattattcggggtcgatattacaggcaggattttaaaagcaatcagggggaatatt

SEQ ID NO: 28996 - DNA, 1053 bp, Neisseria gonorrhoeae
atgactattttatcggacgttaaagcattaggacaacaaatctggctggacaacctttcccgctcgctcgtgcaaagcggcgaattggcgcaaatgctcaaacaaggcgtgtgcggcgtaacttccaatcccgccattttccaaaaagccttcgccggcgacgcgctttatgccgacgaggtcgccgccctcaagcggcaaaacctcagccccaaacaacgctacgaaaccatggcggttgccgacgtacgggcagcctgcgacgtttgccttgccgaacacgaatccaccggcggcaaaaccggtttcgtcagtctcgaagtttctcccgaacttgccaaagacgctcaaggcacggtagaagaagcccgccgcctccatgccgccatcgcgcgtaaaaacgccatgattaaagtgcctgccaccgacgcaggcatcgatgcgctcgaaaccctcgtttcagacggcatcagcgtgaacctgaccctgctgttctcacgcgcccaaaccctcaaagcctacgccgcctacgcgcgcggcattgccaaacgcttggcagccggacaaagcgttgcccatatccaagttgtcgccagcttcttcatctcgcgcgtggacagtgcgctggatgcaacgctgcccgaccggctcaaaggcaaaaccgccatcgcccttgccaaagccgcctatcaagattgggaacaatatttcaccgcccccgaatttgccgcactggaagcccaaggcgcaaaccgcgtgcagcttttatgggcatctaccggcgtgaaaaacccagcctatcccgacacgctctacgttgacagcctgatcggcgtgcacaccgtcaacaccgtccccgatgccacgctcaaagcctttatcgaccacggcacggcgaaagcgacgctgaccgaaagcgcggacgaagcacgggcgcggctcgccgaaattgccgcgctcggcatcgatgtcgaaaccttggcggcgcgtttgcaggaagacggtttgaaacagtttgaagaagcctttgaaaaactgctcgcgcctttggtt

SEQ ID NO: 28997 - DNA, 1593 bp, Neisseria gonorrhoeae
atgtcccaagaaatcctcgaccaagtgcgccgccgccgcacgtttgccatcatctcccaccccgatgcgggtaaaaccacgctgaccgaaaaactgctgctgttttcgggcgcgattcaaagcgcaggcacggtgaaaggtaagaaaaccggcaaattcgccacctccgactggatggacatcgagaagcagcgcggcatttccgtggcatcaagcgtgatgcagttcgactacaaagaccacaccgtcaacctcttggacacgccgggacaccaagacttctccgaagacacctaccgcgttttaaccgcagtggacagcgccttgatggtcatcgacgcggcaaaaggcgtggaagcgcaaaccatcaaactcttgaacgtctgccgcctgcgcgatacgccgattgttaccttcatgaacaaatacgaccgcgaagtgcgcgattctttggaactcttggacgaagtggaagacatcctgcaaatccgctgcgcgcccgttacctggccgatcggtatgggcaaaaacttcaagggcgtgtaccacatcctgaacgacgaaatctatctctttgaagcgggcggcgaacgcctgccgcacgagttcgacatcatcaaaggcataaacaatcccgaattggaacaacgctttccgttggaaatccagcagttgcgcgacgaaatcgaattggtgcaggcggcttccaacgaatttaatctcgacgaatttctcgccggcgaactcacgccagtgttcttcggctctgcgattaacaacttcggcattcaggaaatcctcaattcattgattgactgggcacccgcaccgaaaccgcgcgacgcgaccatgcgcatggtcgggccggacgagccgaaattttccggatttatctttaaaatccaagccaatatggacccgaaacaccgcgaccgtatcgccttcttgcgcgtctgctccggtaaattcgagcgcggcatgaagatgaaacacctgcgtatcaaccgcgaaatcgccgcctccagcgtagtaaccttcatgtcgcacgaccgcgaactggcggaagaagcctacgccggcgacatcatcggcatcccgaaccacggcaacatccaaatcggcgacagcttctccgaaggcgaacaactggcgtttaccggcatcccattcttcgcgcccgaactgttccgcagcgtccgcatcaaaaacccgctgaaaatcaaacaactgcaaaaaggtttgcaacaactcggcgaagaaggtgcggttcaagtattcaaaccgatgagcggcgcggatttgattttgggtgcggtcggcgtgttgcagtttgaagtcgtaacctcacgcctcgccaacgaatacggcgtggaagccgtgttcgacagcgcatccatctggtcggcgcgctgggtatcgtgcgacgacaagaaaaaactggcggaatttgaaaaagccaacgcaggcaacctcgccatcgacgcaggcggcaacctcgcctacctcgcccccaaccgcgtgaatttggggttgacgcaagaacgctggccggacatcgtgttccacgaaacgcgcgaacattcggtcaaactc

SEQ ID NO: 28998 - DNA, 1500 bp, Neisseria gonorrhoeae
atggcaaaagtactcgtcgtacccgtatctgccggactgaacacctccgccgccgcacaagcctttgcaaaagcactggacgcacaagttttccaagccgttgacgcaaccgccgaaaccctgctcgcgcaaggcaaaagcgacgactggttcgacgcactggtcggcaaagttgccgcactcgatgccgccaacctcgtcatcgaaggcatcgcgcccgatgccgacaaaatctatctcgcaggcaaaaacgtcgaactggcattgtcccttgacgcggcagccgtcttcgccgtccgttccgacaataccgatgccgacgcgctggcacaccaattgaaccttgccaaacagttcttcgccgccgcgccgggcgtattggaaggttttgtcgtggacggtgcggcagcctccgttgccgaagcggcagccgagaaaaccggcctgaccttcttcggttcgagcgacgcgctgaaagacgtatccgtattggcaggccgcgaagcaaaacgcctgtcgccggcgcaattccgctacaacctgatcgacttcgcccgccaagccggcaaacgcatcgtcctgcctgaaggcgcagaaccccgcaccgtccaagccgccgccatctgccacgaaaaaggcattgcccgctgcgtcctgcttgccaaacgcgaagaagtcgaagccgttgccaaagaacgcggcatcagcctgcccgactctttggaaatcatcgatcccgcctcattggtcgaacaatacgtcgagccgatgtgcgaactgcgcaaatccaaaggcctgacacccgaagacgcgcgcaagcaactgcaagacaccgtggtactcggtacgatgatgatggcgcaaaatgatgtggacggtttggtatccggtgcggttcacaccaccgccaacaccatccgccccgctttgcaactgattaaaaccgcaccgggcgcaagcctcgtatccagcgtattctttatgctgctaccaaatcaggttctggtgttcggcgactgcgcggttaatccgaacccgaccgcgcaacagcttgccgacatcgccatccagtctgccgattccgcaaaagccttcggcatcgacccgaaagtggcgatgatttcctactccaccgtcaactccggcagcggccccgatgtcgataccgtcatcgaagccaccaaacttgcccgggaaaaacgccccgacctcgccatcgacggcccgctgcaatatgacgcggcaaccgtgccgggcgtaggcaaatccaaagccccgggcagcccggtggcaggacaggcaaccgttttggtcttccccgacctgaacaccggcaactgcacctataaagccgtccaacgcagtgccaacgtcttgagcgtcggcccgctgctgcaaggcctgcgcaaaccggtcaacgacctgtctcgcggcgcgctggtggaagacatcgtgttcaccatcgccctgactgccgttcaggcaaaacaaatggaaggc

SEQ ID NO: 28999 - DNA, 4167 bp, Neisseria gonorrhoeae
atgaccgataccacaccgacagataccgatccgaccgaaaacggcacgcgcaaaatgccgtctgaacaccgccccgccccgccggcaaaaaaacgccgcccgctgctgaagctgtcggcggcactgctgtctgtcctgattttggcagtatgtttcctcggctggatcgccggtacggaagcaggtttgcgcttcgggctgtaccaaatcccgtcctggttcggcgtaaacatttcctcccaaaacctcaaaggcacactgctcgacggcttcgacggcgacaactggtcgatagaaaccgagggggcagaccttaaaatcagccgcttccgcttcgcgtggaaaccgtccgaactgatgcgccgcagcctgcacatcaccgacatctccgccggcgacatcgccatcgtaaccaaaccgactccgcctaaagaagaacgcccgcctcaaggcctgcccgacagcatagacctgcccgccgccgtctatctcgaccgcttcgagacgggcaaaatcagcatgggcaaaacctttgacaaacaaaccgtctatctcgaacgcctcaacgcggcataccgttacgaccgtaaagggcaccgcctcgacctgaaggccgccgacacgccgtggagcagttcgtcggggtcagcctcggtcggcttgaaaaaaccgtttgccctcgataccgccatttacaccaaaggcggattcgaaggcgaaaccatacacagtacggcgcggctgagcggcagcctgaaggatgtgcgcgccgaactgacgatcgacggcggcaatatccgcctctcgggaaaatccgtcatccacccgtttgccgaatcattggataaaacattggaagaagtactggtcaaaggattcaacatcaatccgtccgccttcgtgccttccctgcccgatgccgggctgaatttcgacctgaccgccatcccgtcgttttcagacggcatcgcgctggaaggctcgctcgatttggaaaacaccaaagccggctttgccgaccgcaacggcatccccgtccgtcaggttttgggcggctttgtcatccggcaggacggcacggtgcatatcggcaatacgtccgccgccctgctcggacggggcggcatcaggctgtcgggcaaaatcgacaccgaaaaagacatccttgatttaaatataggcatcaactccgtcggcgcggaagacgtgctgcaaaccgcgttcaaaggcaggttggacggcagcatcggcatcggcggcacgaccgcctcgcccaaaatctcttggcaactcggcaccggcacggcacgcacggacggcagcctcgccatcgcaagcgaccccgcaaacgaacagcggaaactggtgttcgacaccgtcaacatctccgccggggaaggcagcctgaccgcgcaaggctatctcgagctgtttaaagaccgcctgctcaagctggacatccgttcccgcgcattcgacccttcgcgcatcgatccgcaatttccggcaggcaatatcaacggttcgattcatcttgccggtgaactggcaaaagagaaatttacgggcaaaatgcgttttttgcccggtacgttcaacggcgtgccgattgccggcagcgccgacattgtttacgagtcccgccaccttccgcgcgccgccgtcgatttgcggttggggcggaacatcgtcaaaacagacggcggcttcggcaaaaaaggcgaccggcttaacctcaatatcaccgcacccgatttatcccgtttcggtttcggactcgcggggtctttaaatgtacgcggacacctttccggcgatttggacggcggcatccgaacctttgaaaccgacctttccggcacggcgcgcaacttacacatcggcaaagcggcagacatccgttcgctcgattttaccctcaaaggctcacccggcacaagccgcccgatgcgcgccgatatcaagggcggccgcctttccctgtcgggcggcgcggcggttgtcgataccgccggcctgacgctggaaggtacgggcgcgcagcaccgcatccgcacacacgccgccatgacgctggacggcaaaccgttcaaactcgatttggacgcttcaggcggcatcaacagggaacttacccgatggaaaggcagcatcggcatcctcgacatcggcggcgcattcaacctcaagctgcaaaaccgtatgacgctcgaagccggtgcggaacacgtggcggcaagtgcggcaaattggcaggcaatgggcggcagcctcaacctgcaacacttttcttgggacaggaaaaccggcatatcggcaaaaggcggcgcacgcggcctgcacatcgccgagttgcacaatttcttcaaaccgcccttcgaacacaatctggttttaaacggcgactgggatgtcgcctacgggcacaacgcgcgcggctacctcaatatcagccggcaaagcggcgatgccgtattgcccggcgggcaggctttgggtttgaacgcattttccctgaaaacgcgctttcaaaacgaccgcatcggaatcctgcttgacggcggcgcgcgtttcggacggattaacgccgatttgggcatcggcaacgccttcggcggcaatatggcaaatacaccgctcggcggcaggattacagcctcccttcccgacttgggcgcattgaagccctttctgcccgccgccgcgcaaaacattaccggcagcctgaatgcctccgcgcaaatcggcggacgggtaggctctccgtccgtcaatgccgccgtcaacggtagcagcaactacgggaaaatcaacggcaatatcaccgtcgggcaaagccgctccttcgataccgcacctttgggcggcaggctcaacctgaccgttgccgatgccgaagcattccgcaacttcctaccggtcggacaaaccgtcaaaggcagcctgaatgccgccgtaaccctcggcggcagcatcgccgacccgcacttgggcggcagtatcaacggcgacaagctctattaccgcaaccaaacccaaggcatcatcttggacaacggctcgctgcgttcgcatattgcaggcaggaaatgggtaatcgacagcctgaaattccggcacgaagggacggcggaactctccggcacggtcagcatggaaaacagcgtgcccgatgtcgatatcggcgcggtgttcgacaaataccgcatcctgtcccgccccaaccgccgcctgacggtttccggcaacacccgcctgcgctattcgccgcaaaaaggcatatccgttaccggtatgattaaaactgatcaggggctgttcggttcgcaaaaatcctcgatgccgtccgtcggcgacgatgtcgtcgtattgggcgaagtcaagaaagaggcggcggcatcgctccccgtcaatatgaacctgactttagacctcaatgacggcatccgcttctccggctacggcgcggacgttaccataggcggcaaactgaccctgaccgcgcaaccgggcggaaatgtgcgtggggtgggcacggtccgcgtcatcaaagggcgttacaaagcatacgggcaggatttagacattaccaaaggcacagtctcctttgtcggcccgctcaacgaccccaacctgaacatccgcgccgaacgccgcctttcccccgtcggtgcgggcgtggaaatattgggcagcctcaacagcccgcgcattacgctgacggcaaacgaaccgatgagtgaaaaagacaagctctcctggctcatcctcaaccgtgccggcagcggcagcagcggcgacaatgccgccctgtccgcagccgcaggcgcgctgcttgccgggcaaatcaacgaccgcatcgggctggtggatgatttgggctttaccagcaagcgcagccgcaacgcgcaaaccggcgaactcaaccccgccgaacaggtgctgaccgtcggcaaacaactgaccggcaaactctacatcggctacgaatacggcatctccagcgcggaacagtccgtcaaactgatttaccggctgacccgcgccatacaggcggttgcccgtatcggcagccgttcgtcgggcggcgagctgacatacaccatacgtttcgaccgcctcttcggttcggacaaaaaagactccgcaggaaacggcaaagggaaa

SEQ ID NO: 29000 - DNA, 555 bp, Neisseria gonorrhoeae
atgatcaacgatattcaaaaaacagccgaaggcaagatgcagcgttcggtcgaagtactgaaagaaaatctggcgaaagtgcgtaccggccgcgcgcataccggcctgctcgaccaagtggaagtcgaatactggggcagcatggtccccgtcagccaggttgccaacgtaacccttttggacgcgcgcaccatcggcgtgaaaccgtttgagggcaatatggcggccaaagtcgagaaagccatccgcgattcaaacttgggactgaacccggcagctgtcggcgatttgatccgcgtgccgatgcccatgctgaccgaggaacgccgcaaagacctgattaaagtcgtgcgcggcgaggcggaagaaggacgcgtctctatccgcaacgtgcgccgcgatgccaacgaccacatcaaaaaactcctcaaagacaaagaaatttccgaagacgaggcacgtcgcggcgaagaggcggttcaaaaactgaccgacaagtacattgccgaagccgataaggttttggctgccaaagaagaagacctgatggcggtt

SEQ ID NO: 29001 - DNA, 744 bp, Neisseria gonorrhoeae
atgaagagcagcacgcagaccattttggaacacaccgccatcccgaggcacatcgccgtaattatggacggcaacggccgttgggcgaaaaaacgttttctcccgcgtataatgggacacaaacgcggcttggacgcgttggaaaatatggtgaagcattgcgccaaactgggcgtgcaatatctgaccgtgtttgccttttcaaccgaaaactggcgtcgccccgaagacgaagtttcgttcctgatggggctgtttttacaggctttgcaaaaacaggtacgccgcctgcacgaaaacaatatgcgcctgaaaatattgggcagccgcgaacgctttaatcggcagattctgcaaggtatcgaagaggcggaagccttgacggcaaataataccggtctgaccctgagcattgctgcggattacggcggccgctgggatattttgcaggcggcaaacaaactgattgccgaaggcgtatccgagattacggaagacacgctggccaaacacttgatgctgggcgacgcgccggaaccggatttgttcatccgcacgggcggagaaacgcgcatcagcaatttcctgctctggcagatggcgtatgcagaactgtatttcaccgacatcctgtggcccgatttcgacgaaaccgccttagatgccgccgtcgcttcgttccaaaaacgcgaacggcggttcggacgcacttccgagcaactgcctatcggacagcaaaggaac

SEQ ID NO: 29002 - DNA, 795 bp, Neisseria gonorrhoeae
atgctgaaacaacgggtaataaccgctatgtggctgctgccgctgatgctgggcatgctgttttacgcgccgcaatggctgtgggctgcattttgcgggctgattgccctgaccgccttgtgggagtatgcccgtatggccggtttgtgcaaaaccgaaaccaaccattacctcgccgcaaccttggttttcggcgtagttgcctatgcgggcggctggatgctgcctaatttggtttggtatgttgttttggcattttggctcgccgttatgcctttgtggttgagattcaaatggaggctcaacggcggttggcaggtttatgccgtcggctggcttttgctcatgccgttttggttcgcgctcgtatccctgcgcccgcatcccgatgatgccctgccgctgctcgccgtgatgggtttggtctgggttgccgacgtttgcgcgtatttcagcggcaaggcgctcggcaaacacaaaatcgcaccggcaatcagccccggcaagagctgggaaggcgcaatcggcggtgcggtttgcgtggcagtgtacatgactgccgtacgaagtgccggctggctggcattcgatacaggctggttcgataccgtgttaatcggtttggtgttgaccgttgtcagcgtatgcggcgacctgttggaaagctggctcaagcgcgcggcaggcatcaaagacagcagcaacctgctgcccggacacggcggcgtgttcgaccgtaccgacagcctgattgccgttatcagcgtctatgcggcgataatgtcggttttaaat

SEQ ID NO: 29003 - DNA, 1041 bp, Neisseria gonorrhoeae
atgattccggccacctgcaccctgtcccaaatcaccgcgcggctcggcggcgaatggcgcggcgaggacatttccgttaccgccgtgcgcccgctcgcagacgcgcaggcggaacacatcagcttcctcgccaatccgaaatacaaagccgaagtccacgacagcagcgcgggcgcgatcatcgtttccgccaaagcagcagacggatttgaagggcgcaacctgattgtcgccgacgatccctatctctatttcgccaaagtcgcgcgcctgttttcacccgtcgtcaaagcgcgcggcggcatccatccgaccgccgtcgtcgaaccgggcgcgaccgttcccgcaagctgtgaaatcggcgcgaacgcctacatcggcgcgaacaccgtgctcggcgaaggctgccgcatcttggcaaacgccgtcgtccaacacgattgcaaactgggcgacgaagtcgtcctgcatcccaacgccgtcgtttattacggctgcacactcggcagacacgtcgaaatccacagcggcgcggtcatcggcgcggacggtttcggactcgccttcgccggcgattcgtggttcaaaatcccgcaaaccggcgcggtaacgctgggcgacgacgtagaaatcggctcgaacaccaacatcgaccgcggcgcgatgagcgacaccaccgtcggcaacggcaccaaaatcgacaaccaagtccaaatcggacacaactgcaaaatcggttcgcacaccgtcatcgccgccaaaaccggcatctcaggcagcgtaaccataggcagctactgcatcatcggcggcggcgtcggtacggtcggacacatcgaaatcgccgacaaaaccaccatcggcggcggcacgtccgttacccacagcattaccgaaagcggcaaacaccttgccggcatcttcccgatgtccgagcataaagaatgggcgcgcaacgccgtttacatccaccgcttaagcgaaatgaacaaacgcctcaaaacgctggaacagcagctttcagacagcaaagacacgcaa

SEQ ID NO: 29004 - DNA, 1374 bp, Neisseria gonorrhoeae
atgcacgacaaaacctggtccggacgtttcaacgaacccgtttccgaactcgtcaaacaatacaccgcctccatcggtttcgaccaacgccttgccgaatgggacatccaaggctcgctcgcccacgcgcagatgctgacccggtcgggtgtgctgagtgaaaacgatctgaccgacatccgtcggggcatgtcggaaatcctcgaagaaatccgcagcggcaaaatcgaatggccgctcgatttggaagatgtccacatgaacatcgaacgccgcctgaccgacaaaatcggcgacgcgggcaaacgcctgcacaccggccgcagccgcaacgaccaagtcgccaccgacatccgcctttggctgcgcgaccagattaccgttatccaaaacctgattcaaaaccttcagacggcattattggatttggcggaacaaaacgccgaagccgtcatgcccggttttacccatctgcaagtcgcccagccggtcagcttcggacaccacatgctcgcctacgtcgaaatgctcggacgcgatttcgaacgcatgaccgactgtcgcaaacgcgtcaaccgtatgccgctcggcgctgccgcccttgccggtacgacctatccgattcagcgcgaaatcaccgccgaattgttgggtttcgaacaaatctgccagaactcgctcgatgccgtatccgaccgcgattttgccattgagttcaccgccgccgcctcgctggttatggttcacttgagccgcctgtctgaagaattgattttgtggatgagtccgcgtttcggctttatcgacatcgccgaccgcttctgtacgggttcgtccatcatgccgcaaaagaaaaaccccgacgtacccgaactcgtgcgcggtaaatccggccgagtcatcggacaccttatcggcctgattaccctgatgaaatcgcagcccttggcatacaacaaagacaatcaggaagacaaagaaccgctgtttgacaccgccgacacgctcatcgacacgctgcggatttacgccgatatgatgcgcggcgtaaccgtcaaacccggcaatatgcgcgccgccgtgatgcagggttttgccaccgccaccgacttggcggattatctggtcaaaaaaggtatgcccttccgcgatgcccacgaagtcgttgcccaagccgtgcgccacgccgatgaagccggcgttgatttgagcgaattgccgctcgaagccctgcaaggcttcagcaagctgatttcagacgacgtgtacggcgttctgacacccgaaggcagcctcaacgcgcgcaaccacttgggcggcaccgcgcccgaacaggtacgcctccaagtcaaacgctggcgggaaatgtcagct

SEQ ID NO: 29005 - DNA, 867 bp, Neisseria gonorrhoeae
atgaaaccgataaaaaaagccgtcttccccgttgcagggatgggaacccgcttcctgcccgccaccaaggccaacccgaaagaaatgctgcccatcgtcgacaagccgctgatccaatacgccgtagaagaagccgtggaagccggctgcacggaaatggtgtttgttaccgggcgcaacaagcgcagcatcgaagaccatttcgacaaggcatacgaactcgaaactaagttggaaatgcgccataaagacaaattgttggaacacgtccgcaacatcctgccgccgaacattacctgcctctacatccgtcaggcggaagcactgggattgggacacgccgtcttgtgcgcccgcgccgccatcggcgacgaacccttcgccgtcatccttgccgacgacttaatcgatgcgcccaaaggcgcgctcaaacaaatggtcgaagtgtacgggcgcagcggtaacagcattttgggcgtagaaaccgtcgaaccgtcgcaaaccggctcatacggcatcgtcgaaaccgaacagctcaaacagttccaacgcattaccggcattgtcgaaaaacccaagcccgaagacgcgccctccaaccttgccgttgtcggacgctacatcctcaccccgcgcattttcgaccttttaaccggcctgccgcgcggcgcgggcaacgaaatccagcttacagacggcatcgccaagctgctcgatcacgaatttgtcttggcgcacccctttgaaggcacgcgctacgactgcggcagcaaactcggctatctcgaagccaccgtcgcctacggtttaaaacaccccgaaaccggcgaacccttccgccgccttttggaaaaataccgcaccgaa

SEQ ID NO: 29006 - DNA, 597 bp, Neisseria gonorrhoeae
atgtctgaaaaaccggaaaaaatcgttttggcaagcggcaatgccggcaagctcaaagaattcggcaacttattcaaaccttacggcatcaccgtattgccgcaatccgcattcggcatacccgaatgccccgaaccctatcccacctttgtcgaaaacgcgctggcaaaagcccggcacgccgccggacacagcgggctgcccgcactcgccgacgacagcggcatctgtgccgccgccctaaacggcgcgccgggcatccattccgcacgttacgccggcagcaatcccaaatccgataccgccaacaacctgaaacttgccgccgaacttgccggcaaggccgacaaaagttgttcttatgtctgcgtattggtttttgtccgtcataaagacgacccgcgcccgattatcgccgagggcatatggcacggacaatggcacgacacgccgctcgggcaaaacggtttcggttacgacccgtatttttatctgcccgaacacggcaaaaccgccgccgaattggattcggaggtcaaaaaccgcgaaagccaccgcgcgcaggcactcgccgatttaatccgcaaactcgccctt

SEQ ID NO: 29007 - DNA, 447 bp, Neisseria gonorrhoeae
atggacgtacaactccccatcgaagccaaagacatccaaaaactcatcccccaccgctacccgtttctccagctcgaccgcattaccgccttcgagccgatgaaaaccctgaccgccatcaaaaacgtaaccataaacgaaccccaattccaaggccatttccccgacctgcccgttatgcccggcgtactcatcatcgaagcgatggcgcaggcgtgcggcacgttggcgattttgagcgaaggcgggcgcaaggaaaacgaatttttcttcttcgccggcatagacgaagcccgtttcaaacgccaagtcatccccggcgaccaactcgtctttgaagtcgaactcctgaccagccggcgcggcatcggcaaattcaacgccgttgccaaagtggacggacaagtcgccgtcgaagccgtgattatgtgcgccaaacgcgtggtt

SEQ ID NO: 29008 - DNA, 2830 bp, Neisseria gonorrhoeae
ttagacaaatactcccccgccgaaatcgaatccaaacactatcaaaactgggaaagccaaggctatttccggcccgatatggatttgaccaaaccgtctttttccatccaactgccgccgcccaacgtaaccggcacgctgcacatgggtcatgccttcaaccaaaccatcatggacggcctgacccgctactaccgcatgaaaggctgcaacaccgcctggattcccggtaccgaccacgcgggcatcgccacgcaaatcgtggtcgagcgtcagcttgccgcgcaaaacgtgtcccgtcacgacttggggcgcgaaaaattcttggaaaaagtgtgggagtggaaagaagtttccggcggcacgattacccagcagatgcgccgcgtgggctgctccgccgactggacgcgcgagtatttcacgatggacggcgtacgcgccgaaaccgtgaccgaagtgttcgtgcgcctgtatgaacagggcttgatttaccgcggcaaacgcttggtgaactgggatcccgtgcttggcacggcggtgtcggatttggaagtggaaagcatggaagaacaaggctctatgtggcacatccgctatccgctggccgacaatcccaccgaagccgttatcgtggcgaccacccgtcctgaaacgttgctgggcgacgcggccgttgccgtcaatccagaagatgaacgttacacccacttaatcggcaaagaattaatcctgccgctgaccggtcgcaccattccggttatcgccgacgaatacgttgaaaaagacttcggtaccggttgcgtgaaaatcacgcctgcgcacgatttcaacgattacgaagtcggcaaacgccacgacacgcgcctgattaacgtgttcgacttagaagccaaagtgctggcaaacgccgaagtgttcaacttcaaaggcgaagcgcaaccaggcttttccctgcctgaaaaatacgcaggcttggaccgctttgccgcgcgcaaacaaatggttgccgatttgcaggagcaaggcttcttggtcgaaatcaaaccgcacacgctgatgacgccgaaaggcgaccgcacaggttcagtgattgagccgatgctgaccagccaatggtttgtcgccatgtccgccacaccgaacggcggcgagcctgacaacgaattcaaaggcttgagccttgccgacaaagccaaaaaagccgtcgacagcggcgcggtgcgctttatccctgaaaactgggtcaatacctacaaccaatggatgaacaacatccaagactggtgtatttcgcgccaactgtggtgggggcatcaaatccccgcgtggtacgacgaagcaggtaatgtttacgtcgcccgcaatcaggctgaagccgaaaaacaagccggcaaaacaggtttgacccgcgaagaagacgtattggacacatggttctcctccgcgctcgtgccgttctccacgctcggctggccgtctgaaaccgacgagctcaaagccttcctgccgtccaacgtcttggttaccggctacgaaatcatcttcttctgggtggcgcgcatgattatgatgaccacccacttcaccggcaaagtaccgtttaaagccgtgtacatccacggcatcgtgcgcgaccacgaaggcaaaaaaatgtccaaatccgaaggcaacgtcatcgaccctgtggatttgatcgatggtatcggcttggacaagctgctgatgaaacgtacgaccggcctgcgcaaacccgaaaccgcgccgaaagtggaagaagccacgaaaaaactcttccccgaaggtatccccagcatgggcgcggacgcattgcgcttcaccatggcgagctacgccagcttgggcccgttcggttaacttcgacttcaaacgcgccgaaggctaccgcaacttctgcaacaaaatctggaacgccaccaacttcgtcttgatgaacaccgaaaaccaagactgcggctacggcgcaaccgctgccgaaccgcgcggccattccttccccgatatgtggatcataggtcgtctgaatcagaccatcgagcaggttacgcaagcctacgaaacctaccgctttgatttggcggcggaaaccctgtacagcttcgtatggaacgattattgcgactggtatctggaactcgccaaagtacagctccaaaccggctgcgccagccgtcagcgcgccacacgccataccttattgcgcgtactcgaagccgccctgcgcctgctgcacccgattatcccgttcatcaccgaagaactgtggcaaaccgtcgcccccatgtgcgatgccaaaaccgccgacagcatcatgctcgcccgtttccccgaaaccgacggcggcgagattgttcagacggcattcgggcaaatgaccgtgttgcaggatttgatcggcgcagtccgcaacctgcgcggcgaaacgggcatccagcccaacgtgaaagccccgctgtttgtcgaaagcgcggacgacttggcggactacctcaaatacctgccgatgatgacccgcctgaccgaagcacggcaagtcgccgccctgcccgaaagcggagacgcgcccgtcgccgtctgcaacggcgcgcgcctgatgctgaaagtcgaaatcgacaaagccgccgaaaccgcccgtttgagcaaagaagccgagaagctgcaaaaagccttggacaaactcaatgccaaactctccaaacccggctacaccgaaaaagccccggcgcatctggtggaaaaagacaaagccgatttggcggaattggaagacaaaatggcgaaagtgcaaaatcagttggcgaagttgaaa

SEQ ID NO: 29009 - DNA, 1965 bp, Neisseria gonorrhoeae
gtggggaacacctttaaatcaatccttgtctgggtcgccttgggtatcggcctgatggctgcgttcaacgctttggacggcaaaaaagaagacaacgggcaaatcgaatattctcagttcatccgacaggtcaacaacggcgaagtatccggcgtcaacatcgaaggatccgtcgtcagcggttacctgattaaaggcgagcgcaccgacaaaagcaccttcttcaccaacgcgcccttggatgacaacctgattcaaacccttttgaacaaaaacgtccgcgtaaaagtaacgccggaagaaaaaccgagcgcgctgactgccctgttttacagcctgctgcccgtcctgctgctgattggcgcatggttctactttatgcgtatgcaggcgggcggcggcggaaaaggcggcgcattctccttcggcaaaagccgcgcccgcctgctggacaaagatgccaacaaagttacctttgccgatgtcgccggctgcgacgaagccaaagaagaagtgcaggaaatcgtcgattacctcaaagcaccgaaccgctatcaaagcctcggcggccgtgttccgcgcggcatcctgctggcgggcagcccgggaaccggtaaaacactcttggcgaaagccattgcaggcgaggccggcgtgccgttcttcagcatttccggttccgattttgtcgaaatgttcgtcggtgtcggtgcaagccgcgtccgcgatatgttcgagcaggcaaagaaaaacgccccatgcattatctttatcgacgagattgacgcggtaggccgccaacgcggcgcaggtttgggcggcggcaatgatgagcgcgagcaaacattaaaccaattattggttgaaatggacggttttgagagcaatcagactgtaattgtgattgcggcaaccaaccgccccgacgtactcgatcctgcgctgcaacgccccggccgcttcgaccgccaagtcgtcgtccccctgccggacatccgggggcgcgaacagattttgaacgtccattctaaaaaagtgcctttggacgaatctgtggatttattgtccctcgcgcgcggcacgcccggtttttccggcgcggatttggcgaacctggtcaacgaagccgccctgtttgccggccgccgcaacaaagtcaaagtcgatcaaagcgattttgaagacgccaaagacaaaatctatatgggtccggaacgccgcagtatggtgatgcacgaagacgaaaaacgtgcgacggcgtatcatgagtccggacacgcgattgttgccgaaagcctgccctttaccgaccccgtccacaaagtaaccattatgccgcgcggacgtgcgctgggtctgacttggcagcttccggagcgcgaccgcatcagtatgtataaagatcagatgttgagccagctctccatcctgttcggcggacggattgccgaagacatcttcgtcggacgcatctccaccggtgcatcaaacgactttgaacgcgcaacccaaatggcacgcgaaatggtaacgcgctacggcatgagcgacaaaatgggcgtgatggtttatgcggaaaacgaaggcgaagtcttcttggggcgcagcgtaacccgttcgcaaaacatttccgagaaaacccagcaggacatcgacgcggaaatccgccggattttggacgagcagtatcaggttgcctacaaaatcctcgatgaaaaccgcgacaagatggaaacgatgtgcaaagccctgatggaatgggaaaccatagaccgcgatcaggtactggaaattatggcgggcaaacaacccagcccgcccaaggattacagccacaacctgcgcgagaatgcggacgcggcggaagataacgcgccgcacgctccgactcgggaaaaaaccgaagcacctgccccggcagacaccgcctcgacagagtccgggcagcagcctgaaaacaaggct

SEQ ID NO: 29010 - DNA, 795 bp, Neisseria gonorrhoeae
atggataccgcacaaaaacaacgctgggcaataaccctatcctacgacggcagccgcttttacggctggcagaaacaggcgggcggcgtaccgaccgttcaggcggcattggaaaccgcactcgcccgaatcgcaggagaatctgtcgccaccacagttgccggcaggaccgacaccggcgttcatgcgactgcccaagtcgttcatttcgatactgccgccgtacgtcccgctcaggcatggatacgcggcgtaaacgcccacctgcccgaaggcatagccgttttgcacgcccgacaggtcgcacccggatttcacgcacgcttcgacgcatccggacggcactaccgctacctgctcgaatccgcccccgtccgttcccccctgctcaaaaacagggcgggctggacacacctcgagctcgacatcggaccgatgcgccgggctgccgccttattggtcggcgaacaagacttctccagcttccgcgccgccgggtgccaggcaaaatcccccgtcaaaaccatctaccgcgccgaccttacccaaagcgcgggactcgtgcgcctcgatttgcacggcaacgcctttttgcaccacatggtacgcaacatcatgggcgcgctcgtttatgtcggcagcggcaggctcagcgtcgaaggcttcgccgcactgattcaagaacgcagccgcctcaaagccccaccgacctttatgcccgacgggctttacctgaccggcgtcgactatcccggggcatacggcatcgtccgcccccaaatccccgaatggctt

SEQ ID NO: 29011 - DNA, 1014 bp, Neisseria gonorrhoeae
atgattggagggcttatgcaatttccttaccgcaatgttccggcttcgcgtatgcgccgtatgcgcagggatgatttttcacgccgcctgatgcgcgagcatatgctgaccgccgatgatttgatttatccggtgttcgtattggagggggcggcgcgcgaggaggatgtgccttctatgccgggcgtgaagcgtcagagtttggacaggctgctgtttacggcggaagaggcggtgaagctcggtattccgatgttggcactctttcccgtggttacggcaaacaaaaccgggcgtgcgcaggaggcgtacaatcccgaaggactcgtgccgtcaactgtccgagccttgcgcgagaggttttccgaactgggcattatgacggatgtcgcgctcgatccttatacggtgcacggtcaggacggactgacggacgaaaacggttacgtgatgaatgatgaaaccgtagaagtcttggtgaaacaggctttatgtcatgcagaggcgggcacgcaggtcgttgctccttccgatatgatggacgggcgtatcggcgccatccgcgaggctttggaggatgccggacatatccatacgcggattatggcatattccgccaaatatgcttctgcattctacggccctttccgtgatgcggtaggcagttcgggcaatttgggaaaggcagataaaaagacctatcagatggatcctgcaaataccgatgaggcgctgcatgaagtggcgctcgatattcaggaaggtgcggatatggtgatggtgaagcccggtttgccgtatttggacgttgtccgccgcgtgaaggacgagttcggcgtaccgacttatgcctatcaggtttcgggcgaatatgcgatgttgcaggcggcggttgccaacggctggctggacggcggcaaagtggttttggaaagcctgctggcattcaaacgtgcgggtgcggacgggattttgacctattacgccattgaggcggcaaagatgctgaagcgt

SEQ ID NO: 29012 - DNA, 771 bp, Neisseria gonorrhoeae
atgaacgccattgcagacgtgcaatccagcagagatttgcgcaacctgccgatcaatcaggtcggcattaaagacctgcgcttcccgattaccctgaaaaccgccgaaggaacacaatccacggttgctcgcctgacgatgacggtttatctgcccgccgagcagaaagggacgcatatgtcgcgctttgtcgcattgatggagcaacataccgaagtcttggatttcgcacaattgcataggctgactgccgaaatggtcgcgcttttggattcccgcgccggcaaaatcagcgtttcttttccgtttttccgcaagaaaaccgcgccggtatccggtatccggtccttactggattatgatgtcagcctcacgggtgaaatgaaagacggggcatacggccacagtatgaaggtcatgattcccgtaacctcgctttgcccgtgttccaaagaaatttcccaatatggcgcgcataatcagcgttcgcacgttaccgtcagcctgacttccgatgccgaagtcggtatcgaggaagttatcgattatgtggaaacgcaggcgagctgccaactctacggcctgctcaaacgccccgatgaaaaatacgttaccgaaaaggcctacgaaaacccgaaattcgtggaagatatggtgcgcgatgtcgctacttcgctgattgccgacaaacgcatcaagagtttcgtcgtcgagagcgagaatttcgagtctatccacaaccattcggcttatgcctatatcgcctacccg

SEQ ID NO: 29013 - DNA, 888 bp, Neisseria gonorrhoeae
atgaacagcccttttcacaacatcggtatcgtaacccgccccaacacgcccgacatccaagataccgcacacacgctgattacctttttgaagcagcacggctttaccgtctatctcgacgaagtcggcgtaagggaatgctgcatctatacccaagacaccgacggctgccatatcgtcaacaagaccgaactggggcaatactgcgacctggtcgccgtcttaggcggagacggcacctttctctctgccgcccgcgaaatcaccccccgcgccgttccgattatcggcatcaaccaaggtcatttgggctttcttacccaaattccccgcgaatatatgacggacaagctattgcccgttttagaaggaaaataccttgccgaagagcgcatcctgattgaagccgcactgatccgcgaaggcaaaaccgccgaacgcgccctcgccctcaacgatgccgtcctctcccgcggcggtgccggacagatgattgaatttgaagtcttcgtcaatcaggaattcgtctatacacaacgttcggacgggctgattgtctccacccccaccggatcgaccgcctattcgcttgccgccggcggcccaatcatgcaggcaggattacacgccttcacgctcgtccccatctgcccgcaatctatgactaaccgccccatcgccattccagacacgtccgaaatcgaaatcctcgttacccaaggcggcgacgcgcgcgttcatttcgacggacaatccttcatcgacgtgcaaaacctcgaccgcatcatcatccgccgctaccacaatcccttacgcatcctacacccgaccgactaccaatatttcaaaaccctgcgccaaaaactgcactggggcgagcaattagtc

SEQ ID NO: 29014 - DNA, 1455 bp, Neisseria gonorrhoeae
atgcacaaaatcctgcccatcgcccacgtcctctcccgcctgggtatgctgttttcctttatcctgctgatacccgccgccctctcctacgccttttcggacggtgcgtacaccgccttcgccaccaccgcgaccgttaccctttccggctcgtgcatcgtccggctcgccaccctccggttcaggcgcgaactgcgcccgcgcgacggcttcaccctcgtcctgatgttgtggctggcgtttgccgctatggctgcgatgccgatgtacctgtatttcccgaatatgggctttaccgacgcattttttgaatcgatgtcgggactgaccaccaccggcgcgaccgtcatcccccacgtcgacgggctcgccccctccgtcaacttttggcggcatatgctcaactggctgggcgggatgggcatcatcgtccttgccgtcgccatcctgcctatgctcggcgtaggcggcacgcagttattcaaagccgaaatccccggcattgacaaagaaagcaaaatgtcgccgcgcatttcccaagtggcgaaaaaactctggttcggctacaccctgatcaccatcctcgcggcagcctgcctgcattttgccgggatgggttggttcgatgccgtctgtcacgcgctggcaaccctctcgctgggcgggttttccacccacgatgccagcatcggttattacaactcccccctcatcgaagcagtcatcatcgttttcactattttcggcggcatcaattttgccagccatttcgccgccctcaacagccgcagcctcaaaacctattggaaagacgaagaatgccggacgatgctgctgctgctctccggcagcatccttgcctccgccctgtacctgtggcacaccggccattacgccggcttcggcgaatccctgcgctacaccgccttcaacttcgtctccatcggattggcaaacgggctgtccaacaccgacttcgcacaatggccgctcctgatttccctgtggatgtttttcctcgccaacatcctcgccagctccggctcgaccggcggcggcatcaaaaccatacgcgccctcgtcctgttcaaattcagcctgcgcgaaatgatggtgctgctgcaccccaaagccgtccgcaccgtcaaaatcagcggcaaagccatacccgaccgcctcgcgctgaccgttatgtccttcatcttcatctactttatgaccgtcgtcctcttcagcttcctgctgatggcgagcggtatggaatttaccaccgcctttaccgccgtcatcgcctgcattaccaacgccggccccggactgggcgaagtcgggcccgccggcaattacgccggtttggacgtgatgcagaaatggatctgcgttaccgcaatgctcttgggcaggctggaaatcttcaccgtcttcatcctcttcacccccgcctactggaagaaa

SEQ ID NO: 29015 - DNA, 366 bp, Neisseria gonorrhoeae
atgcgtcatcgtaatggcaatcgcaaattaaaccgtaccagcagtcatcgtgctgcaatgctgcgtaatatggcgaattcattattgactcacgaaactattgtaacaactctgcctaaggccaaggaattgcgccgtgtagtagagccgttgattacattgggtaaaaagccgtcattggcaagccgccgtttggcatttgaccgtactcgcgaccgtgatgttgtagtaaaactgtttggcgatttgggtcctcgttttactgctcgtaacggtggttatgttcgagtgttgaaatacggattccgtaaaggtgataatgcacctctggcactggttgaattggttgacaaaccggctgctgag

SEQ ID NO: 29016 - DNA, 984 bp, Neisseria gonorrhoeae
atgcagaatagcacaaccgaatttttgaaacctcgtcaaattgatgtaaatactttttctgcaactcgtgcaaaagtatctatgcagccatttgaacgtggtttcggtcataccttaggtaatgctttgcgccgtatcttactgtcatccatgaatggttttgctcctactgaagtagctattgccggtgtattgcacgaatattctactgttggtggtgttcaggaagatgttgttgacattttgctgaatattaaaggtattgtgtttaaactccatggtcgtagccaagttcaacttgtgttgaagaaatcaggttcaggtgtcgtatctgccggtgatattgagttgccgcatgatgtagaaattctgaatcctggtcatgtcatttgtcatttggctgataacggtcaaattgaaatggaaattaaagtagagcaaggtcgtggttatcaatctgtttcaggtcgtcaggtagttcgtgatgagaaccgtcagattggtgcaatccagttggatgcgagcttttcgcccatcagccgtgttagctttgaggttgaacctgcacgtgtagagcagcggacggatcttgataagttggttttggatatcgaaaccgacggttctattgatcctgaggaagctgtacgcagtgcggcacgtattttgattgatcagatgtctatttttgctgatttgcagggtactcctgtggaggaggttgaagaaaaatcacctcctatcgaccctgttcttttgcatccggtggatgatctggaattgacagtacgttcagctaattgtttgaaagctgaggatatttattatattggcgatttgattcaacgcactgaaaccgagcttcttaaaacgccgaatttgggacgtaaatctttgaatgagattaaggaagtattggcatctaaaggtttgacactgggttctaagttggaagcatggccacctgtaggcttggaaaagcct

SEQ ID NO: 29017 - DNA, 618 bp, Neisseria gonorrhoeae
atggcacgttatattggccctaaatgtaagttggcacgtcgcgaaggtacggatttgtttttgaagagtgcgcgccgctctttggattctaaatgtaaaattgattccgctcccggtcagcatggtgcaaaaaaaccgcgtttgtcagactatggtttgcagttgcgtgaaaaacaaaaaatccgccgtatttatggcgtattagaacgtcagttccgtcgttatttcgcagaagctgatcgccgtaaaggttctactggcgagttgctgttgcagttgctggaatctcgtttggataatgtcgtttatcgtatgggtttcggttctacccgagctgaagcaagacagcttgtttctcataaggctatagttgtaaatggacaagttgtcaatattccttctttccaagtgaaagctggtgatgttgtctcagttcgtgaaaaagccaaaaaacaggtacgtattcaagaagcattgggtttggcaactcaaatcggcttgccgggttgggtttctgtagatgcagataaacttgagggtgtgttcaaaaacatgccggatcgctctgaattgaccggtgatattaatgaacagctggtggtagagttctactctaaa

SEQ ID NO: 29018 - DNA, 717 bp, Neisseria gonorrhoeae
atgacacagcaaatcaaatacaaacgcgtattactgaaactctccggcgaatccctgatgggttccgatccgttcggcatcaatcacgataccattgttcaaactgtcggcgaaattgccgaaatcgtgaaaatgggtgtgcaagtcggtatcgttgtcggcggcggtaacattttccgcggcgtatctgcacaagcaggcagcatggaccgcgccactgccgactacatgggcatgatggcgaccgtgatgaacgccttggcactcaaagacgcatttgaaaccttgggcatcaaagcgcgcgtacaatccgcactgtctatgcagcaaatcgctgaaacttacgcccgtcctaaagccattcaatatttggaagaaggcaaagtcgtgattttcgccgccggtaccggtaatccgttcttcacgaccgacactgccgccgcattgcgcggcgcggaaatgaactgcgacgtgatgctcaaagccaccaacgtcgacggcgtgtacaccgcagacccgaaaaaagacccgtccgccacacgctacgaaaccattacttttgacgaagccttgaataaaaacctcaaagtcatggacgcgaccgcctttgccctctgccgcgaacgcaagctcaatatcgtcgtcttcggcatcgccaaacaaggctcgctcaaacgcgtcattaccggcgaagacgaaggcacactggtccactgc

SEQ ID NO: 29019 - DNA, 393 bp, Neisseria gonorrhoeae
atggctaaagcaaacacagcttcacgtgtacgtaaaaaagtacgtaaaaccgtgagtgagggtattgtgcacgttcatgcatctttcaacaataccatcattacaatcactgaccgtcaaggcaatgcgttgtcttgggctacctctggcggcgctggttttaaaggttctcgtaaaagtacaccatttgcagcacaagttgcagcagaagcagctggtaaagttgcccaagagtatggcgttaaaaatttagaggttcgtattaaaggtccaggtccaggtcgcgaatcctctgtacgtgctttgaatgctcttggtttcaagattaccagcattactgacgttaccccgttgcctcataacggttgccgtccgcctaaaaaacgtcgtatt

SEQ ID NO: 29020 - DNA, 852 bp, Neisseria gonorrhoeae
atggcagaaattactgcaaaaatggttgccgacctgcgcgccgctaccggcctgggtatgatggaatgcaaaaaagccttggttgaagctgaaggcaacttcgacaaagccgaagaaatcctgcgtattaaatccggtgcgaaagcgggcaaactggctggccgtactgctgccgaaggcgtattggcttatgcaatcaacggtaatgtcggcgcattggtcgaagtaaactgcgaaaccgacttcgttgctaaagacgccggcttcgtagaatttgccaacttcgttgcgaaaactgctgccgagaaaaaaccggcttctgttgaagaactgagcgaactggttgaatcagaacgcaaagccatcatcgctaaattgggcgagaacatgtctgtccgccgcttccaagtgattgacactgccaaccaactggttgcctacatccacggcgcattggcgaccgaaggcgttttggtcgagtacaaaggctctgaagatgtagcacgcaaaatcggtatgcacatcgttgccgccaaaccgcaatgcgtaagcgaagccgaagtagatgctgaaaccgttgaaaaagaacgccacatctacaccgagcaagccatcgcttccggcaaacctgccgacatcgccgctaaaatggttgaaggccgtatccgcaaattcttggctgaaatcactctgaacggccaagcattcgtgatgaaccctgaccaaactgttgcccaattcgctaaagaaaacgacactgaagtggttagcttcatccgctacaaagtaggcgacggtatcgagaaagccgttgtcgactacgcagccgaagtagccgcagccgccaaagtg

SEQ ID NO: 29021 - DNA, 360 bp, Neisseria gonorrhoeae
atggctcgtattgcaggggtaaatatccctaataacgcacacatcgtaattggtcttcaggctatttacggtattggtgctactcgtgctaaattgatttgtgaggctgcaaatattgcgcctgatactaaagcaaaagatttggacgagactcaattagatgctttgcgtgatcaagttgccaagtatgaagtagaaggtgatttgcgtcgtgaagtaactatgagtatcaaacgattgatggacatgggctgctatcgtggcttccgtcatcgtcgcggcttaccatgccgcggtcaacgcactcgtacaaatgcgcgtactcgcaaaggtccgcgtaaagcgattgctggtaagaaa

SEQ ID NO: 29022 - DNA, 726 bp, Neisseria gonorrhoeae
atgtctcaaattactatgcgtcagatgattgaagccggtgttcacttcggtcaccaaacccgtttctggaacccgaaaatggctcaatacattttcggcgcgcgcaacaaaatccatatcgtaaacttggaaaaaaccctgccgatgttccaagaggcgcaagaagccgtacgtcgtctggttgccaacaaaggtacggtattgttcgtaggtaccaaacgccaggcacgcgacatcatccgcgaagaagcgacccgcgccggtatgcctttcgtcgaccaccgctggttgggcggtatgctgaccaactacaaaaccgttaagcaatccatcaaacgcctggaagaaaaaaccgcagccttggaaaatgctgccgaaagcggtttcagcaaaaaagaaattctggaaatgcaacgcgacgttgaaaaactggaacgctctttgggcggtatcaaaaacatgaaaggcctgcccgacgcgattttcgttatcgataccggctaccaaaaaggtactttggttgaggctgaaaaactgggcatccccgttatcgccgtagtcgataccaacaacagcccagacggcgtgaaatacgtcatccccggcaacgacgactccgccaaagccatccgcctgtactgccgaggcatcgccgacgcagttttggaaggcaaaaaccaagcgctgcaagaaaccgtagccgctgcccaagaaaccgctgccgag

SEQ ID NO: 29023 - DNA, 216 bp, Neisseria gonorrhoeae
atggcgaaagaagatactatccaaatgcaaggtgaaattcttgaaactttacctaacgcaacatttaaagtaaaacttgagaatgaccatattgtattgggtcatatttctgggaagatgcggatgcattacattcgtatttctccgggagataaggtcacagtagagctgacaccttatgatttaactagggctcgaatcgttttcagagcaaga

SEQ ID NO: 29024 - DNA, 1308 bp, Neisseria gonorrhoeae
gtggctaatcaacaaacgtcatcaggttcatccaagtttggagatcttaagaaacgtcttttgtttctatttggagcattgattgtttttcgaattggtgcccatatacccgtacctggggttgatgctgttgctttagctaaattatacgaaagcgctggaaacggcatcctgggaatattgaatatgttttccggtgggtcgttagagcgctttagtatatttgcaataggaattatgccatatatttcagcttctattattgtacagctcgcttctgaaattttgccatcattgaaggctttaaaaaaagaaggggaggctggtagaaaggtaattacgaaatatactaggtatggtactgttttgttagcaattcttcaaagtctaggtgttgcatctttcgtatttcagcaaggaattgttgtaacaagttcatttgagtttcatgtttccacggtagtttctttggtaacgggaaccatgtttcttatgtggcttggggagcaaattactgaaaggggtatcgggaacggtatttctttaatcattacggcaggtattgcttcaggtattccttcgggtattgcaaagctggttacactgacgaaccaaggttctatgagcatgcttacggcgttgcttattgtatttggtgccttattattaatttatttggttgtatactttgaaagtgcacagcggaagattcctattcattatgcaaaacgccagtttaatggtagggcgggtagtcaaagtacgcatatgcctttcaagttgaatatggctggtgttattcccccaatttttgcttccagtattattctatttccatctactcttttaggttggtttggttcggctgatacaaatagtgttttgcacaaaatagctggattgttacaacacggtcaattgctgtatatggctttatttgcagcgacagttattttcttttgttatttttatacggctttggtttttagtcctaaagaaatggcagagaatttaaaaaagagtggtgcttttgttcctgggattagacctggtgagcagacctctaggtatttagaaaaagttgtattacgtttgacattgtttggagctttttatattacaactatttgtttaattccagagttcttaactacgattttaaatgtacctttttatttgggtggcacgtctttgttgattctagttgttgtaacgatggattttagtacacaaataaattcgtataggcttactcaacagtatgataagttaatgactcgttcagaaatgaaatcattttctcggaaa

SEQ ID NO: 29025 - DNA, 1038 bp, Neisseria gonorrhoeae
atgcaacccatccgataccgaaccgacctcaccccctacaacactttcggcctgcacgcccaagcccgggcctttatcgcgcttaaacacgccgacgaattgcgcgacatcgtccgactgcccgagttcgaccgcgatactgttttatggctgggcggcggcagcaacatccttttgatgcaggattacgacggcttggtcgtccatatggaaaacaagggcatacgcgagattgcgcgctcagacggcatggttctgattgaagcgcaggcgggcgaaatttggcacgatttcgtgttgcacaccgtcgcgctgggtttgagcggtttggaaaacctgagcctgattccgggtacggtcggcgcgtcgcccgtgcagaacatcggcgcatacggcgtggaggcgaaagatgtgattcacagcgtgcgctgcttcgatttggatacggaaacctttgtaaccctttccaatgccgactgccgcttcgcctaccgcgaaagcctgttcaagcaggaaggcaaagggcgttatgtgattgtttcggtcgtatttgcattaaaaacgcattttgtgccgaacttgggctacggcgatttggcggcgaaggttgccgaattgagtgcaggtagggaggcaacggcgaaagacgtttccgatgcggtatccgccatccgcaacagcaaattacccgacccgaaagttttgggcaatgtcggcagtttctttaaaaaccccgtcgtcagcgcggaaaaagccgccaccctgttgcagcggcatcccgatatgccgcgctatccgcagcccgacggttcggtcaaactcgccgccggctggctgatcgaccaatgccgtctgaagggcttccaaatcggcggtgcggcggtacacgataaacaggcattggttttggtaaacaaaaacaacgcctcggcaaacgatgtccggcagttggcgcaacacatcaaatttacagtatttgctcggtttcaggtagaattacacgccgaacccaattggctgcccacttcgttcagcctg

SEQ ID NO: 29026 - DNA, 432 bp, Neisseria gonorrhoeae
atgtttttgaatacaattcaacctgctgttggtgctacgcatgctggtcgtcgtgttggacgcggtattggtagtggtcttggcaaaacgggtggtcgtggtcataaaggtcaaaagagccggtctggtgggtttcataaggtgggtttcgagggtggtcaaatgcccttgcaacgacgcctccctaaaagaggttttaaatctttaacagtatcagctaatgcacagcttcgtttaagtgaactggaatcaattgctgttaatgagattgatattttagtcttaaagcaagcaggtctgattgcatctacagtctctaatgttaaagttattgcttctggtgaaatttctaaggcagttgctttgaagggtattaaagttaccaaaggtgcgagagctgctatcgaggatgttggtggtaagattgaaatg

SEQ ID NO: 29027 - DNA, 2469 bp, Neisseria gonorrhoeae
atgaacccgaccgcacaacgcatacacgaactcaccgacctcctcaaccgctacgcctacgaatactacaccctcgacgcgcccagcatacccgatgccgaatacgaccgcctgttccgcgaactcgaagcgttggaacgaaaccatcccgagctcaagctgcccgacagcccgacccagcgcgtcggcggcgagcctttggcaggctttgccgaagtgcgccacgaagtgccgatgctgtcgctgaccaacgccttttccccgcaagatgaaaacggcgtgttcgaccatgccgaaatgtacgccttcgaccaacgcgtgcgcgacggcttggacggcggcaatcccgaatacgttatcgaacccaaattcgacggcctcgccatcagcctgctctaccgcgacggcgtattggtgcaggcggcaacgcgcggcgacggcacgacgggcgaagacgttacccgaaacgtcaaaaccgtatccaacatccccctgcggctgcacggcgaaaacgtgcccgaactcatcgaagtacgcggcgaagtgctgatgctcaaagccgattttgccgctttaaaccaacgtcagaccgaaaacgggcaaaaacctttcgccaatccgcgcaatgccgccgccggcagcctgcgccaactcgattcgcgcatcaccgcgcaacgcaaactgcactttttcccctactccgtcgcccgccagcaaggcggtttgattgcggaagaacacatccaagaactcgcctatttccaagcactcggcttcagtctgcccaatggcaatttcggctgtttcaaaaatatcggcgaagtattggcgttttacgaacacatgcagcaaaaacgccccgaactgccctacgaaatcgacggcacggtcgtcaaagtcaacagcttggcgcaacagcacgaactcggcttcatctcccgcgcgccgcgctgggcggttgcccacaaattccctgccgaagaagccctgaccattgtcgaagcgattgacgtgcaaatcggcaggacgggcgcggtaacgccggttgcccgcctgcaacccgtattcgtcggcggcgtaaccgttaccaacgccaccctgcacaatcaggacgaagtatcgcgcaaagacgtgcgcgtcggcgataccgtcgtcgtgcgccgcgccggagacgtgattcccgaagtcgtgcgcgtgattttcgaacgccgcccgatgcaggaaaccgccgttgccgtttcagacggcatcgggcatcagcaggacgacctgtttgccgaaacaccgtccgccaagcaaaccgaatccgttccgctccataagccctaccgcctgccggcccgctgccccatctgccgcagcgaaatcgaacgcgaagaaggcgaagccgtcgcccgatgcagcggcggtatgctttgtcaggcacaacgcgcgcaaggcttaatccacttcgcctcgcgcaaagcgatggacatcgacggcttgggtgaaaaacaaatcgaacagctggtcgcccaagacctcgtccgccatttcgccgacctctaccgcatcgatattccgaccctgcaaaaaatgaaggaaacggcggataaagggtcatctgaaaacgaaaacggcgacgcagaaacggtttcaggcgacctgtctaaatacaatacccaaaacggcaaaaaacaaccgaccaagtgggcgcaaaacatcctcgcaggcatagaatccggcaaaacgcccgaacttgcccgcttcctgttcgcgctcggcatccgccacgtcggcgaacgcaccgccaaaacgctggcgcaggcattcggcacattggaacgcgtccgccgcgcccccgaacccgtcctcgcctgcctgcccgacatcggcacggtagtggcgcgttccattgcccacttcttcgcccaagccgaacagcaggcgatgatagacgagctgctcgccgcaggcgttgccccgcaagcccaagccgtcagcctgcctgccgcacaatatgccgggccgcaacgctggattacccgcctgcccggtttcaaaatcagcgaaaacaaagcccaagccttatgggaactcgccggacaaagtatagaaggactgcaaaacgacaaagccctccctgccgactggcaggcgtggcgcagcaaagcgcaaaacaccgccctgctcgaaaacctaaaaaccttcttcgcgcaaatgccgtctgaagacgaggcggcgcaaggttcagacggcatcaataaagccgtggcaggcaaaacctttgtgttaaccggcaccctgcccaccttcaaacgcgaccaagcccaagccctaatcgaagccgcaggcggcaaagtgtccggcagcgtgtccaaaaaaaccgactacgtcgtcgccggagaaaccgcgggcagcaagctggaaaaagccaatgccttgggcgtttccgtcctcagcgaagccgaactgcttaccctgctctgc

SEQ ID NO: 29028 - DNA, 1296 bp, Neisseria gonorrhoeae
atggctaaaaatgttgtagtaatcggcgcacagtggggcgacgagggtaaaggtaaaatcgttgactggctggcggaagaagccggcggcgtcgtgcgcttccaaggcggccacaatgcgggccataccttggtcgtcggcggcaaaaaaaccattttgcgcctgattccgagcggtatcctgcacgaaggattggattgcttcatcggttcgggcgttgtcgtttcccccgaagccctgttgggcgaaatcgacgagttgaacgcggcaggcgtgaaaaacgtcgaaggccgtctgaaaatcgcgccgacctgcccgctgatcctgccttaccacatcgcgctcgaccaagcccgcgaagcatcgcgcggcaaaggcaaaatcggcacgaccggccgcggcatcggccctgcctacgaagacaaagtggcacgccgcgccattcgcgccgccgatttgctgcatcctgaaaaactgcgtgaaaaactggatgccgtccttgcctattacaacgtccaactccaatacctgcataacgccggaccggttaaagcggaagacgtgatggcggttatcgaaaaagtcgcgccgcgcattgcgccgatgattgccgacgtgtcccgcgtgttgaacgaaaaaaacaaaaacggcgaaaaactgctgtttgaaggcgcgcaaggtgcgttgttggacatcgactacggcacttaccccttcgttacctcgtccaactgtctcgccggcgcggcttcggcaggcgcgggcgtaggtcctcaaatgctggattatgttttgggcatcgtcaaagcctataccacgcgcgtcggttcgggcccgttcccgaccgaattgttcgacgaagtaggcgcaggtttggcggagcgcggacacgaattcggttcggtaaccggccgcgcgcgccgctgcggctggtttgatgccgccgccctgaaacgctccatccaaatcaacggcatttccggtatgtgcattaccaaactcgatgtaatggacggcgttgaaaccatcaatatctgcgtcggctacgaattgccaggcggcggcaaaaccgacatcctgccttgcggttcggatgcggtggaaacctgcaaaccgatttacgaaaccatgcccggctggcgcgaatcgactgtcggcgtgaaaagctacgacgcattgcctgccaatgccaaagcatatttgaaacggattgaagaagtctgcggcgcgccggtcgccatcgtctccaccggccccgaccgcgaagaaacgattgtgctgcatcatccgttcgca

SEQ ID NO: 29029 - DNA, 645 bp, Neisseria gonorrhoeae
atgaaagcattacttttaggcgcaccgggcgcgggcaaaggcactcaggcgcaattcatcaccgccgcgttcggcattccgcaaatctctaccggcgacatgctccgtgccgcgattaaggcaggcacgcccttgggtttggaagcgaaaaaaatcatcgatgaaggcggtttggtgcgcgacgacatcattatcggcatggtcaaagaacgcatcgcgcaagacgactgcaaaaacggtttcctgttcgacggtttcccgcgtacattggcgcaagccgaagcgatggtggaagcaggcgtgggtttggacgcggtcgttgaaatcgacgtatccgacagcgtgattgtcgaccgcatgagcggccgccgcgtgcatttggcttccggccgtacttaccacgttacctacaatccgcctaaaaccgaaggcaaagacgacgtaaccggcgaagatttgattcagcgcgacgacgacaaagaagaaaccgtgaaaaaacgtcttgccgtttaccacgagcaaaccgaagttttggttgatttttacagcaagctggaaggcgaacacgcgccgaaatacatcaaagtcgacggtacccaagcagtagaagctgtgaaagccgaagtattgggcgcattgggcaaa

SEQ ID NO: 29030 - DNA, 618 bp, Neisseria gonorrhoeae
atgaaaccgcaattcatcactttggacggcatagacggtgccggaaaatccaccaaccttgccgtcatcaaggcatggtttgaacggagggggctgcccgtgctgttcacgcgcgagccgggcggaacgccggtcggtgaggccttgcgcgaaatcctgctcaaccctgaaaccaaagccggtttgcgtgcggaaacactgatgatgttcgccgcgcgtatgcagcacatcgaggaagtcatcctgcccgcgctttcagacggcatccatgtcgtgtccgaccgttttaccgatgcgaccttcgcctatcagggcggcgggcgggggatgccgtctgaagacattgaaattttggaacattgggtgcagggcggtttgcgccccgatttgaccctgctgttggatgtgccgctggaagtatcgatggcgcgtatcggacaggcgcgcgagaaagaccggttcgagcaggagcaggcggatttctttatgcgtgtgcgcggcgtttatctcgaccgagccgccgcctgtcccgaacggtacgccgttatcgacagtaaccgcagcttggatgaagtcagaaacagcatagaaaaagtgttggacggacatttcggctgt

SEQ ID NO: 29031 - DNA, 579 bp, Neisseria gonorrhoeae
atgaggaacgaggaaaaacgcgccctgcgccgcgaattgcgcgggcggcgttcgcaaatggggcgggacgtgcgggcggcggcggcggtaaaaatcaaccgcctgctcaaacgttatatcaagcgcggtcggaaaatcggcgtgtattggccgatgggcaaggaattgcgtttgggcggctttgtccgcgcggcgcaaaaacgcggcgcaaaactctatctgccttatatcgaaccgcacacgcggcggatgtggtttacgccgtatcctgaacgcggaatggaacgggaacgcaagcgcggtagggcgaagctgcatgtccctcagtttgcagggcgcaaaatccgcgtgcacggtttgtcggtattgctcgtcccgcttgtcggcatagaccgcgaaggctaccgtttggggcaggcaggcggctattacgatgcgacgctttcggcgatgaaataccgtttgcaggcgaaaaccgtgggcgtgggctttgcctgccagttggtggacaggctcccacgcgaggcgcacgacctgccgctggacggttttgtatcggaagcggggatattgtgtttt

SEQ ID NO: 29032 - DNA, 516 bp, Neisseria gonorrhoeae
atggcaaaacatgaaattgaagaacgcggtgacggtctgattgaaaagatggtcgcagttaaccgtgtaaccaaagtagttaaaggtggtcgcattatggctttctctgcgctaactgttgttggtgatggagatggtcgtattggtatgggtaaaggtaagtcaaaagaagtgcctgttgcagtccaaaaggcgatggatcaagcacgacgctctatgattaaggtaccattaaaaaatggtacgatccatcatgaggttattggtcgacatggtgctactaaagtatttatgcagcctgctaaagagggtagtggcgtaaaagccggtggacctatgcgtttggtttttgatgctatgggcattcataatatttccgccaaagtgcacggatctactaacccatataatatcgtacgtgcaacattagatggtttgtctaagttgcatactcctgctgatatcgcagccaaacgtggcttgacagtggaagacattttgggagttaaccatggc

SEQ ID NO: 29033 - DNA, 1464 bp, Neisseria gonorrhoeae
atggctgaagcgacagacgttgtcttggtgggcggcggcattatgagcgcgactttgggcgttttgctcaaagaactcgaaccgtcttgggaaatcaccctgattgaacgcttggaagatgtggcgttggaatcgtcaaacgcgtggaacaacgccggcacggggcattccgcgctgtgcgaattgaactatgcgccgctgggtgcggacggcgtcatcaatccggcgcgcgccctgaatattgccgaacagtttcatgtcagccgccagttttgggcgacgctggtcgcggaaggcaagttggaagacaattccttcatcaatgccgtgccgcatatgtctttggtgatgaacgaagaccactgccgttacctgcaaaaacgctatgatgtgtttaaaacgcagaaactttttgaaaatatggaattttccaccgatcggaacaaaatttccgattgggctccgctgattatgcgcggccgggacgaaaaccaacccgtcgccgccaactattccgccgaaggcacggatgtcgatttcggacggctgacgcgccagatggtgaaatatttgcagggcaagggcgtaaaaaccgagttcaaccgccacgtcgaagacatcaaacgcgaatccgacggcgcgtgggtgctcaaaaccgccgatacccgcaacccagactggcagctcaccctccgcacccgcttcctcttcctcggcgcgggcggcggcgcactgaccctgctgcaaaaatccggcatccccgaaggcaaaggctacggcggcttacccgtgtccggcctgttcttccgcaacagcaaccccgaaaccgccgaacaacacaacgccaaagtgtacgggcaggcttccgtcggcgcgccgccgatgtccgtcccgcacctcgacacacgcaacgtagacggcaaacgacaccttatgttcggtccttacgcaggtttccgttccaacttcctcaagcaaggctcgtttatggatttgccgctgtccatccatatggacaacctctatcctatgctgcgcgccggctgggcgaatatgccgctgaccaaatacctgctgggcgaattgcgtaaaaccaaagaagaacgctttgcctccctgctggaatactaccccgaggcaaaccccgacgactgggaactcatcaccgcagggcaacgcgtccaaatcattaaaaaagactccgaaaaaggcggcgtgctgcagtttggtacggagattgtcgcccacgccgacggctcgctcgccgcattgctgggagcgtcgccgggcgcatcgaccgctgtgccgctgatgatccggctgatgcaccaatgcttccccgagcgcgccccgtcttgggaaggtcgtctgaaagagctggtaccgggttacggcatcaagttgaacgaaaaccctgaaagggcggatgaaattatcgcctataccgcgaaagtgttggatatt

SEQ ID NO: 29034 - DNA, 351 bp, Neisseria gonorrhoeae
atggataaacatacaacccgactccgtcgtgcacgcaaaacccgtgctcgtattgcggacttgaaaatggtaagattatgtgtgttccgaagcaataatcatatttatgctcaagtaattagtgctgaaggtgataaagtattggctcaagcctctacattggaagctgaggtgcgcggtagtctgaaatctggaagcaatgttgaagcagctgcaatagttggtaaacgtattgctgagaaggctaaagcagcaggtgtagaaaaggttgcttttgatcgttcaggtttccaatatcacggtcgtgtgaaggctttggctgaagctgctcgtgaaaatggtttaagcttc

SEQ ID NO: 29035 - DNA, 531 bp, Neisseria gonorrhoeae
atgtcacgtgtcgcaaaaaacccagtgacggttcccgctggtgtagaagtaaaatttggaacagaggcattggttattaagggtaagaacggtgaattgtcttttcctttgcattctgatgtagccattgaatttaatgatggcaaattgacttttgttgcgaataatagcagtaaacaagcaaatgcaatgtctggtactgctcgcgcattagtcagcaatatggttaaaggtgtttcagaaggttttgagaagaaattacaattgatgggcgtgggttatcgtgctcaagcacaaggtaaaatcttgaatctgtctttgggtttttctcatccgatcgtatatgaaatgcctgaaggtgtctccgttcaaactcctagccaaacagagattgttttaactggctcggataaacaagttgttggtcaagttgcttctgagattcgtgcgttccgtgctcctgagccttataaaggtaaaggtgttcgctatgtaggcgaagtagtggtaatgaaagaagccaagaaaaaa

SEQ ID NO: 29036 - DNA, 390 bp, Neisseria gonorrhoeae
atgagtatgcatgatcctatttccgatatgttgactcgtatccgcaatgcgcaacgtgctaataaagcagcagttgcaatgccttcttcaaaattaaagtgtgctattgcaaaggtattgaaagaagaaggatatattgaggacttcgcagtttcatctgacgtaaagtctatattggaaattcaattaaaatactatgcaggtcgtcctgtaattgaacaaatcaagcgtgtatctcgccccggtttgcgtatttataaagcgtctagtgagattccaagtgttatgaatggcttgggtattgctatcgttagtacttctaaaggtgtaatgactgatcgtaaagcacgttctcaaggtgttggtggtgagttgttatgcattgtagcc

SEQ ID NO: 29037 - DNA, 303 bp, Neisseria gonorrhoeae
atggctaagaaagcacttattaatcgtgatctgaaacgtcaagctttggctaaaaaatatgcggctaaacgcgcggcaattaaagcggtaatcaatgattcgaatgcaactgaggaagagcgttttgaggctcgtttgaggtttcaatccattcctcgtaatgcggcacctgtgcgtcaacgtcgtcgttgtgctttgacaggtcgccctcgtggtactttccgtaaatttggtttgggtcgtattaaaatccgtgaaatcgccatgcgtggcgaaattccgggtgttgttaaagccagctgg

SEQ ID NO: 29038 - DNA, 537 bp, Neisseria gonorrhoeae
atggctcggttgagagagttttataaagagacagttgttcctgaattggttaaacaatttggttacaaatcagtaatggaagtcccgcgtattgaaaaaatcaccttgaatatgggtgtgggtgaggctgttgctgacaaaaaagttatggaacatgctgtttccgatttagagagaattgccggtcaaagaccggttgttactgttgcccgtaaatctatcgcaggttttaaaatccgtgataactatccggttggttgcaaagtaacattgcgtcgtgatcaaatgtttgaattcttggatcgtttgattactattgcattacctcgcgtacgtgacttccgtggtgtgagcggtaaatcatttgatggtcgtggcaattacaatatgggtgttcgtgagcaaattattttcccggaaattgaatacgataaaattgatgctttgcgtggtttgaatattactattactactacagcaaaaaccgatgaggaagcgaaagctttattgtcattgtttaaatttccgttcaaagga

SEQ ID NO: 29039 - DNA, 321 bp, Neisseria gonorrhoeae
atgaataaaatcattaaaggcgatagggttgtagtaattgctggtaaggataaaggtaagcagggtcaagtagttcgagtgttgggtggtaaagttgttgttgagggcgttaatgttgtaaaacgccatcaaaaacctaatccaatgcgtggcattaagggcggtattattactaaagaaatgcctttggatatttctaatatcgcaatcctgaatccggaaactaataaagcggaccgtgttggtattaagctgattgaaaatgaaggcaaagttaaacgcgttcgtttcttcaaatcaaatggctctatcattggagca

SEQ ID NO: 29040 - DNA, 960 bp, Neisseria gonorrhoeae
atgcccgccaagttccaacaagaaaccctcaaatcccgtttcgcacaagccaaagttcttgttgtcggcgacgtgatgctcgaccgctattggtttggcgacgtgtcccgaatttcgcccgaagcacccgtgccggtggcaaaaatcggacgaatcgaccaacgggcgggcggcgcggcgaacgttgcgcgcaacatcgcttcgttgggcggcagggcagggctgttgtccgtaaccggcgacgacgaagccgccgccgcgctcgacgcgctgatggtgcaggacggcgtcgcctcctatctgatgcgcgacaaacaaatcgccaccaccgtcaaactgcgcgtcgtcgcccgcaaccagcagcttatccgccttgattttgaagaacatcccaaccgcgaagtgttggaacaaatcaagcggaaataccgcgaaatcttgcccgaatacgacgcaatcattttttcggactacggcaaaggcggtctgtcgcatatctccgatatgatcgattgggcgaaacatgtcggcaaaaccgtcttaatcgaccccaaaggcgacgattacgaaaaatatgtcggcgcaactctgattacgcccaactgcgccgaattgaaagaagtggttggcagttggaaaaacgaaggcgatctgaccgaaaaagcgcaaaacctgcgccgccacctcgacttgaccgccgttttgctgacccggagcgaagagggcatgaccctgttcagcgaaggcgaacccatttaccagcccacccgcgcccaagaagtttacgacgtgtccggcgcaggcgacaccgtcattgccggaatgggcttggggctggcggcaggctgcaccatgcccgaagccatgtaccttgccaatactgcggccggggttgtcgtggcgaaactcggtacggcggtttgctcgtttgcagagttggttgaagcactggacgggcaa

SEQ ID NO: 29041 - DNA, 366 bp, Neisseria gonorrhoeae
atgattcaaatgcagaccatcttagatgtggctgataactctggtgcgcgtcgcgtaatgtgtatcaaggtattgggcggatctaagcgtcgctacgcttctgttggcgatattattaaagtggcagttaaagatgcggttccgcgtggccgtgtcaaaaaaggcgatgtatataatgcggtagttgttcgtactgctaagggtgtgcgtcgtcctgatggtgcgttaattaaattcgataacaatgccgccgtgttgctgaataataaacttgaacctttgggtactcgtatctttggtccggtaacccgtgaattgcgtactgagcgatttatgaaaatcgtttcattggcacctgaagtatta

SEQ ID NO: 29042 - DNA, 414 bp, Neisseria gonorrhoeae
atgctgcagccaactagactgaaataccgtaagcaacaaaagggtcgcaataccggcatcgctactcgcggtaataaggtaagtttcggtgagttcggcttgaaagccgtaggtcgtggtcgtttgactgcccgtcaaatcgaagctgctcgtcgtgcaatgacccgtcacatcaaacgtggtggtcgtatttggattcgtgtattccctgacaaaccgattactgaaaagcctattcaagttcgtatgggtggcggtaaaggtaacgtggaatattacattgccgaaattaaaccaggtaaagtgttgtatgaaatggatggcgttccagaggaactggctcgtgaagcattcgagttggctgctgccaaattgcctattcctacaacctttgtagtaagacaggtgggtcaa

SEQ ID NO: 29043 - DNA, 1542 bp, Neisseria gonorrhoeae
atgatgaccgaaatgcaacaacgcgcccaactgcaccgccaaatttggaaaatcgccgacgaagtacgcggcgcggtggatggctgggactttaaacaatacgttctcggcacacttttctaccgctttatcagcgaaaacttcaccgactatatgcaggccggcgacagcagcattgattacgccgctatgccggacagcatcatcacgcccgaaatcaaagacgatgccgtcaaagtcaaaggctatttcatctaccccggccagcttttttgcaatattgccgccgaagcccatcaaaacgaagagctcaacaccaagctgaaagaaatctttaccgcgattgaaagctccgcctccggctacccgtccgaacaaggcatcaaaggcttgtttgacgacttcgacaccaccagcagccggctcggcagcaccgttgccgacaaaaacaaacgccttgccgccgtccttaaaggcgtggcggaactcgatttcggcaattttgaagaccaccgcatcgaccttttcggtgatgcctacgaatacctgatttccaactacgccgccaacgcaggcaaatccggcggcgaatttttcaccccgcaaagcgtctccaagctgattgcgcggctggcggtgcacgggcaggagaaagtcaacaaaatctacgaccccgcctgcggctcgggcagcctgctcttgcaggcgaaaaaacagtttgacgaacacatcatcgaagaaggcttcttcgggcaggaaatcaaccacaccacctacaacctcgcccgcatgaatatgtttctgcacaacgtcaattacaacaaattccacatcgaattgggcgacacgctgaccaaccccaaactcaaagacagcaaaccctttgatgccgtcgtctccaatccgccctattccatcgactggataggcagcgacgaccccaccttgatcaacgacgaccgctttgcccccgcaggcgtactcgcaccgaaatccaaagccgattttgccttcatcctgcacgcactgaactacctttccggcagaggccgcgccgctatcgtctcattccccggcattttctatcgcggcggcgcagagcagaaaatccgccaatatctggtggagggcaactatgtggaaaccgtgattgcccttgcgcccaatctcttttacggcacctgcatcgccgtcaatatcctggttttgtccaaacacaaagacaataccgacatccaattcatcgacgcaagcggcttctttaaaaaagaaaccaacaacaacgtcttaaccgaagaacacattgccgaaatcgtcaaactcttcgccgacaaagccgatgtgccgcatatcgcccaaaacgccgcccagcaaaccgtcaaagacaacggctacaacctcgccgtcagcagctatgtcgaagccgaagacacccgcgaggtcatcgacatcagacagctcaacgccgaaatcagcgaaaccgtcgccaaaatcgaacggctgcggcgtgaaattgacgaagtgattgcagagattgaaacc

SEQ ID NO: 29044 - DNA, 690 bp, Neisseria gonorrhoeae
atgggacaaaagattaaccctacaggctttcgcctggcggtaactaaagactgggcttcaaaatggtttgctaaaagtaccgacttttctactgttttgaagcaggatatcgatgttcgcaattatttgcgtcaaaaattggccaatgcttcggttggtcgagtaattattgaacgccctgcaaaatctgcacgcattaccattcactccgctcgtccgggtgtggttatcggtaaaaaaggtgaggatatcgaagttttgaaacgtgacttgcaagtcttgatgggtgtacctattcatgtaaatattgaagagattcgccgtcctgagttggatgctcaaattattgctgacggtatcgcccagcagttggaaaaacgcgttcaattccgtcgtgctatgaaacgagcaatgcaaaatgcaatgcgttctggtgctaaaggcattaagattatgacttcaggccgtctgaatggtgcggatattgcccgtagcgaatggtatcgtgaaggtcgcgtgccactgcatactttacgtgcaaatgtagattatgcaaccagcgaagcgcacaccacatatggtgtattgggtctgaaagtttgggtttatacggaaggcaatattaaatcttccaaacctgaacatgagagtaaacaaagaaaggcaggtagacgtaatgctgcagccaac

SEQ ID NO: 29045 - DNA, 3096 bp, Neisseria gonorrhoeae
atgaacctcgaaaccaaacccatcgccgaaacgccgaatttcatcgtgctcgaccaatatgaaaaaatcgaacagtcgggcagctaccaatcggaaaaccggttggaagcggagttaatcgccgatttgcagaatcaggggtacgaataccgcaaggatttgaacagccaaagcaggctgctggaaaacctgcgcgcccagttgcagcggctgaacgatgtggcgttttcagacggcgaatgggcgcggtttttgacggaatatctggacaggccggctgaaaacattaccgataaaacccgcaaaatccacgacgaccatatttacgatttcgcttttgatgacggccgtctgaaaaacatttatctgctggacaagaaaaaccttgcccgcaaccatgtgcagcttatcaaccagtttgagcagacgggcacgcatgcaaaccgttatgacgttaccgtgttggtaaacggcctgccgctggtgcagattgaattgaaaaagcgcggtgtggcggtgcgcgaggcattcaatcaggtgcaccgttacagcaaagagagcttcaacagcggaaattcgctgttcaaattcctgcaaatcttcgtgatttccaacggcacggacacgcgctatttcgccaacaccaccaagcgcgacaaaaacagcttcgatttcacgatgaattgggcgcggtcggacaatcatccgattaaggatttgaaagactttaccgccacgttcctgcaaaaaagcgtattgctgagcgttttgctgcattacagcgtgttcgatgcgaatgatacgctgctgattatgcggccgtaccagattgccgccgccgaacgcattttgtggaaaatcaacagctcggcgcaggcgaagaattggagcgggccggaaagcggcggctatgtttggcataccacgggcagcggcaaaacgctgaccggctttaaggcggcgcgtctggcgacggaatcggcgtttatcgacaaggttttcttcgtggtggacaggaaggatttggactatcagacgatgaaggaataccaacgtttttcgcccgacagcgtaaacggctcggaaagtacggcgggcttgaaacgcaatttggaaaaagacggcaacaaaatcatcgttaccaccatccaaaagctgaacaacctgatgaaaagtgaagataatctgccggtttatcaccggcaggttgtatttattttcgacgaatgccaccgctcgcaattcggcgaagcgcaaaaaaacctgaaaaagaaatttaaaaaattctgccagttcggctttaccggcacgccgatttttcccgaaaacgctttgggcgcggaaaccacggcgggcgtgttcgggcgggagctgcattcttatgtgattaccgatgccatccgcgatgaaaaagtattgaaattcaaagtggattacaacgatgtacgcccgcagttcaaagccgtggaagcggaacaggacgagaaggaactgagtgccgccgaaaaccgccaagccctgctgcaccccgaacgcatccgcgaaatcacgcaatatatcctgagccggttcaggcagaaaacgcaccgcttgaatgcgggcggcaaaggcttcaacgccatgtttgccgtcagcagcgtggatgcggcgaagtgctattacgaagcgttcaaaacacaacaggcaggcagcctgcacccgttgaaaacagccaccattttttcctttgccgccaacgaagagcaaaacgccgtcggtgaaattgttgacgagacctttgaaccggaagcgatggacagcagcgcgaaagaatttttgcaggctgccatcaacgattacaacgcctgtttcaaaaccaatttcggcacggacagcaaagcctttcagaactactaccgcgatttggcaaaacgggtgaaaaaccgggaagtggacttgctgattgtggtcggcatgtttttgacgggttttgacgcaccgacgctgaatacgctgttcgtcgataaaaacctgcgctatcacggcctgatgcaggcgttttctcgcaccaaccgcatttacgatgctaccaaaaccttcggcaacattgtctgcttccgcgacttggagcaggcaaccattgatgcgatcacgctcttcggcgacaaaaacaccaaaaatgtagtgctggaaaaaagctacgaagaatacatgaacggctataccgacagccagaccggcgaagcacggcgcggttatctggatgtagcaaaagaattgcacgagcgtttccccgatcccgacaaaatcgaaacggaaaaagacaaaaaagattttgccaaactcttcggcgaatacctgcgggcggaaaatgtattgcagaactacgatgaatttgccgcgctgcgcgaattgcagaatgtggacgcggcggacgaagatgcgatgaaggcgtttcaggaaaaatactacctgagcgacgaagacgtgcaggaaatgcggaaagtgccgatgccgtctgaaagggcggtgcaggactaccgttccgcctataacgacatccgagactggctgcgccgccaaaaagcaggcgaacagaaagaacagtcaaaaatcgactgggacgatgtggtttttgaggtggatttgctcaaatcgcaggaaatcaatctggattacatcctgcaactggttttcgagcatcacaaaaaaatcaaaggcaaagcggagctggtggaagaaatccgccgcatcatccgcgccagcatcggccaccgcgccaaagagggcctgattgtggatttcatcaacgatacggatttggataaagtgcccgacgttcccgccatactggaaaccttttacacctacgcgcaagaggtgatgcggcacgaagcggcaggattgattgccgccgaaggcctgaacgaaaccgccgccaaacgctatttgaccggctcgctcaaacgcggctatgccagcgaaaacggtacggaactgaccgaaaccctgccgaaaatgagtccgctcaacccgcaatatctgacgaagaaacaaagcgtcttccaaaaaatcgcggcgtttgtggagaagtttgccggaataggggccgatatt

SEQ ID NO: 29046 - DNA, 870 bp, Neisseria gonorrhoeae
atgagctggttagataaaatcctgccacccaaaatcaagaatcgtgggaaagacggtgcttccaatgttcccgagggtttgtggcgcaaatgcccgtcttgttcggcaaccgtttattcgaccgagttgcagcagaacaatcaggtctgcccgaaatgcaaccaccacaatccgttatcggcgcgccagcgtttgaacctgcttttggatgaggaaggcagggaggaagttgcgggtaatgtcaaaccgaccgatcctttgaagtttaaagacagcaaaaaatatccggaccgtttgagtgcggcacgcaagctgaccggggaagatgacgcgctggtggtgatgaaggggatgatgaacggtctgcccgtcgtcgttgccgcgtttgaattccgctttatcggcggttcgatgggttcggttgtgggcgagcgtttcgtacagggtgtccgccgtgcggttgccgataattgtccgtttgtctgtgtggcggcttccggcggcgcgcgtatgcaggagggtgtaaactcgctgatgcagatgacgaaaaccagtgccgcgctgcatttgctgacggaaaaacgcctgccgtttatatcggtgttgaccgatccgactatgggcggcgtatctgccagcttcgcatttttaggcgatgtcgtgcttgccgaaccgaacgcgctgatcggttttgccggtccgcgcgtgattgagcagacggtgcgcgaaacgctgccggaaggcttccaacgcgccgagtttctgctggaaaaaggcgcgatcgaccagattgtcgaccgccgcgatatgaagcggcgcatcagtgatttgattacgctgttgtgccgtcaggacaaagtttccgccacc

SEQ ID NO: 29047 - DNA, 873 bp, Neisseria gonorrhoeae
atgtttcagaaacacttgcagaaagcctccgacagcgtcgtcggagggacattatacgtggttgccacgcccatcggcaatttggcagacattaccctgcgcgctttggcggtattgcaaaaggcggacatcatttgtgccgaagacacgcgcgttactgcgcagcttttgagcgcgtacggcattcagggcaggttggtcagtgtgcgcgaacacaacgagcggcagatggcggacaaggtaatcggtttcctttcagacggcctggttgtggcgcaggtttccgatgcgggtacgccggccgtgtgcgacccgggcgcgaaactcgcccgccgcgtgcgcgaagcagggttcaaagtcgttcccgtcgtgggcgcaagcgcggtaatggcggcgttgagtgtggccggtgtggcggaatccgatttttatttcaacggttttgtaccgccgaaatcgggcgaacgtaggaaattgtttgccaaatgggtgcgggcggcatttcctgtcgtcatgtttgaaacgccgcaccgaatcggggcaacgcttgccgatatggcggaattgttccccgaacgccgtctgatgctggcgcgcgaaatcacgaaaacgtttgaaacgttcttaagcggcacggttggggaaattcagacggcattggcggcggacggcaaccaatcgcgcggcgagatggtgttggtgctttatccggcgcaggatgaaaaacacgaaggcttgtccgagtctgcgcaaaatgcgatgaaaatccttgcggccgagctgccgaccaagcaggcggcggagcttgccgccaagattacaggtgagggcaaaaaggctttgtacgatttggcactgtcgtggaaaaacaaa

SEQ ID NO: 29048 - DNA, 1152 bp, Neisseria gonorrhoeae
atgaaattcatcgacgaagcaaaaatcgaagtcgccgcaggcaaaggcggtaatggcgcaaccagtttccgccgcgaaaaattcgtaccccgcggcggcccggacggtggcgacggcggcaaaggcggcagcgtctgggcagaagccgacgaaaacaccaacaccctcgtcgaataccgcttcgtcaaacgctaccaagccaaaaacggcgaaaaaggccacggttccgaccgctacggcgcaggtgcggacgacattgtcctcaaaatgcccgtcggcacccttatccgcgacctcgacaccgacgaaatcgttgccgacctcacctaccacggacagcgcgtctgcctcgccaaaggcggcaaaggcggcttgggcaacatccacttcaaatcctccgtcaaccgcgccccaaaacaatccacgcccggcgaagaaggcgaaacccgttccctgcaactcgaactcaaagtcctcgccgatgtcggcttgttaggcatgcccaacgccggcaaatccaccctgattaccgccgtctccgccgcacgccccaaaatcgccaactaccccttcaccaccctgcatccgaacttgggcgtggtacgcatcgacgaaaaccacagcttcgtgatggccgacatccccggcctgattgaaggcgcggcagaaggcgcaggcctcggccaccgcttcctcaaacacctatcacgcaccggtctgctgttacacgttgtcgatttggcacccttcgacgaaaccgtcaatcccgccgaagaagcactcgccatcatcaacgaattacgcaaatacgacgaagaactttacggcaaaccgcgctggctggtgctgaacaaactcgatatgctcgacgaagaagaagcccgggcgcgaacagccgccttcctcgaagccgtcggctgggactaccccgaacctgatgaccgtttccaattcgacatggaaaccccgcgcctcttccaaatcagcgcgctgacacatcaaggcacgcaggagttggtacaccaaatcaaccaatacctggccgagaaaaaacgtatcgaggctgaaaaagccgaagcggagaaagcagcggcaaatgttgaaattatcgaacagcagcctaaaacggatactggcgtgtttaagccggag

SEQ ID NO: 29049 - DNA, 1419 bp, Neisseria gonorrhoeae
atgaccgccatctacaacacccttacccgtcaaaaagaacccttcgcccccatcgaccctgaaaacgtgcgtatgtacgtctgcggcatgaccgtttacgactattgccacttaggccatgcccgtgtgatggtggtgttcgacatgattgcccgctggttgcgcgagtgcggttatccgctcacttatgtgcgcaacatcaccgacatcgacgacaaaatcatcgcccgtgcggctgaaaacggcgaaaccatcggcgaactgaacgcgcgtttcattcaggcgatgcacgaagatgccgatgctttgggcgtgttgcgtcccgacatcgagccgaaggcgacggaaaacatcccgcaaatgattgccatgattgagaccctgattcaaaacggcaaggcatatcctgccgcaaacggcgacgtttactacgccgtgcgcgagtttgccgcttacggacaattatcgggcaaatcgttggacgacctgcgtgcgggcgaacgcgtggaagtggacggtttcaaacgcgatccgcttgattttgtattgtggaaagcggcgaaagcaggcgaaccggcgtgggaaagcccgtggggcaacggccgtccgggttggcacatcgaatgttccgcgatgagtgaaaacctgttcggcgatacgttcgacattcacggcggcggcgcggatttgcagttcccgcaccatgaaaatgaaatcgcccaaagcgtcggtgccagcggtcacacctgcggtcatgaccacgcgcaaacccaccacggtcaaagtattgccagccacgtcaaatactggctgcacaacggcttcatccgtgtggacggcgaaaaaatgtccaaatcgctgggcaacttctttactatccgcgaagtattgaaacaatacgaccccgaagtcgtgcgtttcttcatcctgcgcgcccactaccgcagcccgttgaactactccgacgcgcatttggacgacgcgaaaggcgcgttgacccgtctgtacaccaccttgaaaaacacaccggcggctgagtttgatttgtctgaaaacgccaacggctacacccgccgtttctacgccgccatgaacgacgatttcggtacggtcgaagcggttgccgtgttgtttgagctggcaggcgaagtgaacaaaaccaatgacgcacacctcgccggctgcctgaaagctttgggcggcatcatcggcctgctgcaacgcaacccgattgagttcctccaaggcggcgcagtttcagacggcctctccaacgaagaaatcgaagacttgattgcccgacgcaaacaggctcgcgcggataaaaactgggcggagtccgaccgcatccgcgaccttctgaacgaacacaaaatcattttggaagacagcgccggcggcacgacttggcggcgcggt

SEQ ID NO: 29050 - DNA, 504 bp, Neisseria gonorrhoeae
atgtttgaacaagaagacgagtggatcagcaaaacccaaatgaaaaagcagatgaacggtttgcaggatttgggtatggaactgaccaggctctcaaacgacacgctgaaaaaaatcggtttggatgaagatttgtacgaggccgtcgttacctataaaaaaattacgtccaacggcgcgctcaaacgtcaggcgcaatttatcggacgtctgatgcgcgataccgatcccgcgcccatcgaggcgttccttgccaagctgcgcggcgacgatgcggcgcacaacgcctttttgcaacgcgtggaacaggcgcgtgtacggttgttggcagacgagggcgcgctgacgcagtttatgtccgattttccaaacgccggcgcgggcaggctgaggacgctcgtccgcaacaccaaaaaagaacaggaacaggacaaaccgccgaaaaacttccgcgccctgtttcaagaattgaaaaccgtgatggaaaacgggggcgcggaaatt

SEQ ID NO: 29051 - DNA, 1698 bp, Neisseria gonorrhoeae
atgtcagtcaaaatccaaacccgccccgtcaataccgacgttttcaatcatttgctcgccgccggcgccgatcctttaatcgcccggctttgtgcctcgcgcggtgtgcaaagtcctgccgagttggacgacaaactcgcttccctcctgccttatcaatcgctgacgaattgcgaagccgccgccggccgtttggcggatgcggttgaacgcaaggaaaaaatcctgattgtcgccgactatgatgccgacggcgcgaccgcgtgtgccgtcggtttggacggtttggcggcgatgggcgcgaaagtggatttcctcgtgcccaaccgctttgagcacggctacggcttaacgcccgaactcgccgaaatcgccgccgcgcaaggcgtggatttgctgattacggtggataacggcattgccagtattgcaggcgtggcgcgcgcgcaggctctgggtttggatgtcatcgttaccgaccaccatttgccagccgataccgtacccgactgcatcatcgtcaatccgaaccaaaaaggctgcggttttccaagcaaaagcttggcgggcgtgggcgtgattttttatgtgttgacggcgttgcgtgccgaactgcgccgccgcaattatttttcagacggcatcaaagagccgaatctgggcggccttttggatttggtcgcactcggtaccgtcgccgatgtcgtccccctcgaccacaacaaccgcatcctcgtgtcgcaaggtttgaaacggatgcgttcgggcaaaatgcgccccggcatccgcgccttgtttgaagtggcgcggcgcgattggcgcaaggctcagccgtttgatatgggctttgcgttgggcccgcgcatcaacgccgccggacggctggacgatatgtcggtcggcatcgcctgcctgttggcgcgagatgattccgaagcgcaggaactggcggctcggttaaacaacctcaatatcgaacgccgcgaaatcgagcagtctatgctgcgagacgcgttgaacgcctttcccgaaaccctgccttcaggtcagacgactttggtggcgtatcgcgacgacttccatcaaggcgtggtcggcattgttgccagccgcctcaaagaccgtttttaccgtccgaccatcgtgtttgcgccggcggacaacggcgaagtgcgcggttcgggacgctccattcccaatctgcacttgcgcgatgctttggacttggtgtccaaacgccatcccgatttgattttgaaattcggcggacacgcgatggcggcgggtttaagcatacttgaacacaatattcccgcgtttcagacggcctttgaagaagccgtgcgtgagatggtgtgcgaagacgatttgtcgcaaacctatattactgacggcagcctgcccgcctgcgacatcacgttggaacaggcgcaaaacctcgcctgccacgtttgggggcagggctttgcgccgccgagctttaccgacgagttccacgtcgttcgccagcagcctttgggcgcggaaggcaaacacaaaaaagcgtggttgcaaaaagacggctgcgaatttgaagcgatgttctggcgttgcagcgaagacattcccgaatacatccgcacggtgtaccgccccgttgccaacgaatggcgcaacaacctcgaattgcagctttatatcgactactgggaagcggcg

SEQ ID NO: 29052 - DNA, 1339 bp, Neisseria gonorrhoeae
atgctgaaaaaatggttgaataagatgctgccttccggtcggagcagtaaaaaagcggaaagtaaaacggtcattcctgccgaaagacacaacatcagtgccgaaatgttgagctttgccgccgaaaacgtcatacgccgcctgaaaggggcggggtttcaggcttatgtggtcggcggtgcggtcagagacctgctgctcggcatcgaacccaaagatttcgatgtcgcaactgatgccacgcccgaacaggtgcacaaactcttccgccgcagccgcatcatcggcaggcgttttcagattgtccatgtgatgaacggtgcggagattatcgaagtaacgacgtttcgcggcggtgcgaaggttcatcagaacgcgcacggcagaatcatgaaggacaacacctacggcagcatcgaagaagatgcgatgcggcgcgattttacctgcaatgccttgtattacgatcctgaaaaagaagagattttggatttccacaacgggattgccgatgttgccgcccgcaggctggttatgattggtaatgccgccgaacgctatcaggaagaccctgtcaggattttgcgcgccatccgcctgtcgggcaaattgggctttgagctgtcggaagaaaccgccgcaccgattgccgaatcgatatgccgtctgaagcacgaacctgtggcaaggctgttcgacgaaatcatgaaactgctgttttcagggcacgcgcgcgagtgtctgaaacgtttgaacggatttgacataccggacatccatccgctgctcaatgctttgcgcgtttcagacggcatcgccggaaaaatgacggcgcttgccctgaaaaataccgatgagcggctgcgtgccgacaaatcggtttcggtcggtttcgtactggcggccctgatgtggccagagttggaccgccattggaaaagcaatctgcaacagggtttgaaacctacgcccgccctgtccgatgcaatcaatacgatgcgcgaaaccgtcgaacgcggttggggcgtaccgcaacgcttttccgccacgatgcgtgaaatttggatgttccagccgcagtttgaaaaccgcaaaggcgcacgtccgcacaaactgtttgcacaggcgcgtttccgtgccgcctatgatttcctgctcttgcgcgccgaaaccggcaatgcggaccgcgcacttgccgagtggtggacggcgtttcagacggcatcggcggaacagcggacggaaatgaccaaaaacgaggccgccgcccggcacgaaaaaaacgaaggacaggcgaaaaaacgccgccgtcgcaggcgcaaacccaagccgaaggttg

SEQ ID NO: 29053 - DNA, 1006 bp, Neisseria gonorrhoeae
atggcgcagcatgtatttcttccccgctttccgtttatcgacatcgaccgcatccgctgggtgcgcgccggtttgaaagccttcaaacactacatccgcgaaaacggactgcccgacctgattcacgcccactgcatgaactatgcaggcatacttgcccaaaaaatttccgaaaaatacggcattccctacgttttaaccgaacacagcagcaccatcacgcgcggtctgatccgtcaccaccaatggcagccgatggaaaaagcagcggcgcccgcctccgcacgtctcgccgtcagccgccatttcgcacacgtcctgcaacacaaatacggctgcgaatggcagtacctccccaacataccgggtggaatattcaagcaaacatttgaataaaaagaaaaaaataacaaaccgcatttcgtgttctgcaccgtctcgcaccttcgccgcctcaaaggacacgatgtcctgctcactgcttttgcccgggcgttggcacaatgcccgcaactgcgcctgaacatcggcggcagcggacaggaagaacagcggctgaaacagcaggcggcagacttgggcatcgcccatgccgttacatttttaggcgcactgcaacccgaagcaatcttggatttgatgaggaacagcgacgccttcatcctcgccagccgcaccgaaaccttcggcgtggtctatatcgaagccctctcgcaagggttgcccgtcatcgccatacattgcggcggcgcggaatccatcgtttcagacggcaacggatacctcgtttccgttgacgatgccgatgtcctagcccttctcaaaatatatgaacaccatgccgatttttccgccgaacagctcagaaccgactgcctcgcaacattcggcgaagatgccgttatcggcagactgattgccgtattccgtcaggcggcgcggaacacggcgcgaaaacgcccgaaaaatagattaaaatgacgcaaaacaaccttcggattcaaat

SEQ ID NO: 29054 - DNA, 1032 bp, Neisseria gonorrhoeae
atgcaaaccctgaccatcatccgacccgacgatatgcacctgcacctgcgcgacggcgacgcgctcaaagccgttgccccttataccgcccgccagatggggcgcgccgtcatcatgcccaacctcaaaccgccagtcgtcagcgtagccgacgcgcttgcctacaaagcgcgcattatggcggcgttgcccgaaggcagcgcgtttgagccgctgatgacgctttacctgaccgaccaagccacgcccgaactcgtgcgcgaagccaaagccgccggcatcgtcgccttcaaactctaccccgcaggcgcgaccaccaattccgattccggcgtaaccgacctgttcaagctcatccccgtgttggaagaaatggcaaaacagggcatcctgttcctcgttcacggcgaagtaaccgaccccgaaatcgacattttcgaccgcgaagccgcctttatcgggcgcgtgatgaaacccgttttggcgcaagtgccgaatctcaaagtcgtgttcgaacacatcaccaccgccgaagccgcccgcctcgttttggaagccggcgacaacgttgccgccaccgttaccccgcaacacctcctgctcaaccgcaacgacctcttggtcggcggcgtgcgcccccatcatttctgcctgcccgtcctcaagcgcgaaacccaccgtcaggcattggtcgccgccgttaccggcgagaaggcgcacaaattcttcctcggcaccgactccgcgccgcacgccaaatccgccaaagaaaacgcctgcggctgcgccggtatgttcagcgcgatgaccgctatcgagctttacgccgaagtgtttgaaaaagcaggcgcgttggacaaactcgaagccttcgcctcgaaaaacggcgcaaggttctacggcattccggaaaacgccgacacgattacccttgtcaaacaaagccaaaccgttcccgcaagcgtcccttacggcgacggcgaacttgtcccgatgcgcgcgggcggcgaaatcggctggacggtgcagtat

SEQ ID NO: 29055 - DNA, 423 bp, Neisseria gonorrhoeae
atgaaaacagcccgccgccgttcccgcgagcttgccgtacaagccgtttaccaatcccttatcaaccgcaccgccgcgcccgaaattgctaaaaacatccgcgaaatgtccgactttgccaaagcggacgaagaattgttcaacaaactcttcttcggcacacaaaccaatgcagcggactacatccaaaaaatccgcccgctgctcgacagggacgaaaaagacctcaaccccatcgaacgcgccgttttgctgaccgcctgccacgagctttccgctatgcccgaaacgccctaccccgtcattatcaacgaagccatcgaagttaccaaaaccttcggcggcacggacgggcacaaattcgtcaacggcatcctcgacaaactcgccgcccaaatccgcccagacgagcccaaacgccgt

SEQ ID NO: 29056 - DNA, 474 bp, Neisseria gonorrhoeae
atgaacaccatcgcccccaacctcgacggcaaacacctccgcatcggcatcgtacaggcacgcttcaccaacgaaatcggcagccaaatgctcaaagtctgctgccgcaccctccaagaattgggcgtagcagacgaaaacatcaccgtcgccaccgtacccggcgcgcttgaaatccccatcgcgctgatgaactttgcctcttccgaaaaatttgacgcactgattgccatcggcgtcgtcatccgtggcgaaacctaccatttcgagctggttgccaacgaatccggcgcagggatcggccgcgtcgcactcgactacaacatcccgattgccaacgccgtcctgaccaccgaaaacgacgcgcaggcaattgaacggattggagaaaaagcctcggatgccgccaaagtcgccgtagaatgcgccaacctcgtcaaccttctgctcgaagaacagtttgaagacgaagaa

SEQ ID NO: 29057 - DNA, 1113 bp, Neisseria gonorrhoeae
atgaaagtaggtttcgtcggctggcgcggtatggtcggttcggttttgatgcagcgtatgaaagaagaaaacgacttcgcccacattcccgaagcgtttttctttacctcttccaacgtcggcggcgcggcacctgatttcggtcaggcggctaaaacattattggacgcgaacgacgttgccgagctggcgaaaatggacattatcgtcacctgccaaggcggcgattacaccaaatccgtcttccaagccctgcgcgacagcggctggaacggctactggattgacgcggcgtcctcactgcgcatgaaagacgacgcgattatcgccctcgaccccgtcaaccgcaacgtcatcgacaacggtctcaaaaacggcgtgaaaaactacatcggcggcaactgtaccgtctccctgatgctgatggctttgggcggcctgttccaaaacgatttggtcgaatgggcgaccagcatgacctaccaagccgcttccggcgcgggcgcgaaaaatatgcgcgaactcatcagcggcatgggcgcgattcacgcccaagtggcggacgagcttgccgatccttccagcgcgattctcgatatcgaccgcaaagtgtccgatttcctccgcagcgaagactatccgaaagccaacttcggcgtaccgctcgccggcagcctgattccgtggattgacgtggatttgggcaacggccagtccaaagaagaatggaagggcggcgtggaaaccaacaaaatcctcggacgcagcggcaatccgaccgtcatcgacggcctgtgcgtccgcatcggcgcgatgcgctgccacagccaagccatcactctgaagttgaaaaaagacctgcctgtttccgaaatcgaagcgattttggcaggcgcgaacgactgggtgaaagtcgtccccaacgaaaaagaagccggcatccgcgagctgacgcccgccaaagttaccggcacgctgtccgtccctgtcggacgcatccgcaaactgggcatgggcggcgaatacatcagcgcgttcaccgtcggcgaccaacttttgtggggtgcagccgaaccgatgcgccgcgtgttgcgtatcgtgttgggcagcctg

SEQ ID NO: 29058 - DNA, 504 bp, Neisseria gonorrhoeae
atggttgacgcttggtctgtccctgattttgaatcgaaaatctgtccgcccgaggcgttggcggcgcgtttggcgttgttgccgcgcccgctggtgtttaccaacggctgtttcgacatcctccacagggggcacgttacttatctggcgcaggcgcgttcggcaggggcggcgttggtgctggcgttgaataccgatgcttcggtgcggcgtttgggcaagggcggcgaccgcccggttaatcctttggagaaccgtgccgccgttgccgccgcgttggaaagtgtggatttggttacttggtttgacgaggatacgccggcggcgttgattgaggcggtcaagccggaggtgttggtcaagggcggcgattgggtcgtggataagattgtcggtgcggcggaaacgctggcacgcggcggtcaggtgttttcaattccgtttctgcatcagacttcgacaacgaagactttggcaaaaatccgtgcggcagagggcggaaaa

SEQ ID NO: 29059 - DNA, 1284 bp, Neisseria gonorrhoeae
atgagcgcaatcgttgatattttcgcccgcgaaattttggactcacgcggcaaccccacagtcgagtgtgatgtattgctcgaatccggcgtaatgggacgtgcggccgtaccgagcggcgcatccaccggtcagaaagaagctttggaacttcgcgacggcgacaaatcccgctattccggcaaaggcgtattgaaggccgtcgaacacgtcaacaaccaaatcgcccaagccctcatcggtatcgatgccaacgagcaatcttatatcgaccaaatcatgatcgaattggacggtactgaaaacaaaggcaatttgggtgcgaatgcgactttggcggtctctatggcggttgcacgcgccgctgccgaagactcaggcctgccgctttaccgctacttggggggcgcaggtccgatgtccctgcccgtaccgatgatgaacgtcatcaacggcggcgaacacgccaacaacagcctgaacatccaagagtttatgattatgcccgtcggcgcaaaatctttccgcgaagcgttgcgctgcggtgcggaaattttccacgccttgaaaaaactgtgcgacagtaaaggcttcccgaccacagtcggcgacgaaggcggtttcgcccccaacctgaacagccacaaagaagccctgcaactgatggtcgaagcggccgaagccgccggctacaaggcgggcgaagacgtattattcgcattggactgcgcgtccagcgagttctacaaagacggcaaataccacttggaagccgaaggccgctcctacaccaacgcggaatttgccgaatacttggaaggcttggttaacgaattcccgattatttccattgaagacgggatggacgaaaacgactgggaaggctggaaactgctgaccgaaaaattgggcaaaaaagttcaattggtcggcgacgacttgttcgtaaccaatccgaaaattcttgccgaaggcatcgaaaaaggcgtagcaaacgcattgctggtcaaagtcaaccaaatcggtactttaagcgaaaccctgaaagccgtcgatctggcaaaatgcaaccgctacgccagcgtgatgagccaccgctccggcgaaaccgaagacagtaccattgccgacttggcagtcgccaccaactgtatgcagattaaaaccggttctttgagccgttccgaccgcatggcgaaatacaaccaactgctgcgtatcgaggaagaattggcggaagccgcctactaccccggcaaagccgcattctaccaactgggcaaa

SEQ ID NO: 29060 - DNA, 786 bp, Neisseria gonorrhoeae
atgctcaccctgtacggcgaaactttcccttcgcggctgctgctcggcacggccgcctacccgacccctgaaatcctcaaacaatccgtccgaaccgcccggcccgcgatgattaccgtctcgctgcgccgcacgggatgcggcggcgaggcgcacggtcaggggttttggtcgctgcttcaagaaaccggcgttcccgtcctgccgaacacggcaggctgccaaagcgtgcaggaagcggtaacgacggcgcaaatggcgcgcgaagtgtttgaaaccgattggataaaattggaactcatcggcgacgacgacaccttgcagccggacgtgttccaactcgtcgaagcggcggaaatcctgattaaagacggcttcaaagtgctgccttattgcaccgaagacctgattgcctgccgccgcctgctcgatgcgggctgtcaggcgttgatgccgtgggcggctcccatcggcacgggtttgggggcggttcacgcctatgcgctcaaaatcctgcgcgaacgcctgcccgacacgccgctgattatcgacgcgggcttgggtttgccttcccaagcggcacaagtgatggaatggggttttgacggcgtattgttaaacaccgccgtttcccgcagcggcgaccccgtcaacatggcgcgcgccttcgcactcgccgtcgaatccggacggctggcatttgaagccgggccggtcgaagcgcgaaccaaagcccaagccagcacgccgacagtcggacaaccgttttggcattcggcggaatat

SEQ ID NO: 29061 - DNA, 840 bp, Neisseria gonorrhoeae
atggatattaaaatcaacgacatcaccctcggcaacaattcgcctttcgtcctattcggcggcatcaacgttttagaagatttggattccaccctccaaacctgtgcgcattacgtcgaagttacccgcaaactgggcatcccctatatctttaaagcctctttcgacaaggcaaaccgctcgtctatccattcctatcgcggcgtaggcttggaagaaggcttaaagatttttgaaaaagtcaaagcagagttcggcatccccgtcattaccgacgtacacgaaccccatcaatgccaacccgtcgccgaagtgtgcgatgtcatccagcttcccgcctttcttgcgcggcagaccgatttggtggccgcaatggcggaaacgggcaatgttatcaacatcaaaaaaccccagttcctcagcccttcgcaaatgaaaaacatcgtggaaaaattccgcgaagccggcaacgggaagctgattttatgcgaacgcggcagcagcttcggctacgacaacctcgttgtcgatatgctcggtttcggcgtgatgaaacaaacctgcggcaacctgccggttattttcgacgttacccattccctgcaaacccgcgatgccggttctgccgcatccggcggtcgtcgcgcacaggctttggatttggcacttgcaggcatggcaacccgccttgccggcctgttcctcgaatcgcaccccgatccgaaactggcaaaatgcgacggccccagcgcgctgccgctacaccttttagaaaattttttaatccgcatcaaagcattggacgatttaatcaaatcacaaccgattttaacaatcgag

SEQ ID NO: 29062 - DNA, 1455 bp, Neisseria gonorrhoeae
atgaaaccaaccatcgcgcttatcggccgccccaacgtcggcaaatctaccttgttcaaccgtttgacgcgcaccaaagacgcgctcgtgcatgacctgccgggtctgacccgcgaccgccattacggacacggcaaagtcggcagcaaaccttattttgtcatcgataccggcggtttcgagccggttgtggacagcggcattttgcacgaaatggcaaaacaaaccttgcaggctgtcgatgaagccgatgcggttgtgtttttggtggacggccgtaccggtttaacaccgcaagacaagattattgccgaccgtttgcgccaaagtccgcgtcccgtttatttggccgtgaataaaggcgagggcggcgacagggccgtacttgccgccgagttttacgagctggcattgggcgagccgcacgttatttccggcgcgcacggcgacggcgtgtattacctgattgaagaaattttagaaaacttccccgagcctgaagccgaagaagccgatgcaaaacatcccgtttttgccgttatcggtcgtccgaacgtcggcaaatctacgctggttaacgccattctcggcgaaaaacgcgtcatcgccttcgatatggcaggcacaacgcgcgacagcatccacatcgatttcgagcgcgaaggcaaaccgtttaccatcatcgataccgcaggcgtgcgccgtcgcggcaaagtggatgaagcggtggaaaagttctccgttatcaaagccatgcaggcggttgaagcggcaaacgttgctgttttggtattggacgcgcaacaggacattgccgaccaagatgcgacgattgccggttttgctttggaagcgggacgcgcgctggtagttgccgtcaacaaatgggacggcatcagcgaagagcggcgcgaacaagtgaaacgcgacatttcccgcaaactgtatttcctcgattttgccaagttccactttatttccgcgttgaaagagcgcggtatagacggtttgtttgaaagcattcaagctgcctacaacgcggcgatgattaagatgccgacgccgaaaatcacgcgcgtattgcaaaccgccgtcgaacgccaacagccgccgcgtgccggcttggtgcgtccgaaaatgcgttatgcccaccaaggcggcatgaatccgccggtgattgtggttcacggcaattcgctgcacgcgatttccgacagctatacgcgctatctgacccagaccttccgcaaagccttcaacctgcaaggcacgccgttgcggattcaatacaatgtttcggaaaacccgtatgaaaatgcggaagacaaaccgaagaaaaaaccgctgcgccgcgtcagcctgagcaaccgtattgagaaacgcgaaggccgaaaggaagagaaaaaccgcttcaagaagaaaaccaaagtcagtgtgaaaaaacaattcagcaaa

SEQ ID NO: 29063 - DNA, 974 bp, Neisseria gonorrhoeae
atgaggcggcgcgtgaatatgccgtctgaaatgtggatatgaaagcgaatatggatattgaaaccttccttgcaggggaacgcgccgccggcggataccgttgcggcttcgtggcgattgtcggtcgtccgaacgtgggcaaatcaacgctgatgaaccatctcatcggtcagaaaatcagtattaccagcaaaaaggcgcagacgacgcgcaaccgcgtaacggggatttataccgacgataccgcgcagttcgtgtttgtcgatacgccgggctttcaaaccgaccaccgcaacgcgctcaacgacaggctgaatcaaaatgttaccgaggcgctcggcggtgtggatgtggtggttttcgtcgtggaggcgatgcgccttaccgatgccgaccgcgtcgtgttgaaacaactgcccaagcacacgccggtcattttagtgatcaacaaaatcgacaaggacaaggcgaaagaccgttacgcgctggaggcgtttgttgcccaagtgcgcgccgaatttgaatttgcggcggcggaggcggtcagtgcgaaacacggtttgcggattgccaacctgttggagctgctcaagccgtatctgcccgaaagcgtaccgatgtatcccgaagacatggttacggacaaatcggcgcgttttttggcgatggaaatcgtgcgtgaaaaactcttccgctatttgggcgaggagctgccttatgcgatgaacgtcgaagtggagcagtttgaagagggagacggtttgaaccgcatctacatcgccgttttggtcgacaaagaaagccaaaaggcgattttgatcggtaaaggcggggagcgtttgaaaaaaatttccaccgaagcgcggctggatatggaaaaactgtttgataacaaagtatttttgaaggtctgggtcaaagtcaaatccggttgggcagacgacattcgcttcctgcgcgagctgggtttgtag

SEQ ID NO: 29064 - DNA, 3668 bp, Neisseria gonorrhoeae
ccatccccaaaccccgtgaaaaatcccgttggttcaatctttcgcaaggctcgctgcccttggctttggcgcgttatttgccgcacaagcggctcaaagccgtgctgacccaagatgcggaacaggcgttgcgccttcagacggcatggcggtttttccgtccgcacgacacggcggtgttcctgccggactgggaaacgctgccttacgagcgtttttctccgcatcaggatttggtgtcggagcggctgtcggcgttgtggcagattaaaagcggcgcggcggacgtgttgttcgtaccggttgccacggcgatgcagaagctgccgcccgtgccgtttttggcggggcgcacgttttggctgaaaacggggcagactttggatataggccgcctgaaaaccgatttggtggatgcgggctacaatcatgtttcccacgttgtcgcggcgggcgagtttgccgtgcgcggcggcattgtcgatttgttcccgatgggcagcgaaacgccgtaccgcatcgatttgtttgacgatgaaatcgacagcattaaaaccttcgataccgacacgcagcgcaccatttcccccgtttccgaaatccgcctgctgccggcgcacgagttccccaccgacagcgaggcgcaaaaaatcttccgcagccgcttccgcgaggaagtcgacggtaatccgaacgatgccgccgtgtacaaagccgtcagcaacggccacttcggcgcgggcgtggaatattatctgccgctgttttttgaaaacgagctggaaacgctgtttgactatatcggcgaagatgcgctgtttgtctctttgggcgatgttcatgccgaggcaaaccgcttttggaacgacgttaaatcacgttacgccatggcgcagggcgacgaaacctatccgcctttgcttccacagcatttgtatctctctgccgatgtgttcgcaggccgtctgaaaaactacggacaagttctgcctgatgtttccggcaaggcacactccctgcccgaccttgccgtcaaccgccaatccgacgatcctttgcaggcattgaaggattttcagacggcctttgacgggcggattttgctgtgcgccgaaagtttgggacggcgcgaaaccatgctcggtttcttgcagcaaaacggtttgaaagccaaacctgtgtccgactggcagggcttcttgtcggcgcacgagccgctgatgattacggtcgcgccgttggcttacggattcaaactgggcggactgcaatcttcaagccaacagcaaactgttcccgcctccgagggagaaggcaaagcggttaccgaccaaaccgaattttccgcatccgcaacaaaccctctccccagccctctcccgcaggagagggaacaaagtgccgccgccgtttcagacggcctgaaagcagccgccgtttcaaccgaaagcagcctgtatctcgtcgcaagtgatctgcacgggcaaacccgacagcaatctgccccctcccccgtgggggagggttggggagagggcaaagcggttgccgctcaaagtgccatcgccgtcatcaccgaatccgatctttaccaatacgtcgcccgttcgcgcgtccacaaccgccgtaagaaacacgccgccgtttcagacggcctgttgcgcgaccttgccgaaatcaatatcggcgatcccgtcgtgcacgaagaacacggcatcgggcggtatacgggcttggtaacgatggatttaggcggcgaaaccaacgaaatgatgttgctcgaatacgcgggcgaagcgcagctttatgtgcctgtttcgcaactgcatttaatcagccgctactccggtcaggcgcatgaaagcgtcgccctgcacaagctcggcagcggcgcgtggaacaaggcgaagcgcaaagccgccgaaaaagcgcgcgataccgccgccgagttgctcaacctctacgcccaacgcgccgcccaatcgggacacaagtttgaaatcaacgagtcggactatcaggcgtttgccgacggcttcggctacgaggaaaccgaagaccaggccgccgccatcgccgccgtgattaaagatttgacgcaggcgaagccgatggaccgacttgtgtgcggcgatgtcggtttcggcaaaaccgaagtcgcccttcgcgccgcgtttgtggcggtgatgggcggcaaacaggtcgccgtactcgccccgaccacgcttctggtcgagcagcacgcgcaaaacttcgccgaccgtttcgccgatttccccgtgaaagtcgccagcctttcgcgtttcaacaacagcaaagccaccaaagccacgctcgaaggcatggcggacggtactgtcgatatcgttatcggtacgcacaaattggtgcaggacgacataaaattcaaaaacttaggtttattgattatcgatgaagaacaccgcttcggcgtgcgacagaaagagcagctcaaacgcctgcgcgccaatgtcgacatcctaaccatgaccgccacgccgattccgcgcaccctcagcatggcgctcgaaggtctgcgcgacttctcgctgattaccactgcaccgagccgccgcctcgccgtgaaaacctttgtcaaaccgttcagcgaaggcagcgtgcgcgaagccgtgttgcgcgaactcaaacgcggaggacaggtatttttcctgcacaatgaagtagatacgattgagaatatgcgcgagcggctggaaaccctgctgcccgaagcccgtatcggcgtggcgcacggacaactgcgtgagcgcgagctggaacaagtcatgcgcgactttttgcagcaaagattcaatgtgttgctctgttccaccatcatcgaaaccggcatcgacatccccaacgccaacaccatcatcatcaaccgcgccgacaaattcgggctggcccaactgcaccagcttcgcggacgcgtcggccgcagccaccaccaagcctacgcctacctgctcacgcccgaatacatcaccaaagacgcagaaaaacgcctcgacgccatcgcggcggcagacgaactcggcgcaggtttcaccctcgccatgcaggatttggaaatccgcggcgcaggcgaaatcctcggcgaagggcagtccggcgaaatgatgcaggtcggcttcacgctctacaccgaaatgctcaaacaggccgtgcgcgacctcaaaaaaggccgccaacccgacctcgacgcaccgttgggcattaccaccgaaatcaaactgcacagcccggcattactgcctgaagactactgccccgacatccacgagcgcctcgtcctctacaaacgcctcgccgtatgcgaaaccgtgcagaaaatcaacgccatacacgaagaactcgtcgaccgcttcggcctgaccgaacaacccgtcaaaaccctcattgaaagccaccacctgcggcttgcggcaaaagaactgggtattgatgccatcgatgccacaagtgaagccgtaaccgttaccttcggcaaacaccactgtatcgacccgacggggattatcctgctgattcagacggataaaaaataccggctggcaggggcagacaaattgaggtttgcagcggaaatggaaaacatcgaggtcaggatcaataccgtcaaaaccgtactaaaaaccctgcaa

SEQ ID NO: 29065 - DNA, 1293 bp, Neisseria gonorrhoeae
atggcacaaaaaatccaatccgtcaaaggcatgaacgaccttctgcctgtcgggcaaaaagatttcaaactcacggctgtgttttggcaggcgtttgaggatacggtaaaccgttggacgcgagcttacggttatcagcaaatccgtacgccgattgtcgagcaaaccggtttgtttgtccgctccatcggcgaggaaaccgatgtagtcggcaaggaaatgtacaccttctccgattcaaacgattctttgagtttgagcctgcgtcccgaaggtacggcctcttgtctgcgtgcggtggtcgaacacaaccttctgtacaacagcccgcaaaagctgtggtatatggggccgatgttccgccgcgagcgtccgcaaaaaggacgctaccgccaatttcatcaggtcggtatcgaggctttgggttttgaagggccggatattgatgcggaaatcatcgcaatgtctgccgacttgtgggaaaaattgggtattcgcgaatacctgactttggaaatcaacagcttgggcaaccgtgaggaacgcgcggcacaccgtgcggcattggttgaatatctgacccgctatgaagcgcaactggacgaagacagcaaacgccgtctgaaaaccaatcctttgcgcgttttggatacgaaaaaccctgatttgcaggaaatctgcaatgccgcgccgcgtttggtagattacttgggcgaggcttcgcaaaaccactatgcacgcttcaaggcgatgttggacggtttgggtattcaatatattgaaaattcgcgcttggttcgcggtttggattattacaatcagacggtttttgagtggacgaccgacaaactcggcgcgcaggcgactgtgtgcggcggcggacgttacgacggtttgattgaagaactcggcggcaagcctgcgccgtccatcggctttgcgatgggcatcgaacggctgctgcttttggtgagcgaatacggttcgctggaagtgaacgccgcgcctgatgtctatgcaatgcaccaaggcgaaggggcggacttgcaggtgatgaaatacgcacaagccttgcgcgcgcaaggtttcaatgtaatacagcattccggctatcaaagcctgaaggcgcaaatgaaaaaagccgacaacagcggcgcgcgctttgccctgattgtcgcgcaagacgaactggcggacggtaccgttacgctcaaagacatgaacggcgcacacggtcagcaaaccgtttccgccaccgatttgacagatactttacaacaatggaagaacgca

SEQ ID NO: 29066 - DNA, 1026 bp, Neisseria gonorrhoeae
atggaggcccgcacaccccgggcaaatgaagcccaagccccccgcgcggatgaaatgaaaaaagaaagccgccccgcgtttgacgcggcagccgtaccggtatccgacagcgggtttgccgccaatgcaaatgtccgccgttttgtggacgatgaagtcgggaaaggggatttttcccaggcggaatggcaggatttttttgacaaagcggcttacaaggcggacatcgtcaagattatgcaccgaccctccacatcgcgtccgtggtatgtgttccgcacgggaaattcgggcagggcgaaatttcacggcgcgcgcaggttttatgcggaaaaccgcgcggttatcgatgatgtggcgcaaaaatacggcgtgcctgccgagcttatcgtggcgattatcgggattgaaacgaattacggcaaaaatacgggcagtttccgtgtggcggacgcattggcgactttaggctttgattatccccgccgcgccgggtttttccaaaaagaattggtcgagcttttaaagctggcaaaagaagaaggcggtgatgttttcgcctttaagggcagctatgcgggtgcaatgggtatgccgcaatttatgccttcgagctaccggaaatgggcggtggattatgacggggacggacatcgggatatatggggcaacgtcggtgatgtcgcggcatcggttgccaattatatgaagcagcacggttggcgcacgggcggtaaaatgttggtgtcggcgacgttggcgccgggtgcggatgttcaggcaatcattggcgaaaaaaccgccctgacgcggacggtggcggatttgaaggcgtacggcatcatccccggggaaacgctcgcagatgatgaaaaggcggttttgttcaaactggaaaccgcacccggcgtgtttgaatattatttgggcttgaacaatttttatacggtatggcagtacaaccacagccggatgtatgtaacggcggtcagggacattgccaattcgctcggcggcccgggattg

SEQ ID NO: 29067 - DNA, 1038 bp, Neisseria gonorrhoeae
atgtccgaaaacaaacaaaacgaagtcctgaccggttacgaacagctgaaacggcgcaaccgccgccgcctcgtaacggcaagctccctggttgccgcctcctgcatcctgctggcagccgcactcagttccgatcctgccgacagcaatcccgcaccgcaggccggcgaaaccggcgcaacggaaagccaaacggcaaacacggcacaaacccctgccttgaaatccgccgccgaaaacggggaaaccgccgccgacaaaccgcaggacttggcaggcgaagacaagccttctgccgccgacagcgaaatcagcgagcctgaaaacgtaggcgcgccgctggtgctgattaacgaccggctcgaagacagcaacatcaaaggtttggaagaatccgagaaactgcaacaggcagaaaccgccaaaaccgaaccgaagcaggcaaaacaacgcgctgccgaaaaagtgtcggcaactgccgacagtacggatacggtagcggttgaaaaaccgaaacgcactgccgaacccaaaccgcaaaaagcggaacgcactgccgaagccaagcccaaagccaaagaaaccaaaaccgccgaaaaagttgccgacaaaccgaaaactgctgccgaaaaaaccaaaccggatacggcaaaatccgacagcgcggtaaaagaagcgaaaaaagccgacaaggctgaaggcaaaaagacagccgaaaaagaccgttcggacggcaaaaaacacgaaacggcgcaaaaaaccgacaaagcggacaaaaccaaaaccgccgagaaggaaaaatccggcaaggcgggcaaaaaagccgccattcaggcaggttatgccgaaaaagaacgcgccttgagcctccagcgcaaaatgaaggcggcgggtatcgattcgaccatcaccgaaatcatgaccgacaacggcaaagtttaccgcgtcaaatcaagcaactataaaaacgcaagggatgccgaacgcgatttgaacaaactgcgcgtgcacggcatcgccggccaggtaacgaatgaa

SEQ ID NO: 29068 - DNA, 615 bp, Neisseria gonorrhoeae
atgaccttcccgcccctaaaatccctacttaaattctacgccgtcgttcccaccgccgattgggtggggcgcatggtcaaagcaggtgccgacacggtgcaactgcgctgtaaaaccttgcacggcaacgaattgaaacgcgaaatcgcccgctgcgtcgccgcctgtcaaggcagccgcacacagcttttcatcaacgaccactggcgcgaggcaatcgaagcgggcgcatacggcgtacatctcgggcaggaagacatggacaccgccgaccttgccgccatcgccgccgccggtttgcgtttgggtttgagtacgcactccgtcgccgaactcgaccgcgccctgttcgtacaccccggctacatcgccagcggcgcgattttccagaccacgaccaaacaaatgcccaccgccccgcaaggcttggacaaattgcgcgaatatgtggaacaggctcgcggcacgcccgtcgtcgccatcggcggcatcgatttgaacaacgcccgagccgtgctggccaccggcgtttcctcactcgccgccgtccgcgccgtaaccgaagcggcaaatcccgaagcggtggttaaagcgtttcaggctttgtgggatgga

SEQ ID NO: 29069 - DNA, 2748 bp, Neisseria gonorrhoeae
atgaccgacgcaaccatccgccacgaccacaaattcgccctcgaaaccctgcccgtcagccttgaagacgaaatgcgcaaaagctatctcgactacgccatgagcgtcattgtcgggcgcgcgctgccggacgttcgcgacggcctaaagccggtgcaccggcgcgtactgtacgcgatgcacgagctgaaaaataactggaatgccgcctacaaaaaatcggcgcgcatcgtcggcgacgtcatcggtaaataccacccccacggcgattccgcagtttacgacaccatcgtccgtatggcgcaaaatttcgctatgcgttatgtgctgatagacggacagggcaacttcggatcggtggacgggcttgccgccgcagccatgcgctataccgaaatccgcatggcgaaaatctcacatgaaatgctggcagacattgaggaagaaaccgttaatttcggcccgaactacgacggtagcgaacacgagccgcttgtactgccgacccgtttccccacactgctcgtcaacggctcgtccggtatcgccgtcggtatggcgaccaacatcccgccgcacaacctcaccgacaccatcaacgcctgtctgcgtcttttggacgaacccaaaaccgaaatcgacgaactgatcgacattatccaagcccccgacttcccgaccggggcaaccatctacggcttgggcggcgtgcgcgaaggctataaaacaggccgcggccgcgtcgttatacgcggtaagacccatatcgaacccataggcaaaaacggcgaacgcgaagccatcgttatcgacgaaatcccctatcaggtcaacaaagccaagttggtcgagaaaatcggcgatttggttcgggaaaaaacgctggaaggcatttccgagctccgcgacgaatccgacaaatccgggatgcgcgtcgttatcgagctgaaacgcaacgaaaatgccgaagtcgtcttaaaccaactctacaaactgactccgctgcaagacagtttcggcatcaatatggttgttttggtcgacggacaaccgcgcctgttaaacctgaaacagattctctccgaattcctgcgccaccgccgcgaagtcgttacccgacgtacgcttttccggctgaagaaggcacgccatgaagggcatatcgccgaaggcaaagccgtcgcactgtccaatatcgatgaaatcatcaagctcatcaaagaatcgcccaacgcggccgaggccaaagaaaaactgcttgcgcgcccttggcgcagcagcctcgttgaagaaatgctgacgcgttccggtctggatttggaaatgatgcgtccggaaggattggctgcaaacattggtctgaaaaaacaaggttattacctgagcgagattcaggcagatgctattttacgcatgagcctgcgaaacctgaccggcctcgatcagaaagaaattatcgaaagctacaaaaacctgatgggtaaaatcatcgactttgtggatatcctctccaaacccgaacgcattacccaaatcatccgtgacgaactggaagaaatcaaaaccaactatggcgacgaacgccgcagcgaaatcaacccgttcggcggcgacattgccgatgaagacctgattccgcaacgcgaaatggtcgtgaccctgacccacggcggctatataaaaacccagccgaccaccgactatcaggctcagcgtcgcggcgggcgcggcaaacaggcggctgccaccaaagacgaagactttatcgaaaccctgtttgttgccaacacgcatgactatttgatgtgttttaccaacctcggcaagtgccactggattaaggtttacaaactgcccgaaggcggacgcaacagccgcggccgtccgattaacaacgtcatccagctggaagaaggcgaaaaagtcagcgcgattctggcagtacgcgagtttcccgaagaccaatacgtcttcttcgccaccgcgcagggaatggtgaaaaaagtccaactttccgcctttaaaaacgtccgcgcccaaggcattaaagccatcgcactcaaagaaggcgactacctcgtcggcgctgcgcaaacaggcggtgcggacgacattatgttgttctccaacttgggcaaagccatccgcttcaacgaatactgggaaaaatccggcaacgacgaagcggaagatgccgacatcgaaaccgagatttcagacgacctcgaagacgaaaccgccgacaacgaaaacaccctgccaagcggcaaaaacggcgtgcgtccgtccggtcgcggcagcggcggtttgcgcggtatgcgcctgcctgccgacggcaaaatcgtcagcctgattaccttcgcccctgaaaccgaagaaagcggtttgcaagttttaaccgccaccgccaacggatacggaaaacgcaccccgattgccgattacagccgcaaaaacaaaggcgggcaaggcagtattgccattaacaccggcgagcgcaacggcgatttggtcgccgcaaccttggtcggcgaaaccgacgatttgatgctgattaccagcggcggcgtgcttatccgtaccaaagtcgaacaaatccgcgaaaccggccgcgccgcagcaggcgtgaaactgattaacttggacgaaggcgaaaccttggtatcgctggaacgtgttgccgaagacgaatccgaactctccggcgcttctgtaatttccaatgtaaccgaaccggaagccgagaac

SEQ ID NO: 29070 - DNA, 868 bp, Neisseria gonorrhoeae
gccggaaaaaatgttcaagccgcatcggcggcagacgggacgaaaaatgacgtttgacgaatggttgggcttgtcaaaactgcctaaaattgaagcaaggatgctgctgcaatatgtttcggaatatacgcgcgtgcagttgttgacgcggggcggggaagaaatgccggacgaaatccgacagcgggcggacaggctggcgcaacgccgtctgaacggcgagccggttgcctatattttaggtgtgcgcgaattttatggcagacgctttacagtcaacccgaacgtgctgattccgcgccccgaaaccgaacacttggtcgaagccgtattggcgcgcctgcccgaaaacgggcgcgtgtgggatttggggacgggcagcggcgcagttgccgtaaccgttgcgctcgaacgccccgatgcgtttgtgcgcgcatccgacatcagcacgcccgcccttgaaacggcgcggaaaaatgcggcggatttgggcgcgcgggtcgaatttgcacacggttcgtggttcgacaccgatatgccgtctgaaaggcaatgggacatcatcgtgtccaacccgccctatatcgaaaacggcgataaacatttgtcgcaaggcgatttgcggtttgagccgcaaatcgcgctgaccgacttttcagacggcctaagctgcatccgaaccttggcgcaaggcgcgcccgaccgtttggcggaaggcggttttttgttgttggaacacggtttcgatcagggcgcggcggtgcgcggcgtgttggcggagaatggtttttcgggagtggaaatcctgccggatttggccggtttggacagggttacgctggggaagtatatgaagcatttgaaataa

SEQ ID NO: 29071 - DNA, 384 bp, Neisseria gonorrhoeae
atggcatacagcgataaagtaatcgaccactacgaaaatccccgcaacgtcggcactttcgacaaaaacgacgagtccgtcggcaccggcatggtcggcgcgcccgcctgcggcgacgtgatgcgcctgcaaatcaaagtgaacgatgaaggcatcatcgaagatgcgaaattcaaaacttacggctgcggttccgccatcgcttcgtccagcctgattaccgagtgggtcaaaggcaaaagtctggatgacgcgctggcaatcaaaaacagcgaaatcgccgaagaactggaattgccgccggtaaaaatccactgctccatcttggctgaagatgcggtaaaagcggccgttgccgactaccgcaaacgtcaggaaaacaga

SEQ ID NO: 29072 - DNA, 553 bp, Neisseria gonorrhoeae
ggtgaagacgtaatctatatgaatgatggtgtatttagaaataaattagccattcaagatccacttaaatttaaaaaaggtcgaaagagacatttctgctatttccgcccaaaatctgcttttgcaacccattacaggcaatttcgatttggcgcatttacagaccattcatcgcgaactgtttggcaatgtttatgattgggcaggaaaaatccggagggttgatatttctaaaggtaatacccgatttgccaattttgcttttatcgaaaacgaaagccgtaaacttttggagaagctgaaaaacgaaaactatttgcgggtgttggataaagataaattcgccgagcgtgcagcctattatttggacgagttgaacgtcctacatccttttcgtgaaggaaacggcagaacattgcgcctgtttatgacacaattggcaataaaaaacggttttcagatacattggcaaaatatctctgccgaacaaatgattcaagcctgtattcaggcataccatgccgatagcagcttattggcacgcctaattatt

SEQ ID NO: 29073 - DNA, 777 bp, Neisseria gonorrhoeae
atgaaagaacacaaagcccgcaagcgtttcgggcagaattttttgcaggacacgcggattatcggcgatattgtcaacgccgtgcgcccgcaggcggatgatgtcgtgattgaaatcggcccgggtttggcggcaattaccgaacctttggcgaaaaagctgaaccgcctgcacgttgtcgaaatcgaccgcgacatcgtatgccgtctgaaaacgctgccgtttgcggataaactggtgattcacgaaggcgacgtgttgcagtttgatttcaacggcatctcaggcaaaaagaaaatcgtcggcaacctgccgtataacatctccacgccgcttttgttcaaactggcggaggtggcggacgatgtcgccgatatgcactttatgttgcaaaaagaagtggtcgagcgcatggttgccgcgccgaaaagcaacgactacggtcgcttgggtgtgatgctgcaatattttttcgatatggagctgctgattgacgtgccgcccgaatcgttcgatcccgcgccgaaaatcgattccgcagtggtgcgcatgattccggtgaaacaccgtatcggcaaggcggacgatttcgatcatttcgccaaactggtgaaactcgccttccgccaacgccgcaaaaccatacgcaacaacctgaaagaacttgccgacgacgatgatttgcaggcagtcggcatcagtccgcaagaccgtgccgaacacatcgcgccggagaaatatgtggcgttgagcaattatctggcggacaaggccgtc

SEQ ID NO: 29074 - DNA, 444 bp, Neisseria gonorrhoeae
atgagactgaccaccaaagggcgtttcgccgttaccgctatgctggatttggcgatgaacgcgcaaaccggcgccgtcaaactcagtgccatcagcgaacgccaaaatatatccctctcctatctcgagcaattgttcggcaaactccgccgcgccggactggttgaaagcctgcgcgggcccggcggcggctacatcctcgccgcccctcccgcacaaatcaacatcgcccaaatcatttccgccgccgaagaccggctggacgcgacccaatgcggcagcaaagccaactgccaccacggcgcgccctgcctgacgcacgacctttgggagaatttaaacaaaaccatcaacgactatctcggcagcgttaccctgcaaagcatcatcgaacagaaaaacaacggcgacggcagccgcgtcgtccaatttacacacatccat

SEQ ID NO: 29075 - DNA, 1170 bp, Neisseria gonorrhoeae
atgaaacgtgatttgagcaaaatgacctgcattgaagacttgcaccgcgttgccaagcgcaaaatgccgcgtatgttttacgattacatcgattcgggttcgtggacggaaacgacttatagggagaatacttcggatttcaaagatatccgcttccgacaaaaggtattggtcaatatggagggacgcagcctcgaaaccaaaatgatcgggggggatgtgaaaatgccggtggcgattgcgccgacgggttttaccggcatggcacacgcagacggcgaaattttggcggcgcgtgcggcggagaagttcggtattccgtttacgttgtccaccatgtccatctgctcgattgaagacgttgccgagaacaccagcgcgccgttttggtttcagctttatgtgatgcgcgaccgcgaatttatggaaaacctgattaagcgtgcgaaagatgccaaatgttcggcattggtattgactgccgatttgcaggttttgggtcaacgccacaaagacatcaaaaacggcctgtccgcgccgccgaaaccgaccatcgccaatttaatcaatctggcgaccaagcccgaatggtgcatgaaaatgctgaacacggaacgccgcacgttccgcaatatcgtcggacacgccaaaaacgtcggcgatttgtcttcactttcttcgtggacggcggaacagttcgacccgcgcttaagctgggacgacgtggcgcggattaaagatttgtggggcggcaagctgattatcaaaggcattatggaacccgaagacgcggaaaaggcggcgaaaagcggtgcggatgcattggtcgtttccaaccacggcggccgccagctcgacgatactgtgtccgccatcaaggccttgcccgatattgtttccgcagtcggcagcgacatcgaagtttggatggacagcggtatccgcagcggtcaggatattttgaaggcgtgggctttgggtgcgaaaggcacgatgataggtcgggcgttcctgtatggtttgggtgcgtatggcgaagaaggcgtaacgcgcgcgctggagattttgtacaaggaaatggatgtgtcgatggcgtttacgggacaccgcgatattcaagatgtcgatgcctcgattttgaggagtaaggattggggcagggaaacggtt

SEQ ID NO: 29076 - DNA, 1200 bp, Neisseria gonorrhoeae
atgaagaactaccacgcgcccgacgaaaagggctttttcggcgaacacggcgggctttatgtttccgaaaccctgattcccgctttgaaagagctggaacaggcctacaacgaagcgaaaaacgatcctgaattttgggcggagttccgccgcgatttgaaacattatgtcggcaggcccagccccgtttaccacgccgcgcggttgtccgagcatttgggcggcgcgcaaatctggttgaagcgcgaagacttgaaccacaccggcgcgcacaaggtcaacaacaccatcggtcaggcattgcttgcccgccgtatgggcaaaaaacgcgtcatcgccgaaaccggcgcgggtcagcacggcgtggcttctgccaccgtcgccgcacgtttcggcatgacttgcgacgtgtacatgggtgcggacgatattcaacgccaaatgccgaatgtgttccgtatgaagctgcttggtgcgaatgtcatcggcgttgacagtggcagccgtactttgaaagacgcgatgaacgaagcgatgcgcgaatgggtcgcccgagtggacgatacgttctacatcatcggcaccgccgccggccccgcgccgtatcccgaaatggtgcgtgatttccaatgcgtcatcggcaacgaagccaaagcgcagatgcaggaagccaccggcagacagcccgacgtcgccgttgcctgcgtcggcggcggctcgaacgccatcggtttgttctatccctatatcgaagaagaaaacgtacgtttggtcggcgtagaagcaggcggtttgggcgtggatacgcctgaccacgccgcgccgattacttcgggcgcaccgattggcgtactgcacggcttccgcagctatctgatgcaggacgaaaacggccaagtcttggggacgcactctgtttccgcaggcttggattaccccggcatcggcccggaacacagccatctgcacgacatcaagcgcgtcgaatacaccgttgccaaagatgacgaagcactcgaagcctttgacttgctctgccgattcgagggcatcatccccgcgctcgaatccagccacgccgttgcttgggcggtgaaaaacgcgccgaaaatgggtaaagaccaagtgattttggtcaacctgtcgggtcgcggcgacaaagacatcaataccgtggcgaaactcaaaggcattgagctg

SEQ ID NO: 29077 - DNA, 789 bp, Neisseria gonorrhoeae
atgattactgtgaacacactgcaaaaaatgaaggcggccggcgagaaaatcgttatgctgaccgcttacgaatccagttttgccgcgctgatggacgatgccggcgtggatgtgctgttggtcggggattctttgggaatggcggttcaggggcgacagtcgacgctgccggtcagcctgcgcgatatgtgctatcacaccgaatgtgtagcacgcggtgcaaaaaatgcgatgattgtcagcgatttgccgtttggtgcatatcagcagagtaaggagcaggcgtttgccgccgccgccgaactgatggctgccggcgcgcatatggtcaaactcgaaggcggcgtgtggatggcggaaacgactgaatttctgcaaatgcgcggaattccggtctgtgcccacatcggtctgaccccgcaatccgtgtttgccttcggcggatataaagttcaggggcgcggcggcaaggcgcaggcgttgcttaacgatgccaaggcgcatgatgaagccggagctgccgtcgtactgatggaatgcgtgccggcggaactggcaaaaaaggtaactgaaactgtttcctgtccgaccatcggcatcggggcgggcgcggattgcgacggtcaggttttggtgatgcacgatatgctcggtattttcccgggcaaaacggcgaaattcgtcaaaaactttatgcgcgggcaaagcagcatccaggctgcggttcgggcgtatgttgccgaagtcaaagccaaaaccttccctgctgcggaacatatttttgcagat

SEQ ID NO: 29078 - DNA, 4779 bp, Neisseria gonorrhoeae
atgaaagccaaacgttttaaaattaacgccatatccttatccatctttcttgcctatgcccttacgccatactcagaagcggcattggtgagagacgatgtcgattatcaaatattccgtgactttgcagaaaacaaaggcaaattttttgtcggcgcaaccgatttatcagtgaaaaacaaacgaggtcaaaacatcggcaacgcgttatccaacgtaccgatgattgattttagcgttgcagatgtcaacaaacgcatagcaacggtagtcgatccccaatatgccgtcagcgtcaaacacgccaaagcagaagtccatactttttattacggccaatacaacggtcataatgatgtagccgacaaagaaaatgaataccgcgttgtcgaacaaaataactatgaaccccataaagcttggagtgcgagcaatttaggccgcctcgaagattataatatggcgcgttttaataagtttgtaaccgaagtggcaccgattgcaccaactgatgccggcggcggattagatacttacaaagataaaaaccgtttttcctcttttgtcagaatcggtgcgggcaggcaattagtttatgaaaaaggggtttatcatcaagaaggaaatgaaaaaggctacgatttgcgcgatctttcacaagcctatcgttatgccattgcaggtacgccttataaagatattaatattgaccaaacaatgaataccgaaggtttgatcggctttggtaatcataataaacagtattcggcagaagaacttaaacaagcactttcgcaagatgcgttaacaaattacggcgtgttgggcgatagcggctctccgttatttgcttttgacaaacaaaaaaatcaatgggtctttttgggaacttacgattattgggcaggttacggaaaaaaatcatggcaagaatggaatatctataaaaaagaatttgcagataaaatcaaacaacacgataacgccggcaccgtcaaaggtaatggagaacatcattggaaaaccacgggtacaaacagccatatcggttcgacagcggtaaggcttgccaacaatgaaggagatgcgaacaacggacaaaatgttacctttgaagacaacggcactttggtattggatcaaaacatcaaccaaggcgcgggcggcctgtttttcaaaggcgattacacagtcaaaggcgcaaataatgacatcacttggttaggtgcggggattgatgttgccgacggcaaaaaagtcgtttggcaagtcaaaaatccgaatggcgacagattggcaaaaatcggcaaaggcactttggaaataaacggcacaggcgttaaccaagggcaattaaaagtcggcgacggtacggttattctgaatcaaaaagccgattcaaaccaaaaagttcaggctttctcccaagtcggcattgtcagcggacgcggtacattggtgctgaacagtccggaccagattaacccgaataatctgtatttcggtttccgtggcggtcgtttggatgccaatggcaatgacttgacttttgaacacatccgcaacgtggatgaaggcgcgcgcattgtcaaccacaacacagaccacgcctccacaatcacactaacgggtaaatctttaattaccaatccgaacagcctttcggtacatagtatacaaaatgactatgacgaagataattatagttattattaccggccaaggcgacccatcccacaaggcaaagatctttattacaaaaactatcgttattacgccctaaaatccggtggcagtgttaacgcaccgatgcccgaaaacggacaaacggaaaataacgactggattttaatgggcagcacacaagaagaagccaagaaaaacgcgatgaaccataaaaacaatcagcgtattagcggttttagcggtttctttggcgaagaaaacggaaaaggacataacggcgcattaaaccttaatttcaatggcaaaagcgcgcaaaaccgtttcttgttaacaggcggcgccaatttaaacggaaaaataagcgtaactcaaggcaatgtcttgttatcaggtcgtccaacaccacacgcaagagattttgtgaacaaatcttcagcccgaaaagacgcacatttctccaaaaacaatgaagtcgtatttgaagacgactggataaaccgcacattcaaagccgcagaaattgcggttaaccaatccgcatcattctcttccggcagaaatgtatccgacatcaccgccaacatcaccgcaacagacaacgccaaagtaaatttgggttacaaaaacggcgatgaggtttgcgtgcgctcggactataccggttacgttacctgcaacacaggcaacttatccgataaggctttaaacagctttgatgcgacacggattaacggcaatgtgaatttgaatcagaatgcggcattggtcttgggcaaggctgcattatgggggcaaattcaagggcaaggaaacagccgtgtcagcctaaaccaacatagcaaatggcatttgaccggcgacagccaagtacacaatctgtcattggcggatagccatattcatttgaacaacgcttccgatgcgcaaagtgcaaataaataccacacgatcaaaatcaatcatttatccggtaacgggcattttcattatctgacggacttggcgaaaaatcttggggataaagtgcttgtgaaggaatccgcatccggccattatcagctccatgttcaaaataaaacaggcgaacctaatcaggaagggctggatctctttgatgcatcatccgtacaagaccgctcccgcctttttgtttccttggcaaatcattacgtcgatttaggcgcattgcgttatacaatcaaaacagaaaacggtattacccggttgtacaatccttatgccgggaaccgccgcccagtcaagccggccccgtctcctgccgcaaacacggcttctcaagcacaaaaggcaacacaaacggacggtgcacaaattgccaaacctcaagatattgtcgtcgcaccgcccagcccgcaagcaaatcaagccgaagaagcaaaacgccaacaagcaaaagcggagcaagtgaagcgtcagcaagcagaagcagggcgtaaatcggcagagttgtcggcaaaacaaagggccggggaagaggaacgccgtcaaacagcccaatcccagccgcaacgccgcaaacgccgtgccgcaccgcaggattatatggcagtttcccaagaccgtccgaaacgccgcggacaccgttcggtacagcaaaacaatgtggaaattgcccaagcccaagcagaacttgcgcgccgacagcaggaagaacgcaaagcggcagagttgttggcaaaacaaagggcagaagccgaacgtgaggctcaagcattggctgcgcgccgaaaagccgaagccgaagaggcaaaacaccaagctgccgaacttgcacatcgccaggaagcaaaacgcaaagcggcagaatccgcgaaacgaaaagctgaggaagaagagcaccgtcaaacagcccaatcccagccgcaacgccgcaaacgccgtgccgcaccgcaggattatatggcagtttcccaagaccgtccgaaacgtcgcggacgcagatctactctgccggcaccgccctcgccatcatttgattcatcagcttacgcagcacccagggccttgcataatccggactggtatgaaaatgattatgaagaaatccccttggatgcgctggaagatgaagatgtatccgaatcggttgacacatcagacaaacagcctcaagacaatacggaacttcatgaaaaagttgaggcagtgagtttgcaaccaagagccgcgcagccgcgaacccaagccgccgcgcaagccgatgcagtcagcaccaatactaactcggctttatctgacgcaatggcaagcacgcaatctatcttgttggatacaggtgcttcattaacacggcacattgcacaaaaatcacgcgctgatgccgaaaaaaacagtgtttggatgtcaaacaccggttatggccgtgattatgcttccgcacaatatcgccggtttagttcgaaacgcacgcaaacacaaatcggcattgaccgcagcttgtccgaaaatatgcagataggcggagtattgacttactctgacagtcagcatacttttgatcaggcgggcggcaaaaatacttttgtgcaagccaacctttatggtaagtattatttaaatgatgcttggtatgtggccggcgatattggtgcgggcagcttgagaagccggttacaaacgcagcaaaaagcaaactttaaccgaacaagcatccaaaccggccttactttgggcaatacgctgaaaatcaatcaattcgagattgtccctagtgcgggtatccgttacagccgcctgtcatctgcagattacaagttgggtgacgacagtgttaaagtaagttctatggcagtgaaaacactaacggccggactggattttgcttatcggtttaaagtcggcaaccttaccgtaaaacccttgttatctgcagcttactttgccaattatggcaaaggcggcgtgaatgtgggcggtaaatccttcgcctataaagcagataatcaacagcaatattcagcaggcgccgcgttactgtaccgtaatgttacattaaacgtaaatggcagtattacaaaaggaaaacaattggaaaaacaaaaatccggacaaattaaaatacagattcgtttc

SEQ ID NO: 29079 - DNA, 768 bp, Neisseria gonorrhoeae
atgaccgcgaccgaacacgacaacgacgacgcactcctgctgcggtacagccgccacatcctcttggacgaaatcggcatcgaagggcagcagaagctttccgccgcgcatattttggtcgtcggctgcggcggattgggcgccgccgccctgccctatctcgccgcctcgggcgtcggcacgctgaccatagccgattccgacacggtcgagctgcacaacctgcaacgccaagtcgcatttgacgagggcgatgtcggcaagcctaaagccgaaaccttggcaggccgcctgaaacgcatcaaccatactgtcgatgtccgcgccgtcaacgaaaaactcgacggctgccgcctgaccggtttggttcaaaccgccgacatcgttttagactgctgcgacaactacgccacgcggcaggcggtcaaccgtgcctgcgtgcaaacgaaaacaccgctggtttcaggggcggcggtacgttttgaaggacagcttgccgcataccgtcccgacttgcccgactcgccgtgttacgcctgcctgttcgacggcggatcggcttcagacggcatctgttccctcttcggcgtgctctcgccgctggtcggcatcgtcggctgcacacaggcggcggaggctctgaaaatcctgctggaagcgggcgaaccgtcgcacggcaggctggcggtttaccgtgccttggaagggggctggcaatatttcgacctgccgcgcaaccccgaatgcccggtttgcggcgcggcacgg

SEQ ID NO: 29080 - DNA, 987 bp, Neisseria gonorrhoeae
atgaaaattaccgttatcggcgcaggttcgtggggtacggcgctcgccctgcatttttcccaacacggcaaccgcgtatccctgtggacgcgcaacgcagaccaagtccgccaaatgcaggaagcgcgtgaaaacaaacgcggactgcccggcttttcctttcccgaaaccttggaagtgtgtgcggatttggcagaggcgctcaaagacagcggacttgtccttatcgtaacctccgttgccggattgagaagcagcgcagagctgctcaaacagtacggcgcgggacacctccccgtcctcgccgcctgcaaaggcttcgagcaggatacagggctgctgaccttccaagtcttgaaagaagtattgcccgacaataagaaaatcggcgtactttccggtccgagttttgcacaggaactcgccaaacaactgccctgcgccgtcgtcctcgcctccgaaaaccaagagtggattgaagaactcgtaccgcagctcaacacgaccgtcatgaggctttacggcagtaccgacgttatcggcgtggcagtaggcggttcagtcaaaaacgtcatggcaatcgctaccggactctccgacggactcgaatacggactcaacgcccgtgccgcactggttacgcgcggactggccgaaatcacccgccttgcctccgcaatgggcgcgcagcccaaaaccatgatggggcttgccggcatcggcgatctcatcttgacctgtaccggtgcactttcgcgcaaccgccgcgtcggcttgggtttggcagaaggcaaggaactgcatcaggtgctggtcgaaatcgggcacgtttccgaaggggtcagcaccatagaagaagtcttcaataccgcctgcaaataccaaatcgatatgccgattacccaaaccctgctgcaactcatccgcaaagaaatgacccctcagcaggtcgtcgaaaggctgatggaacgcagcgcgcgtttcgaa

SEQ ID NO: 29081 - DNA, 429 bp, Neisseria gonorrhoeae
atgaaaaccttttcagcgaaaccccacgaggtgaagcgcgaatggttcgtcatcgatgcccaagacaaagtcttgggtcgcgttgcaaccgaagtcgccagccgtctgcgtggcaaacacaaacctgaatacaccccccacgtcgataccggcgattacatcatcgtcatcaatgcggacaaactgcgtgtaaccggtgccaaattcgaagataaaaaatacttccgccattccggttttccaggcggcatctacgagcgcactttccgcgaaatgcaagatcaattcccgggccgcgctttggagcaggctgtaaaaggtatgctgcccaaaggtccgctgggttacgccatgattaaaaaactgaaagtgtacgctggtgcggagcatgcccatgctgcgcaacaacccaaagttttggaactgaaa

SEQ ID NO: 29082 - DNA, 918 bp, Neisseria gonorrhoeae
atgaccaataaacccgccaaacgcccggtcaacggcgttcttcttctcgacaaacccgaaggcctttccagcaacaccgccctgcaaaaagcgcggcgtttgtttcatgccgaaaaagcagggcataccggcgtgctcgatcctttggcaaccggacttttgcccgtctgcttcggcgaagcggccaagttcgcccaatacctgctggatgccgacaaagcctacaccgccacgctgaaactcggcgaagccagcagcacgggcgatgccgaaggagaaatcattgccgccgcccgcgccgatatttccttagccgaatttcagacggcctgccaagcactgacaggcaacatccgccaagtgccgccgatgttttccgccctcaagcacgaaggcaaaccgttgtacgaatacgcgcgcaaaggcattgttatcgaacgcaaaccgcgcgacattaccgtttactctatcgatattgccgagtttgacgcgcccaaagccgtgataagcgtgcgttgcagcaaaggcacctacatccgcaccctcagcgaaggcatcgccaaacacatcggcacattcgcccacctgaccgccctacgccgcaccgaaaccgccggctttaccatcgcccaaagccacacgctcgaagctttggcaaatttaaacgaaacagaacgcgacggtctgctgctgccctgcgacgtattggtttcacactttccccaaaccgttttaaacgattatgccgtccatatgctccaatgcgggcaacggccgcgtttcgaggaagacctgccttccgatacgccggtacgcgtttacacggaaaacggccgctttgtcggtttggcggaatatcaaaaggaaatatgccgtatgaaagccttgcgcctgatgaacacggcggcatcctccgcc

SEQ ID NO: 29083 - DNA, 981 bp, Neisseria gonorrhoeae
atggctgcgtacgacagtttgatggtatttacaggcaatgccaatcccgaattggcacaacgtgttgtcaggcatttggacatttctttgggcaatgcttccgtatccaagttttcagacggcgaagttgccgtcgaactgttggaaaacgtacgcgggcgcgacgttttcatccttcagccgacctgtgcgccgaccaatgacaacctgatggaaatcctgacgatggcggatgcactgaagcgtgcttcggcaggtcgtattaccacagccattccgtatttcggctatgcgcgccaagaccgccgtccgcgttccgtccgcgttccgatttctgccaaactggtggcaaatatgctgtattcggcagggatcgaccgtgttttgactgtcgatttgcatgccgaccagattcaaggtttcttcgatattccggtggacaatatttatgccactccgattttgttgaacgacatcaagcagcagcggattgaaaatctgaccgtcgtcagcccggacatcggcggtgtcgtccgcgcccgcgccgttgcaaaatccctgaatgccgacttggcaatcatcgacaaacgccgcccgaaagccaatgtggcggaagtcatgaacatcatcggcgatattcaaggcaaaacctgtctgattgtggacgatatgattgacactgcaaatacgctgtgcaaagccgccgtcgccttgaaagagcgcggtgcagaacgtgtcttggcttatgccagccacgccgtattctccggagaggcggtcagccgtattgcctcatccgaaatcgaccaggtggtcgtaaccgataccattcctttgtctgaagcggctaaaaactgcgaccgtatccgtcaggtaacgattgcaggtttgttggccgaaaccgtccgccgcattagcaatgaagaatccgtctcatatcttttcaatgaagaagtgatgacaggcagcatgttgctgccg

SEQ ID NO: 29084 - DNA, 1242 bp, Neisseria gonorrhoeae
atgtccaacgaaaaccgtacctgttccttttgcggaaaatccaaatcacacgccaaacacctgattgagggcaaaaacgcctatatctgcgacgaatgcgtcgcaaactgcctcgaaatattgtacgaaggcgacaacggcggcacgcctccggaaaatgccggaggggagccggaagaatccggcaaactgcccacgcccgccgaaatcgttgccaacctcgacgattatgtcatcgggcaggggcaggcgaaaaaggcgctggcggttgcggtttacaaccattacaaacgcctgcgccacccgaaagccgacggcggtgtcgaattgtcgaaatccaacatcctgcttatcggcccgaccggatcgggtaaaacgctgttggcgcaatctttggcacgcaaactggacgtgccgttcgtgatggcggatgcgaccacgctgaccgaagccggctatgtcggcgaagatgtcgaacaaatcattaccaaactgttgggcaaatgcgatttcgatgtcgaaaaagcccggcacggcattgtctatattgacgaaattgacaaaatttcgcgtaaaagcgacaacccgtccatcacgcgcgacgtgtccggcgaaggcgtgcagcaagccttgctgaaactgattgaaggtacggtggcaagcgttccgccccaaggcggacgcaagcatccgaatcaggaatttatcaacgttgataccgccaacatcctgtttatctgcggcggcgcgtttgcaggcttggaaaaagtgattcgccagcgcaccgagaaaggtggtatcggtttcggcgcgtccgttcacagcaaggacgaaaatgccggcattaccaagctgttcggcatcgtcgaaccggaagatttaatcaaattcggcctgattccggaattaatcggacgtttgcccgtgattgcaactttagaagaactggatgaggacgcgctgattaatattttaaccgagccgaaaaacgctttggtcaagcagtatcaagccttgttcggcatagaaaacgtcgggttggaatttgaagaaggcgcattgcgttccatcgcgcggcaggcaatggaacgcaaaaccggcgcgcgcggcctgcgttccatcgtcgaacgctgcctgctcgatacgatgtaccgcctgcccgatttgcaaggcttgaaaaaagtggtggtcggcaaggcagtcatcgaagagggcagggaaccggaattggtgttcgagtcc

SEQ ID NO: 29085 - DNA, 570 bp, Neisseria gonorrhoeae
atgacttatgaaattcaagcctctgttcgtgaagcacaaggcactggtgcgagccgccgcctgcgtcgcgaaggccaaatccccggtattctgtacggtgaaggtcaagagcctgttgccattgccgtagatcacaaaaccgtattttacgcattggaaaaagaatctttccatactgcgttgattaaattgtctctgaacggcgaaaccaaagacgttatcgtccgcgatttccaaatgcacccgttccgccgcgaagtccaacacatcgacttccaagctgtgaaagccgatcaacttgtacgcatccgcgttcccctgcacattgttaacgctgaaaattctcaagccgttaaattgcaaggcggtcgcgtatctctgctgaacacggctgttgaagtgcttgcgttgcctgccaatatccctgctttcttggatttggattgtgccgaagtggttgccggcgacattttgcacttgtcagacatcaaactgcctgaaggtgtagaaagcgtttccctgaaacgtaacgaaaatctggctgttgctaccgttaccggtaaaaagcgc

SEQ ID NO: 29086 - DNA, 1191 bp, Neisseria gonorrhoeae
atgcaaaactatctgacccccaatttcgcctttgccccgatgattcccgaacgcgcttcaggcagccgcgtttgggatacggaagggcgtgaatatattgatttttcaggcggcatcgccgttaacgctctggggcactgccaccctgcccttgtcgatgctttaaacgcgcagatgcacaagctgtggcacatttccaatatctatacgacgcggccggcgcaggaattggcgcaaaaattggtgaaacacagttttgccgacaaggtttttttctgcaactcgggcgcggaagcgaatgaggcggcgttaaagctggcaaggaaatatgcgcgcgaccgtttcggcggaggcaaaagcgaaatcgtcgcctgtatcaacagtttccacggacgcacgctgtttaccgtgtccgtcggcggacagccgaaatacagtaaggattatgcaccgctgccgcaaggcattacgcacgttccgttcaacgatattgccgcgctggaagctgccgtcggcgaacagacctgcgcggtcatcatcgagccgatacagggcgaaagcggcatcctgcccgccactgcggaatatttgcaggcggcgcgccgtctgtgcgaccggcacaatgcgttgttgattttggacgaagttcaaaccgggatggggcatacgggcaggctgtttgcctatgaacattacggcgttgttcccgatattttgagttcggcaaaagccttgggctgcggctttccgatcggcacgatgctggcgacagaaaagattgccgccgccttccaaccgggcacgcacggctcgactttcggcggcaacccgatggcgtgtgcggtcggcagccgcgccttcgacatcatcaacgcgccggaaaccttgcacaacgtccgcagtcaggggcagaaacttcagacggcattgctggatttgggcaggaaaacaggcttgttctcacaggttcgcgggatggggctgctgctcggctgcgcgttggacacgccttatcgcggacgctcatccgaaatcgccgctacctccttgaaacacggcgtgatgatcttagttgcgggtgcggacgtattgcgtttcgcgccttcgctgctgttgaacgatgaggatattgcggaaggtttgcggcgtttggaacacgtgctgacggaatttgccgccgcaaaccgcccc

SEQ ID NO: 29087 - DNA, 945 bp, Neisseria gonorrhoeae
atgaccgacatcacaccgtttgccaaccgcttgggcaaaaacatcaaacaccttatgaaatgggcgaaacgcaacggcatcgaagcctggcgcatttacgaccgcgacatcccccaattcccttttgccgctgatgtttacggcgatcgaatccaccttcaggaatacgataccggctggctgatgcggcccggagaatacgaagcgtggcttgccgaagtattggaagccgtcgctttcgttaccggttttgaacccgaacaaatccgtctcaaacgccgcgaacgccaaaaaggtttgcagcagtacgagaaaaccggcaaggcgggcgacgatttcgtcattgccgaaaacggccgcaagttttgggtcaacctcgacaaatacctcgacaccggcttcttcctcgatcaccgcaacacgcgcaaaaaagtcggcgaaacggcggcgggcaaacgttttttgaacctgttttcctacaccggcagcttcaccgtctatgccgccaccggcggcgcggcatccagcgaaaccgtcgatttgtccaacacttatctcgattgggcgaggcgcaattttgaattgaacggcatcgatatggaacggcacaaaatcgtccgcgccgacgtgttccaataccttcagacggcatatggggaaggcaggcagttcgacctcattgtgatggacccgcccagtttttccaacagcaagaaaatgcccggcatcctcgacatccagcgcgaccatcaaaaactcatagacggcgcggtgaacctgctcgcttcagacggcattttgtatttttccaacaacctgcgcagcttcgttttggacgattcggtatcggaacaatacgccgtgaaagacatttccaaacaatccgttcccgaagatttccgcaacaaaaaaatccaccggtgttgggaaatccgccacaaatct

SEQ ID NO: 29088 - DNA, 471 bp, Neisseria gonorrhoeae
atgactgatttttccgtttgggaagctgctccctttggcgcaaccgttgatcatatcctgcaacgctaccacaatgtccaccgcgcacaatttgaagaattggtgccgctggcgcagaaagtggcccaagtccatgccgatacctttccggcggaaattgccgggctgcttgccgatatgcgggacgagctgctgatgcatatgatgaaggaagagcggatgctgtttccgatgattaatcagggtgtcggacgcggtgcggcgatgcccatcagcgtgatgatgcacgaacatgaagaacacgaccgcgccatcgcacggctcaaagagctgaccggtaatttccacgcacccgaaggggcttgcggaagttggacgcgcctttacgcgctggcaaaagaaatggcggacgatttgaacgaccacattcatttggaaaacgatattctgtttgcccgcgtactcgattct

SEQ ID NO: 29089 - DNA, 789 bp, Neisseria gonorrhoeae
atggatacgcaggcagttatcacacatattgtccgatggttggacgaatacgccgctcaggcaaatgcaaaaggattcgtcgtaggcgtttccggcggcatcgattccgccgtcgtctccacgctcgccgcccgcaccggccgcaccacgctgcttctggatatgccgatacgccaacaccccggccagcttgagcgggcaaggcggcacatccgcaatctgcaagggcaatatgccaatgtaagcgcgcaaacggccaatctgaccgacaccttccagacctttgaacaaaccgtcggcgttcatcagacggcatttgccaatcagccgctttcgctcgccaacgccagaagccgcctgcgtatgctgaccctgtactactacgggcagatacacggactgctggttacggggacaggtaataaggttgaagatttcggcgtgggtttttttaccaaatacggcgacggcggcgtggacatcagcccgattgccgacctgaccaaaacgcaggtttaccggcttgccgaagcattgggcgtggacgaggcgattcaaaaagccccgccgaccgacggcctgtgggatacggaacgcaccgacgaggaacagatgggcgcaagctatcccgaactggagtgggcaatgggcgtgtacggcacgcgcaaacccgaagattttgaaggacggcggcgcgaagttctggaaatctatacgcggcttcaccgcgcgatgcagcacaaaatcaacccgattcctgtgtgccgcattccgcccgaattgctgggc

SEQ ID NO: 29090 - DNA, 1329 bp, Neisseria gonorrhoeae
gtgttgtccgtttccgagttgaacgcatttgccaaaagtattttggaaaaccaccttgccggcctgtggattgcgggcgaagtgtccaatctgacccgcgccgccagcgggcattattatttctcactcaaagacagccgcgcgcaggtgcgttgcgcgatgttcaagggtgcggcggcgcgtttggcgcaacctttgaaagaaggcgaccatatcgaagtggcgggcaaaatcagtatttacgaggcgcggggcgaatttcagattaccgtaaacgaagtacggctcaaaggtttggggcagctttacgaagcctacgagcggttgaaggcgcagttgcaggcggaaggcgcgtttgcggcggaacgcaaaaaacctttgcccgtccgtccgcaatgtatcggcatcgttaccagtctggcggcggcggctttgcgcgatgtcgtaaccaccttgaaacgccgcgcgcccgaaatccccgtcatcgtttatccggccgccgttcagggcgcgggcagcgggtttcagattgcccaagcgattaaaaccgcatcgcaacgcgccgaatgcgatgtgctgattgtctgtcgcggcggcggcagcatcgaagacttgcgggcgtttaacgaagaaccggtcgtgcgcgccatcgaagcctgcacgattcccgtcgtcagcggcgtgggacacgaaaccgatttcacgctcgccgatttcgttgccgacgtgcgcgcgcccacgccgaccggcgcggcggaactggtcagccccaaccgccaagaatcactgcaccgcctcgtccaagcccaaggccgtctgaaaaccgttttggagcaacgctatttcgatgccagccaaaaactcgactggctcgcgcggcaaatccgccacccgcgccaaaaacttgacgagcagcgcgcttcaatcggcaagctggcgcaaacgctgtcttactcgatgacgcaaaacctccgcgcccacaccgcccgttttgaacgccaaacccaagccctgcaacattgccgtcctgatgtttccgtttaccggcaagatatcgtccgccttcagacggcattgcccgccgccttcagccggctgctcgcccgtcgccgtcaaagcctgaccgcccaagccgcattgctcgaagccgtttcgccgcagcacattctggaacgcggcttctccgttgtcaaaaatacacgcggacaagtcatccgtaacgctgatgttttgaagcaggggcagaagctgcacattaccttctccgacggcgaaaccgacgtgcgcgtaagcaaagaacaagggcagcaggatttgttcgattgcatt

SEQ ID NO: 29091 - DNA, 1404 bp, Neisseria gonorrhoeae
atgaacgattacgcagctatgccgcctgaaggccgtgaggtcggcgcattgtcgctgcctccgcattcgatggaggcggaacaatccgttttgggcggtttgatgctggaaaatccggcttgggacaggattgccgatgtggtttcgggagaggatttctaccgccacgaacaccgcctgattttccgatccattgccaaattaatcaatgagggccgtcccgcagatgtgattacggttcaggaagatttgcagcggaacgaagaattggaagcggcaggcggatttgaatatctgattacactggcgcaaaacaccccgtctgccgcaaacatccgccgctacgccgaaatcgtacgcgagcgttccattatgcgccaactcgccgaagtggggacggaaatcgcccgcagcgcatacaatccgcaaggcagggacgcggggcggcttttggatgaggcggaaaacaaagtgtttcaaatcgccgaaagcaccgccaaatccaagcagggctttttggagatgcccgatttgctgaaagaagtcgtacagcgcatcgatatgctttattcgcgcgacaatcccgatgaagttaccggcgtaccgacagggttcatcgaccttgataaaaaaacctcgggtctgcagcccggcgacctgattatcgtcgccggccgcccgtctatgggtaaaaccgcgttctccatcaatattgccgagtatgtcgccattgaaaaacatttgcccgtcgccgttttctcgatggaaatgggcggtgcgcagttggtcatgcgtatgctcggctcggtcggacggctggatcaaagcgttttgaaaaccggcaggctcgaagacgaacactggggccgtctgaacgaagcagtcgtcaaactctcagacgcgcccgtgtacatcgacgagaccccgggcctgactgcgctcgaactgcgcgcccgcgcccgtcgtctcgcccgtcaatttaacaataagctgggattaatcgtcattgactacctgcaactgatggcggcatccggccgttcggacaaccgcgcttccgagcttggcgaaatttcccgttccctcaaagccctggcaaaagagttgcaagtccccatcatcgccctgtcgcaattgagccgcactgtcgaacagcgcaccgacaaacgcccgatgatgtccgacctccgcgaatccggtgctatcgagcaggatgccgacctgattatgttcatgtaccgcgacgaatactacaaccaggactcacccatgaaaggccttgccgaatgtatcatcggcaaacaccgcaacggtcccgtcggtaaaatcttcctcacatggacgggacaattcaccaaattcgacaatgctgcctatattcccgaggaggcaaagatagaagat

SEQ ID NO: 29092 - DNA, 1050 bp, Neisseria gonorrhoeae
atgatgtccaagcaacccaccagcaaacgccaatggcgcgacggcgcagccccgtctgccaagaaaaccgccaaacctttcaaaagcaaagcccgtcccaaagacgaaacgcgcaaaaccgccgcccaagcttacggacaaaaagcttcagacggcatcaagctgcaaaacgcccccaaacagcgcgccgccaaagccaaaaaactcgtcgtccgcaatcccaaccaaaaaattatggaacacgcgcgcgatttgaaagaacgccgcagcgacctgtcgcgtatggaacccgaacgcctgcaaaaagtgcttgcagcctccggcgtcggctcgcgccgcgaaatggaagaatggatcaacaacggctgggtaacggtcaacggcaaaaccgcgcaactgggcgacaaagttacccccgacgaccacgttaccgtcaaaggcagcatcatcaaactcaaatgggccgaccgcctgccgcgcatcatcctgtattacaaacaagaaggcgaaatcgtttcccgcgacgacccgcaaggccgcgtcagcatattcgaccgcctgccgcaggccgccagcagccgctgggtcgccatcggacgcttggacatcaacaccagcggacttctgattctcactacctccggcgaactcgtccaacgtttcgcccaccccagcttcgaagtcgaacgcgaatacgccgtgcgcgtactgggcgggctgactaccgaacaaatgcgcagtctcaccgaagaaggcgtgatgctcgaagacggcttggcaaaagtcgaacgcatctacgaacaaggcggcgaaggcgcaaacaaatggtacaacatcgtgattaaagaaggccgcaaccgcgaagtgcgccgcatattcgaaagccaaggcctcacagtcagccgcctcgtgcgcgtcgccttcggccccatcggactgcccaaccgcctcaaacgcggacagttctacgaactcaaccccgccgaagtcgccaacatcctcaaatgggcggatatgctgctgccgggcgaacgccgccgcaaaaaagcc

SEQ ID NO: 29093 - DNA, 1008 bp, Neisseria gonorrhoeae
atgaaccacaccgttaccctgcccgaccaaaccacctttgccgccggcgacggcgaaaccgttttgtccgctgccgcccgtcaaaacctcaatctgccccattcctgcaaaaacggtgtctgcggacaatgcaaagccgaactggccagcggcgatattcaaatgggcggacactcggaacaggctttatccgaagcagaaaaagcgcaaggcaagattttgatgtgccgcaccaccgcgcaaagcgatatcaacatcaacatccccggctgcaaagccgatgccctacccgtccgcaccctgcccgcacgcatcgaaagtatggttttcaaacacgatgtcgccttcctgaaacttgccctgcccaaagccccgccgtttgccttctacgccgggcaatacattgatttactgctgccgggcaacgtcagccgcagctactccatcgccaattcgcccgaccaagaaggcattttggaactacacatccgcaggcgcgaaaacggtgtctgctcggaaatgattttcggcagcgaacccaaagtcaaagaaaaaggcatcgtccgcgttaaaggcccgctcggttcgtttaccttgcaggaagacagcggcaaacccgtcatcctgccggcaaccgacacaggctacgcccccatccgcagcatcctgctcgaccttatccgccaaaacagcagccgcgctgcccatttctactggggcgcgcgtcatcaagatgatttgtatgccctcgaagaagcacaagggttggcatgccgtctgaaaaacacctgcttcacccccgtattgtcccgtcccggagagggctggcagggaagaaaaggccacgtacaagacatcgcggcacaagaccaccccgacctgtcggaatacgaagtgtttgcctgcggctctccggctatgaccgaacaagcaaaaaatctgtttgtgcaacagcataagctgccggaaaacttgtttttctccgacgcattcacgccgtccgcatca

SEQ ID NO: 29094 - DNA, 1428 bp, Neisseria gonorrhoeae
atgacttgggaaactgtaatcggcttggaaatccacgtccaattgaacaccaaatccaaaatcttcagcggtgcatcgaccgcattcggcgcagaacccaacgcgcacgccagcgtagtggaatgcgcgctgccgggcgtactgccggtaatgaaccgcgaagtcgttgaaaaagccatcaaattaggtttggctttggatgcaaaaatcaaccggaaaaacgtgttcgaccgcaaaaactacttctatcccgacttgccgaaaggctatcaaatcagccagttggatttgccgattgtcgaacacggcaaattggaaatcgtggtcggcggcgatgtgaaaaccatcaacgtaacccgcgcccatatggaagaagacgcaggcaaatccgtgcacgagggcttgaacggcgcgaccggcatcgacctgaaccgcgccggcacgccgctgttggaagtggtatccgaacccgaaatgcgctccgccgccgaagccgttgcctacgccaaagccttacacagcttggtaacctggctggacatttgcgacggcaatatggcggaaggttcgttccgcatcgatgccaacgtatccgttcgcccgaaaggccaagcggaattcggcacgcgccgcgaaattaaaaacctcaattccttccgtttcttggatcaggcgattaattacgaagccgaagcgcaaatcgagattttggaagacggcggcacagttcagcaggcgacgatgctgttcgacccggaaaaaggcgaaacccgcgtgatgcgcctgaaagaagacgcgcacgactacggctacttccccgatcccgatttgctgcccgtcatcatttcagatgcccaaatgcaaaaagccaaagcagaaatgcccgagctgccgaaagaaatggcggcgcgtttcgtggcggattacggcgtgtccgaatacgacgcgcgcctgctcaccgccagccgcgtgcaggctgcctattttgaagaagccgccaaagagagcggacaaggcaagccgactgccaactggatgaacggcgaacttgccgctacgctgaacaaagaaggcatggaacttgccgacagcccgattaccgccccacgccttgccgcgctggtgggcaaaattgccgatggcacattaagcggcaaactggcgaaaaaagcctttgaagccatgtgggcggaaccggaaaccagcattgccgaaatcatcgaaaaacacagtttgcaacagatgaccgataccggcgcggttgaagcgatggtggacgaagtgctggcaaacaacgccaaagccgtggaacagtttaaatccggcaacgaaaaagccctgaatgcgattgtggggcaagtgatgaagaccagcaaaggcaaagccaatcccgctcaggtgcaggagttgattaaagccaaacttgcc

SEQ ID NO: 29095 - DNA, 1203 bp, Neisseria gonorrhoeae
ttgaagccttgcgatacgggcggtaaaatcgcggtttatccggttcgagaaaccggcgacagcaaggactttcccatgattaaaatcagcacccgcttcgatgccggctcggtcgtcgtcaaagacctgaccgacccttccaacatccgcctcgccctgcgtcccgacaacgcctccgatttcgcacaatggttctacttccggctgcaaggcgcggcctatcaaaactgcatcatgcattttgaaaacgcggcagaagccgcctacccgaaaggctgggaaggctatcaggcgtgtgcctcatacgaccgccgcaactggttccgcgtaccgacttcctacgaaaacggcgtactgaccgtcaatcatacgccgctgtccaacagcgtgtattacgcctatttcgaaccctattccgaagagcagcacctcaacctcctcggcgacgcgcaaggcagcggcctgtgccgcatcgacgacttgggcagcaccgtgcaaggccgcgacatcaatctgctgaccataggcaaccaagtcgaaagcgacatgaaaatctggattaccgcccgccagcacccgggagaaaccatggcggaatggtttgtcgaagggctgctcggcaggctgctcgattcgcaagacccgacagcacgcaccctgctcgaccgcgccacgttctacatcgtccccaatatgaatcccgacggttcggcactgggcaaccttcgtaccaacgccgccggtgcgaacctcaaccgcgaatgggaaaacccgactttggaaaaaagccccgaagtgttcttcgtgcgcggaaaaatgctggaaaccggcgtggatttgtttttggacatccacggcgatgaaggtctgccctttgtctttgttgcaggaacggaaggtgtgccgaactacaatccgcgcatttccgcgttggaagcgcagttcaaaaccgcccttttgaacgccagccccgatttccaagacgaatacggttacgaaaaagacgcgccgggcaaagcgaatatgaccttggcgaccaactgggtcggcaaccgtttcaactgccttgcctacacgctggaaatgccgttcaaagacaacgccaacctgcccgacgacgacttcggctggaacggccagcgttctttgcggcttggggaagcggtgctttccgccattttgaacgtcgccggcgatttgcgc

SEQ ID NO: 29096 - DNA, 1443 bp, Neisseria gonorrhoeae
atgacccaatacacattgaaacaggcaggcagcctgttgcagtccaaacagatttccgccgtcgaactggcaagcgcataccttgccgccattgccgaaaaaaatcccgccctcaacggctatatcaccatcgaccaagataaaacccttgcagaagcccgtgccgccgacgaacgcatcgcgcagggcaacgcttcggcacttaccggcgttcccgtcgcctacaaagacattttctgccaaaccggctggcgcagcgcgtgcgcttccaaaatgctcgacaacttcatcttcccctacaccgccaccgtcgtccaaaacctgctcgacgaaggtatggtaacgctcggccgcaccaacatggacgagttcgctatgggttcgaccaatgaaaactcattctacggcgcggccaaaaacccgtggaatccggaacacgtacccggcggttcgtcaggcggttccgccgccgtcgttgccgcgcgcctcgcccctgccgcgctcggttcggacacgggcggctctatccgccaacccgcatcgcactgcggcattaccggcatcaaacctacctacggcacggtttcccgcttcggtatggtcgcctacgcctccagcttcgatcaagccggcccgatggcgcaaaccgccgaagactgcgcgattctgttgaatgcaatggcaggtttcgaccccaaagactccaccagcttcgaacgcgaaaaagaagactacacccgcgatttggacaaaccgctcaaaggcgtgaaaatcggcctgcccaaagaatacttcagcgaaggcaacagcaccgatgttcagacggcattgcaaaacaccattgatttgctgaaagcacaaggcgcggaactggtcgaagtttccctgccgcaaaccaagctgtccatccccgcctactacgtcctcgcctccgcagaagccggcaccaacctttcacgttacgacggcgtacgttacggacaccgtgccgcccaattcggcgatttggaagaaatgtacggcaaaacccgcgccgaaggttttggcagcgaagtcaaacgccgcatcatgatcggcacttacgtactgtcgcacggctactacgatgcctattatctcaaagcccaaaaactgcgccgcctcgttgccgatgactttcagacggcatttgcacggtgcgacctcatcctcgcgccgaccgcaccctccgccgcacccaaaatcggagcggatacttctccggttgaaacctacttgagcgacatttacaccatcgccgtcaacctcgccggactgcccgcattgaccctgcccgcaggcttcagcggcggcggactgcccgtcggtgtacagcttgtcggcaactacttcgccgaagccaaaatcctcggtgcggcgcatcaaatccaactcaacagcgattggcacggcaaacgacccgaa

SEQ ID NO: 29097 - DNA, 288 bp, Neisseria gonorrhoeae
atggcactgacacttgccgacgtagacaaaatcgcccgactctcccgactgcagctgactgcggaagaaaaagaaaaatcgcttcaagaattaaacgacattttcactatggtcgaacagatgcagaacatcaacacagacggcatcgagccgatggcgcacccgcacgaggtcgccctccgcctgcgtgaagacgaagtaaccgaaaccgaccgcgccgccgaataccaagccgttgcgccggaagtacgcaaccgcctgtacatcgtaccgcaagttatcgaagaa

SEQ ID NO: 29098 - DNA, 1185 bp, Neisseria gonorrhoeae
atgaataccttactcaagcagctcaaaccatatccctttgcccgactgcgcgaggcgatgcagggcatttccgcgcctgaaggcatggaagccgtcccactgcatatcggcgaaccgaaacacccgacaccgaaagtcattacggatgcgctgaccgcctcattgcgcgagttggaaaaatatccgctgactgcgggtctgcctgaactgcgtcaggcgtgtgcgaactggttaaaacgccgttatgacggcttgacggtcaatccggataatgaaattctgccggttttgggcagtagggaggcgttgttttcttttgttcaaaccgtgttgaaccctgtttcagacggcctaaaacccgtaatcgtcagcccgaatcccttttatcagatttatgaaggtgcgacacttttgggcggcggtgaaatccattttgccaattgccccgcgccgtctttcaaccccgattggcgcagtatttccgaagaggtttgggaacgcaccaaactggtgttcgtctgctcgcccaacaaccccagcggcagcgtgccggatttggacggatggagagaagtttttgatttacaggataaatatggtttcattattgcctcggatgaatgctattccgaaatctattttgacggcaacaaacctttgggctgcctgcaagccgccgcacagtcggggcgaagcaggcaaaaactgcttatgttcaccagtttgtccaagcggtccaatgttccgggcctgcgttccggttttgtcgccggtgatgcggaactgcttaagaactttctgctttaccgaacctatcacggcagcgcaatgagtattcccgtgcagcgtgccagtattgccgcctggaatgacgaacaacacgttatcgacaaccgccgtatgtatcaggaaaaatttgagcgcgttattcccattttgcaacaggtatttgacgttaaattaccggatgcctcgttttacatctggttgaaagtccccaatggcgacgatttggcattcgcacgcaatttatggcaaaaagccgctatccaagtattgcccggacgctttttggcgcgggataccgagcaggggaatcccggggaaggttatgtccgtatcgctttggttgccgatgtcgcaacttgtgtcaaagctgcggaaaccattgtttccctatatcgg

SEQ ID NO: 29099 - DNA, 1260 bp, Neisseria gonorrhoeae
atgtcaaacacacaaaaacagcttgcccttgccaaagcggcaaaaaaatccgtcaacacggcggatgcggaagaaaaaaaccgcgcgctgcttgctatggcggacagtctggaagcggcggcggaagatattttggcggcaaaccgtttggatttgaaagcggcggcaggcaaaattcccgacagcatgaccgaccgccttttgttggacggcaaacgcatttgcgcgatggcggacggcatcagggcggttgccgcgctgcccgaccccgtgggcgaaatactggaaacctcgactctgcccaacggcttggaaatcgtcaaaaagcgcgtggcgatgggcgttatcggcattatttacgaaagccgcccgaacgttacttccgatgcggcggctttggcactgaaaagcggcagcgcggtcgtactccgcagcggcaaagatgcatttcaatccgcacgcgccatcgttgccgccctgaaaacggggttggcacaaacccgcatcgaccccgaagccgtacagctcatcgaagacacagggcgtgagggcagttacgaaatgatgagggcgaaagattatctagacctgctgattccgcgcggcggggcagggctgatacgggcggtggttgaaaatgccgtcgtgccggtcattgaaacggggacgggcatcgtccacatttatatcgacaaggacgcggattgggacaaggcactccgtatcgtgtacaacgccaaaaccggccgcccgtccgtgtgcaactcgatggaagtgctgctggtgcatgaaggcattgctgccgacttcctgcccaagctcgaacggctgttggttcgcggccgtatagaagccggactgccgcccgtccgcttccgtttggatccgcaggcggcgcggtatatcggcggcgaagcggcgggtgcagacgatttcgataccgagtttttagactacatcctcgccgtgaaaaccgtcgcttcggttgaagaggcggtcgggcacatcgaagcccgcggcacgcaccattcagacggcatcgttaccgaaaaccgccacgctgcggactatttcacgacccatatcgattctgccgccgtgtatatcaacgcgtccacgcgcttcaccgacggcggcgaattcggcttgggttgcgaaatgggcatctccacgcaaaaactccacgcccggggcccgatgggtttgaaagagctgacgagttacaaatacatcgtacaaggcacgggacaggttagggaa

SEQ ID NO: 29100 - DNA, 600 bp, Neisseria gonorrhoeae
atgttcaacataccggccgtcgccgtttcctatttaatcggttcactttctttcgccgtcatcgtttccaagtattacgggatggacgacccgcgcacctacggatcgggcaatcccggcgcgaccaatgttttacgcagcggcaaaaaaaaggcggccgcgctgacgctcttgggcgatgccgccaaaggtttggttgccgttttgcttgcacgcgtgcttcaagaaccgctcggtttatccgacagcgcaatcgccgccgtcgcactcgccgcgctggtcgggcatatgtggccggtgtttttcggatttaagggcggcaaaggcgtggcaacggcattgggcgtgcttctggcactctctcctgcaactgccttggtctgcgcgttgatttggcttgtgatggcattcggcttcaaagtatcctcccttgccgcgctggtcgccacaaccgccgccccccttgccgcactgttttttatgccgcatacttcttggattttcgcaaccctcgcaatcgccatattggtgttgctccgccataagagcaacatcctcaacctgattaaaggcaaagaaagcaaaatcggcgaaaaacgc

SEQ ID NO: 29101 - DNA, 909 bp, Neisseria gonorrhoeae
atgccgtctgaaaccatgttcccgcgttcagacggcatttccgcacaaacggctttcatacataccatgctcagttacagacacgcattccacgccggcaaccacgccgatatgctcaaacacttcaccttgtttttagtgctgcaatatttcaaccgcaaagacaagccctactggtacatcgacacgcacggcggcgcgggtgtgtacaatctcgaaggcagcgaggcgcagaaagtcggcgaataccggcaaggcatcgccctgctccgacaggcgcaaaacctgcctgccgaactctctgactttgccgcgcacatacaaaaaatcctgccctcgcccgaactttactgcggctctccgtggctggcgcaatcgctgacctgcgtcggcgacaaattgcgcctgtttgagctgcaccccaccgactttgtccatctgcaaaacaatatgggcgaagcgggattgggcaaacgcggacaagtgttgcgcgaagacggttacaaagggctgatttccctgctgccgcccccgccgcgccgcgccgccgtcctcatcgacccgccctatgaggaaaaacaggactaccggcgtgtaacggaaacgctgaaagccgctttaaaacggtttgagtccggctgttatctcatttggtatccctgcctcagccgcgaagaaagccgcaagctgccggaagaattgaaaaaactcctgcccgacaactacctttacgccgaactgcacgtccacgcgccgaaaaccgacggtttcggtatgcacggcagcggaatgttcgtgattaatcccccttaccttttagccgaacaattggcggcaaacctccccgccctgacgcggctgcttgcgcaagacgaaggcgcgcgctaccttttggacagcaaaatccgc

SEQ ID NO: 29102 - DNA, 1407 bp, Neisseria gonorrhoeae
atgacggcacaaaccctctacgacaaactctggaacagccacgtcgtccgcgaagaaggagacggcaccgtcctgctttacatcgaccgccatctggttcacgaagtaaccagcccgcaggcgtttgaaggtctgaaaatggcggggcgcaagctgtggcgcatcgacagcgtggtctccaccgccgaccacaacaccccgaccggcgattgggacaaaggcatccaagacccgatttccaagctgcaagtcgatacgttggatcaaaacatcaaagagtttggcgcactcgcctacttcccgtttatggacaaaggccagggcatcgtacacgttatggggcccgaacaaggcgcgaccctgcccgggatgaccgtcgtctgcggcgattcgcacacttccacccacggcgcattcggcgcactggcacacggcatcggcacttccgaagtcgaacacacgatggcgacccagtgcattaccgcgaaaaaatccaaatctatgctgattgccgctgacggcaaattaaaagcgggcgttaccgccaaagacgtggcgctctacatcatcgggcaaatcggcacggcgggcggcacgggttacgccgtcgagttcggcggcgaagccatccgcagcctttcgatggaaggcaggatgaccctgtgcaatatggcgattgaggcaggcgcgcgttccggtatggttgccgtcgatcaaaccaccatcgactatgtcaaaggcaagcccttcgcacccgaaggcgaagcttgggacaaagccgtcgagtactggcgcacgctggtgtctgacgaaggcgcggtttttgataaagaataccgtttcaacgccgaagacatcgaaccgcaagttacttggggcacgtcgcccgaaatggttttaaacatcggcggcaaagtgccgaatcccgccgaagaaaccgatccggtcaaacgcagcggcatagagcgcgcactcgaatatatgggtttgaaggccggtacgccgctgaacgaaatccctgtcgatatcgtctttatcggctcttgcaccaacagccgcatcgaagacttgcgcgaagccgctgctatcgccaaaggccataaaaaagccggcaacgtacagcgcgtgttaatcgtccccggctccggtttggttaaagaacaagccgaaaaagaaggcttggacaaaattttcatcgaagccggttttgaatggcgcgaaccgggctgttcgatgtgccttgcgatgaatgccgaccgcctcgcgccgaggcaacgctgcgcctccacgtccaaccgcaattttgaaggccgccaaggcaacggcgggcgcacccacctcgtcagccccgctatggccgccgccgccgccgttaccggacactttaccgacatccgcacgatggcg

SEQ ID NO: 29103 - DNA, 675 bp, Neisseria gonorrhoeae
atgagcatcaagcaatggccggaaggcgaaaggcccagggaaaagctgttggaacgcggggcggcggctttgagcgatgccgaacttttggcaatccttttacgcgtcgggacgcgcgggatgagcgcggtcgatttggcgcgctacctattgcaggagttcggcagcttggggaggctgatgagcgcggaggtcggcaaactgtcggcatacaaagggatggggacggcaagtttcacacagttcgccgtggtcagggaaatcgggcggcggatattggaggaagaattgcaggaagaaattaccttatccgatcccgataccgttgccgattatttacgctttcatttggggcaggaaaaagtcgaagtcagcgtcgcgctgctgctgaaccgccaaaaccaactgattgcggtcagagagctgtcgcgcggtacggttgcggaaaacacgatttacatccgcgaaatcgtcaaactggcattggacgaatatgccgacagcctgattatcgcgcacaaccatccgggcggctcgcctgaaccttcgcaggaagacatcatgttcacaaggcggctggcacaggccatgtcgctggttgatgtttcgctgctcgaccattttatcgttacctcgcaaaccgtccgttcgttcaggcagctcgggctgatgccc

SEQ ID NO: 29104 - DNA, 1744 bp, Neisseria gonorrhoeae
gtagctaaaacatatttattgactgcattgataatgtctatggtaatctccggatgtcaagtcatccatgccaatcaaggtaaggttaatactaattctgctgtcatcgcaggtgcagacgctcacacgcctgaacatgtaacgggactgaccgaacaaaagcaggtgattgcaagtgattttatagtagcgtcagccaatccattagcaacacaagctggctatgatatcttaaagcaaggcggtagcgctgcagatgcgatggtggcggtgcagacgacactaagcttggtagagccacagtcgtcaggcttgggcggtggtgcatttgtgttgtattgggacaataccgccaaaacattgaccacatttgatgggcgtgagacggcaccgatgcgtgcgacgccagaattatttttggataaagatggttaaccattgaaatttatggaagcggtggtcgctcggtaggtacgcctgctatccctaaactgacggagacaatacatcagcgatacggtgtattgccttggggaaaattatttgatacgccgatccacttggcaaaacaaggctttgaggtgtcgccaaggcttgccatctcggttgagcaaaatcagcagcatttggcacgctatccaaaaacagccgcttattttttgccgaatggtgtgccgctacaagcaggcagcttgctgaaaaatttagaatttgctgacagtgttcaggcgttagcagctcaaggtgcaaaagctctgcatactggtaaatatgcccaaaatattgtttcagttgtccaaaatgctaaggataaccccggtcaattatccttgcaagatttatctgattatcaagtggtggaacgcccgcctgtttgtgtgacttatcgtatttatgaagtatgcggtatgggtgcaccaagctcaggtgggattgctatgggtcagattttggggattttaaatgaattttcacccaatcgggtggggtatgatgctgaaggtttgcgtttgcggatcgtgatgtatatttgggcgaccctgattttgtaccagtacccattcgccagttgatttctaaagactacctaaaacatcgcagccagctgcttgagcagtcggataaggcattgcctagcgtatctgcaggcgattttattcatgagtgggcgtcctcacaagcgattgagttaccttctaccagtcatatatcaattgtggataaggcgggcaatgtgctatcaatgacgacttccattgaaaatgcgtttggctcaactttgatggcaaatggctacctgctgaataatgagctgacagactttagttttgagccaataaagcagggcaaacaggtcgccaatcgtgtcgagcctggcaagagaccacgctcctcaatggcaccaaccatcgtatttaaagcaggcaagccttatatggcaatcggctctccaggtggtagccgtatcattggctatgtcgctaagacgattgtggcacatagtgactggaatatggatatccaagatgccatcagtgcacccaatttattaaatcgctttggtagctatgaactagaaacgggtacaaccgccgtccagtggcaacaaacattaaatgatttgggctataagactgatgtgcgtgagctaaattcaggtgttcaagccattattatcgagccaagcaggctggttggtggtgtcgatccacgccgagaaggtcgagtgacgggtgattagagg

SEQ ID NO: 29105 - DNA, 1248 bp, Neisseria gonorrhoeae
atgttttcaaaaagcgttaccctcgcacaatatgaccccgatttggcagcagccattgcccaagaagaccgacgccagcaagaccacgtcgagctgattgcctctgaaaactacgtcagctgcgccgtgatggaggcacaaggttcgcaattgaccaacaaatacgccgaaggctatcccgcaaaacgctactacggcggctgcgaatacgtcgatattgtcgaacaattggcaatcgaccgcgtaaaagaactgtttggcgcagcctatgccaacgttcaaccgcactccggttcccaagccaaccaagccgtatatgcttccgttttaaaaccgggcgacaccattttgggtatgtctctggcgcacggcggacacctgacccacggcgcgagcgttaatatttccggcaaactctacaatgccgttacttatggcttggatgaaaacgaagtcctcgattatgccgaagtcgaacgcctcgcgctcgaacacaaacccaaaatgattgtggcgggcgcgtctgcctacgcgttgcaaatcgactgggcaaaattccgcgaaatcgccgataaagtcggcgcatacctctttgtcgacatggcgcactatgccggactggttgccggcggcgaatatcctaaccccgtgccattctgcgacttcgtaaccactaccacccacaaaaccctacgcggccctcgcggcggtgtgattttgtgccgtgacaatacccacgaaaaagcgctgaactcttccatcttcccaagcctgcaaggcggtccgttgatgcacgttatcgccgccaaagccgtagcgtttaaagaagcgttgcaacccgagttcaaacaatacgcaaaacaagtgaaaatcaatgctgccgtcatggcggaagagttggttaaacgcggtttgcgcatcgtttccggccgcaccgaaagccacgttttcctcgtcgacctgcaaccgatgaaaatcaccggcaaagccgccgaagccgctttgggcaaagcgcacatcaccgtcaacaaaaacgccatcccgaacgatccggaaaaaccgttcgttacctccggcatccgcatcggttccgccgccatgaccactcgcggctttaacgaaaccgacgctcgcgtattgtcgaacttggttgccgatgtattggctaatcccgaagacgaagccaacctcgccaaagtccgcggacaagtgactgccttgtgcgacaaataccccgtttacggaacc

SEQ ID NO: 29106 - DNA, 1407 bp, Neisseria gonorrhoeae
atgagatacatcagcacgcgcggcgaaaccgcacacaaaccgttcagcgaagttttattgatggggcttgcacccgacggcggactgatgctgccggaacattatccgcaaatcgggcgcgaaaccttggacaaatggcgcggtttggcttatcccgaattggcgtttgaaatcatgtgcctgttcgttaccgatattccggaggacgatttgcgcgacattctgaaccgtacttacacggaagcggcgttcggtactaaggaaatcacccccgtccgcacgctttcagacggcatcaaaatccaagccttgtccaacggcccgacgctggcgttcaaagatatggcgatgcagtttttgggcaatgcgtttgaatatgttttaaacaaagaaggcaaaaaactcaatatcttgggcgcaaccagcggcgatacgggttcggctgcggaatatgccttgcgcggcaaaaaaggcgtgaacgtatttatgttgtcgcccgacggtaaaatgagcgcgttccaacgcgcgcagatgtacagcctgcaagacgggaatatccacaatatcgccgtgaaggggatgtttgacgactgccaggacattgtgaaggcagtgcagaacgatgccgcgttcaaggaaaaataccatatcggtacggtcaattcgatcaactgggggcgcatcgtcgcgcaagtggtttattactttgcaggctatttcaatgccacttcaagcaatgacgaaaccgtcagcttttgcgtaccgagcggcaacttcggcaacgtttgcgcgggacacatcgccaaacaaatgggcctgcctgtccgctgcctgattgtcgcgaccaatgaaaacgatgtgctggacgagtttttcaaaaccggcgcataccgcccgcgcaacagcgcgcatacttatgtaacctccagcccgtctatggacatttccaaagcgtccaacttcgagcgtttcgtgttcgacctgatggatcgcgatcctcaggaaatcaatacgctgtgggcggaagtcgcggcaggcaaaggctttgacctgcggtttgccttggacaaagtcggcggcaaatacggctttacctccggcaaatctacccacgccgaccgcctcgccaccatcagacaggtttacgagcaagacaaagaactcatcgacccgcatactgccaacggcgtaaaagtcgcccgcgaagtgcgcgaagcgggggaaacggtggtttgtttggaaaccgcgttggcggcgaaattcgatgcgaccatacgcgaagccgtcggcgatgtcgccattccgcgccccgccgcgctggaaggtttggaaaacctgccgcagcgcgtgcaaaccgtgccgaacagtgcggatgcggtaaaaggcatcatcgaacaaacccttgcc

SEQ ID NO: 29107 - DNA, 1926 bp, Neisseria gonorrhoeae
ttgttggaaattgacattatgaatatattatccgtagaaaacgcttcctttgccgtcggacatgtcgccctgctcgacaaaacgtccttccaactcgacagcggcgaaaaagtcggcttgatcggacgcaacggcgcaggcaagtcttcgtttttaaaaatcctcaccggcgtgcaaaaactcgacgacgggcagattattgttcaaaacaatctcaaaatcgtttatgtgccgcaggagtccttttttgataaggacgcaaccgtatttgatactgttgccgaaggtttgggcgaaattcgcgatttattgcgccgttatcatcatgtcagccatgagttggaaaatggttcgagtgagctcttattgaaagagcttaacgaattgcaacttgaaatcgaagcgaaggacggttggaaactggatgcggcagtcaagcagactttgggggaactcggtttgccggaaaacaaaaaaatcggcaacctttccggcggtcagaaaaaacgcgtcgccttagcgcaggcttgggtacagaagcccgatgtattgttactggacgaaccgaccaaccatttggatatcgacgcgattatttggttggaaaacctgctcaaagcgtttgaaggcagcttggtcgtgattacccacgaccgccgttttttggacaatatcgccacgcgcattgtcgaactcgatcgcggtattttgcgctcctatcccggctcgttctccaaatacagcgagaaaaaagcgcaagagttggcggttgaagccgaacacaaccgcctcttcgacaaattccacgcgcaggaagaggcgtggatacgcaaaggcatcgaagcgcgccgtacccgcaacgaaggccgcgtgcgccgtttggaagaactgcgccgccagcgtgccgaacgccgcaatgtacaaggacaggtcaacttcaaactcgacagcggcaagaaaagcggcaaaatcatcgccgaactggaacacgcttcgtttgcctatgacgacaaagttatcatggataaattttccgccatcttgcagcgcggcgacaaaatcggcttaatcggcccaaacggtatcggcaaaaccaccttccttaagctgattttgggcgaattgcagccgacctacggcagaatccgtatcggcagcaagcaggaagtcgcctatttcgaccagttccgcagcgccttgaatgaaaacgatactgtgttttacacgctcggacagggcaacgattacgtcgaagtcggcggcaagaaaaagcatgtgatgagctatttggaagatttcctgttcccccctgcccgcgcgcaaagtcctgtttcttcactctccggcggcgaacgcaaccgccttttgctggcaaaactctttactcgtcccgccaatattttggttttggacgaaccgaccaacgacttggacatcgacacccaagaattgcttgaagatctgttgcgcgattaccaaggcacggtcttcctcgtctcgcacgaccgtatgttcctcgacaatgtaattacccaaagcattgttttcgaaggacaaggccgtctgaaagaatacatcggcggctatcaggactatatcgacgcaaaatcgcgggaagataaaattcagacggcatccgcacccaaagcatccgatgtcgaacccgccaaagaaaaacccaaagccaaccgtacggtcaaactttcctacaaagaacagcgcgaactcgacgccctgcccgacgaaatcgccgccttggaaaccgaacaggcagaaatcaacgcgcagctttccgatcccggaattttcaaagattacgaaaaagcaggagcattgcaaaaccgcgccgaagaaatcgaaatgctgcttttggaaaagctggaacgctgggagctgctggaaaccaaacagaacggcaatgccgtc

SEQ ID NO: 29108 - DNA, 1308 bp, Neisseria gonorrhoeae
atgaccgatttgtttgtccgagaacccgacgcaccgcttgccgaacgtctgcgcccgcatacgcttgatgatgttatcgggcagcagcatttaatcggcgaaggcaagccgctgcgcgtggcggtggaaggcgggaagccgcattctatgttgctgtgggggccgccgggcgtgggcaagacaacgttggcgcggattttggcgcagagtttcaatgcccagtttttgcctgtttccgccgtgttttccggcgtgaaggacatccgcggggcaatcgataaggctgaaatcgctttgcagcagggacgcgcgacgattttgtttgtcgatgaagtccaccgcttcaacaaggcgcagcaggacgcgtttttgccgcatgtcgaaagcggtttgctgacctttatcggcgcaacgacggaaaatccgtcgtttgaagtcaatcccgcgctgctgagccgcgcgcaggtatatgttttgcaatccttgtcttcagacgacctcaagaaactgattgccaaagtgttggctttgcccgaataccgggatttcacgattgaagccgatgtgcaagagctgctcgtcaataccgccgacggtgatgcgcgcagattattgaatttgttggaacaacttttacgtgccgccgacacgcgccgtctgaaaatcctgaccaccgaatttctcgccgacagcttgggcgcgcaaatccgccgtttcgacaaaggcggcgagagtttctacaaccaaatctccgccctgcacaaatccgtgcgcggttcgcatccgaacgccgcgctgtattggttttgccgtatgctcgacggcggcaccgacccgcgctatctcgcccgccgcatcgtgcgtatcgcttgggaagacatcgggcttgccgacccgcgcgccttccaaatcgccaacgatgccgccgccacctttgaacgcttaggctcgcccgaaggcgaactcgcgctggcgcaagccgtgctgtaccttgccgccgccgccaaatccaacgcgggctacaaggcatacaaccaaatgcgccgcttcgtcaaagaaaacgccagcgacgaagtgcccgtccacctgcgcaacgccccgaccaagctgatgaaggaattgggctacggacgcgaataccgctacgcccacgacgaaccgaacgcctacgccgccggcgaaagctatatgcccgacggcttggacgaaccggacttttaccaacccgtcccgcgcgggctggaaatcaaaatcggcgaaaagctggcatggttgaaatcgctggacgaagaggcattaaaggcaaaa

SEQ ID NO: 29109 - DNA, 1049 bp, Neisseria gonorrhoeae
atgaaaacctacgcacaggcactctataccgcagccctgctcaccgcctgcagccccgcagccgattcaaaccatccgtccggacaaaatgccccggccaataccgaatccgacggaaaaaacattaccctgctcaatgcctcatacgatgtgacacggtatttttacaaagaatacaaccacttatttatcaaaacataccaatccgaacaccccggcacatccgtcagcatccaacaatcccacggcggcttcagcaaacaggcattatccgtagccaacggccttcaagccgatgtcgtaaccatgaaccaatcttccgacatcgacctgctcgaaaaaaaggactggtagaaaaaggctggcaacaagccctccccgatcacgccgcaccctacaccagcactatggttttccttgtccgaaaaaacaaccccaaacagatccgcgattggaacgaccttgccaaagacggcgttaacatcgtcatcgccaagacctcgggcaacggacgctacgccttcctcggcgcatacggttacggtctgaaagccaacaacggcaacgagcaggaagcccaaaaactcgtcgcatccatcctcaaaaacacacccgtttttgaaaacggcggacgcgccgccgccaccaccttcacacaacgcaacatcggcgacgtactcatcacttttgaaaacgaagccaactacgtcagcaaaaaactgacccaaggacagtttgaaatcgtctatccgagctacaccatttccgccgaaagccccgttgccgtcgtcaacagcgtcgtcgcgaaaaaaggcacgcaaaaaaccgcccgcgcctatctcgaatacctttggagcgaaccggcgcaagaactcgccgcctcactctacctgcgtccccgcaaccccgaagtattggcacgacacaaagccgacttccccgacttagacaccttccctcccgaagaaaaattcggcggatgggacaacatcatgaaaacctacttcgccgacggcggcgtattcgaccgcctgaccgcacaaaaatga

SEQ ID NO: 29110 - DNA, 819 bp, Neisseria gonorrhoeae
atgccatccgttgaactgctgttggggattgtcggactgccacgcagcaccttctattaccaattggccgtccaatcggcagaaggcaaatatgccgatttgaaacgacatatccatgatatttatcaacgatataagggaagatacggctaccggaggattgcggcagccatccgtcacgcaggaataccggtcaatcacaagaaagtcagccgtctgatggcgaagacggggctgaaggcagtgatacggcggcgcaaataccgctcgttcaaaggagaagtcggcaaagttgcgccgaacatcctgcaacgctgtttccattcagaaaagccgaatgagaaatgggtaacggacgttaccaagttcgatgtaggcggagaaaagatatacctttctccgattatggatttgtttaacggggaaatcgtcagttaccgtattcaaacccgcccgactttcgatttggccggcgagatactgaaaggtgcgccggagaaaccggggccgtctgaaaagccgatgctgcattcggatcaaggttggcaatatcagatgtttttttatcaaaagcagttgaaaggcaacggtctggttcagagtctgtcccgcaagggaaactgcttggacaatgcggcaatggaaagtttcttcggaacgttgaaatcggaatgtttccatacgtgcaaatatgattccgttaccgaatcggaagcggcactgcacgaatatatccgttactacaacaacgatagaatcaagttgaaattaaaaggactgagccctgttcagtacagaattcagtccctgaaagccgct

SEQ ID NO: 29111 - DNA, 1200 bp, Neisseria gonorrhoeae
atgaatcattttaagaaacaacaaattcaaaatattgctgattttaatccgagagagcaactagccaagggagcattggcaaaaagtgttccgatggcaatgttgaaagaatttcaacgacaaattacgggttacgaaatcaaggcatttaacggtggagctaagtttcgcaatggtgataccttattagctaagattaccccgtgtttggaaaatgggaaaaccgcttttgtagatattttagatgatggagaagtggctttcggttctaccgaatttatcgtgttaagagcaaaaaatgaaaccaatcccgaatttctctattattttgcaatcagtcccgattttagaaaacgagcgattgaatgtatggaaggaacttccggcaggcaacgtgtcaatgaaaatgcattaaaaacactggagttgcctattccagaacctcaaatccaacaatccatcgccgccgtcctatccgctttggacaaaaaaatcgccctgaacaaacaaatcaacgcgcgcctggaagagatggcgaaaaccctgtacgactactggtttgtgcagttcgatttccccgacgccaacggcaagccctacaaatcctcaggcggcgacatggtgtttgacgaaaccttgaaacgggaaattccgaaggggtggggaagtatagaattacaatcttgcttagcaaaaatcccaaatactacaaaaatattaaataaagatattaaggattttggaaaatatcctgttgttgaccaaagtcaagattttatttgtggatttaccaatgatgaaaaatctatattaaacccacaagatgctcatattatttttggtgatcatacaagaattgttaagttagttaattttcaatatgcgcggggagcagatggtacacaagtaatattaagcaataatgaacgaatgccaaactatttgttttaccaaatcataaatcaaatagatttatcaagttatggttatgctagacattttaaattcttaaaagaatttaaaataattttgcctagtaaagatatttctcaaaaatataatgaaatagcaaatactttctttgttaaagttcgaaataatctaaaacaaaaccaccacctgacccaactacgcgatttcctactacccatgctgatgaacgggcaggtatccgtaagatgtagcggagcaagagatgga

SEQ ID NO: 29112 - DNA, 520 bp, Neisseria gonorrhoeae
atggagcgccgggcgaaccggttccgtaccattcgtactgcctgcggtccgccgccttgtcctgatttttgttaattcactatatttttccatttccgattcattggtacgcaaatgggtggcaagatacagattacacggtgaaagcggcatcaaacgcagaaagcatacgacaaaatattcggtcgaatacaaacttgaggcaatccgcccggtgacggggcagggaatgtcccaaaaagctgccgcagaccaactgaatctgcccgactgctccgttttgccgcaatggttgcgcctctaccgtttgaatggtattaacggtttaaagcccaaacccaaaggaagaaagcccgtgaaaaaacagtatccgccgcaaacgaaaaaagccgactatctgaaaaccaaggaagaactgtttgcggaattggcttaccttaaagcggaagcggctgtcctaaaaaagctcgatgccttgaaagaagtgcggcagaaagaacgcaactcgtcgcagggttaa

SEQ ID NO: 29113 - DNA, 1335 bp, Neisseria gonorrhoeae
atgaccgacacagccggcttgcgccgccgcaacctgcggcaatggatagcggaacactacggcggactgcaaaaccgttttgccgaagccgttgccctcaacacaggcgaactctccgcccttttgaaaaacaaatccttcggcgagaaaaaagcccgcaaaatcgaacaggcggcaaaaatgcccgccttctggctcgataccgaacacaccggccgaccgcccggacacacaggaaaacacaccatgtcccatatttcccccatccccgaaatcctagccgacatcaaagccggtaaaatggtcatcatcaccgatgccgaagaccgcgaaaacgaaggcgacctgctgatggcggcgcaattcgttacccccgaagccgtcaactttatgatcaaacacgcgcgcggcttagtctgcctgcctatggaaggtgcaatggtcgaaaaactcggtctgccgatgatgacccaaaaaaacggcgcgcaatacggtaccaactttaccgtttccatcgaagccgcgcacggcattaccaccggcatttccgccgccgaccgcgccctgactattcaaaccgccgtttccccgaccgccaaacccgcagacatcgtccaacccggtcatatcttcccgcttcgcgcccaaaaaggcggcgtactcgtccgtgccggacacaccgaagccggcgtcgacttggcgcaaatgaacgggctgattcccgccgccgtcatctgcgaaatcatcaacgacgacggcacgatggcgcgtatgcccgaactgatgaaattcgccgaagaacacaagctcaaaatcggcacgattgccgacctcatcgaataccgcagccgcaccgaaagcctgctcgaagatatgggcgacgcgcccgtacaaactccgtggggcgagttccaacaacacgtttacgtcgacaaactctccggcgaaacccacctcgccctcgtcaaaggcacaccctccgccgacaccgaaaccctcgtccgtgtccacgaacccttcagcgtgatggacttcatccaagccaatccgcgccattcctggtcgctgcccaaagcccttgagcgcgtccaacaggccgaaagcggcgtcgtcatcctcctgcaccacaccgaagacggcgcatccctgctcgaccgcaccctacccaaaggcgcaaaccaagcctacaaatgggacagcaaaagctacggcatcggcgcgcaaatcctcgccggcctccacgtcaaaaaactgcgcgtcctcggccaaccgtcatctttcaccggcctcaccggcttcggcctcgaagtcgtcggctttgaagaagcggaaaaa

SEQ ID NO: 29114 - DNA, 2086 bp, Neisseria gonorrhoeae
atgaacaaaaccctctatcgtgtgattttcaaccgcaaacgcggtgctgtggtagctgttgccgaaaccaccaagcgcgaaggtaaaagctgtgccgatagtggttcgggcagcgtttatgtgaaatccgtttctttcattcctactcattccaaagccttttgtttttctgcattaggcttttctttatgtttggctttgggtacggtcaatattgcttttgctgacggcattattactgataaagctgctcctaaaacccaacaagccacgattctgcaaacaggtaacggcataccgcaagtcaatattcaaacccctacttcggcaggggtttctgttaatcaatatgcccagtttgatgtgggtaatcgcggggcgattttaaacaacagtcgcagcaacacccaaacacagctaggcggttggattcaaggcaatccttggttgacaaggggcgaagcacgtgtggttgtaaaccaaatcaacagcagccatccttcacaactgaatggctatattgaagtgggtggacgacgtgcagaagtcgttattgccaatccggcagggattgcagtcaatggtggtggttttatcaatgcttcccgtgccactttgacgacaggccaaccgcaatatcaagcaggagactttagcggctttaagataaggcaaggcaatgctgtaatcgccggacacggtttggatgcccgtgataccgatttcacacgtattcttgtatgccaacaaaatcaccttgatcagtacggccgaacaagcaggcattcgtaatcaagggcagttgtttgcttcttccggtaatgtggcgattgatgcaaatggccgtttggtcaatagtggcacgatggctgccgccaatgtgcaagatatgaataatacagcggaacacaaagtcaatatccgcagtcaagcctttgaaaacagcggtacggcggtatcgcaacaaggcactcaaattcacagtcaatcgattcaaaacactggcaaattattgtcggcaggaacagaggatttagccgtttcaggcagcctgaacaatcaaaatggcgaaatagcgaccaatcaacaactgattattcacgatggtcagcaatctaccgttgtcattgataatacgaatggcacgatacaatcaggccgtgatgttgccattcaggcaaaatcgttatccaacaacggcacacttgccgctgataataaactggatattgcgttacaagatgatttttatgtagaacgcaagatcgtggcgggcaatgaattgtcgctcagtacacgaggcagcctgaaaaattcacataccttgcaagcaggaaaacgcattcggattaaagcaaataaccttgataatgcagtacaaggcaacattcaatccggcggtacgacagacattggcacgcagcacaatttaaccaatagaggcttgattgacggacaacaaaccaaaatccaagccgggcaaatgaataatatcggtacaggtcggatttatggcgacaatatcgctattgcggctacccgcttagacaatcaagatgaaaacggtacaggtgccgccattgcggcacgcgaaaacctgaatttaggcattgaacaattaaataaccgtgaaaacagtctgatttacagcggtaacgatatggcggttggcggcgcattagataccaatgaccaagccacaggcaaagcccaaaggatacacaatgccggcgcaatcattgaagctgcaggcaaaatgcgtttaggtgtagaaaagctgcacaataccaatgagcatttgaaaacgcagttggtagaaacagggcgcgagcgtattgttgattacgaagcatttggacgacacgaattattgcgagaaggcacgcaacatgaattaggctggtttgtctacaacaatgaatcagaccacttacgcacccctgatggagtggcgcatgaaaattggcataaatacgattatgaaaaagtaacgcaagaaactcaagtaaccggaactgcgcctgctaaaatcattgcaggtagcgatttgattattgatagcaaagcagtcttcaacagcgacagc

SEQ ID NO: 29115 - DNA, 3695 bp, Neisseria gonorrhoeae
tggcgtgcgcgtcgtaaaggacatgatgaaacagggcatcgtgaacaaaattatactttgccggaggaaatcacacgcgacatttcactgggttcatttgcctatgaatcgcatagcaaagcattaagccgtcatgcgcccagccaaggcactgagttgccacaaagtaaccgggataatatccgtactgcgaaaagcaacggtatttcgctaccctatacgcccaattcttttaccccattacccggcagcagcttatacattatcaatcctgccaataaaggctatcttgttgaaaccgatccacgctttgccaactaccgtcaatggttgggtagtgactatatgctgggcagcctcaaactagacccaaacaatttacataaacgtttgggtgatggttattacgagcaacgtttaatcaatgaacaaatcgcagagctgacagggcatcgtcgtttagacggttatcaaaacgacgaagaacaatttaaagccttaatggataatggcgcgactgcggcacgttcgatgaatctcagcgttggcattgcattaagtgccgagcaagcagcgcaactgaccagcgatattgtttggttggtacaaaaagaagttaaacttcctgatggcggcacacaaaccgtattgatgccacaggtttatgtacgcgttaaaaatggcggcatagacggtaaaggtgcattgttgtcaggcagcaatacacaaatcaatgtttcaggcagcctgaaaaactcaggcacgattgcagggcgcaatgcgcttattatcaataccgatacgctagacaatatcggtgggcgtattcatgcgcaaaaatcagcggttacggccacacaagacatcaataatattggcggcattctttctgccgaacagacattattgctcaatgcgggtaacaacatcaacaaccaaagcacggccaagagcagtcaaaatgcacaaggtagcagcacctacctagaccgaatggcaggtatttatatcacaggcaaagaaaaaggtgttttagcagcgcaggcaggcaaagacatcaacatcattgccggtcaaatcagcaatcaatcagatcaagggcaaacccggctgcaggcaggacgcgacattaacctggatacggtacaaaccggcaaatatcaagaaatccattttgatgccgataaccataccatccgaggttcaacgaacgaagtcggcagcagcattcaaacaaaaggcgatgttaccctattgtcagggaataatctcaatgccaaagctgccgaagtcggcagcgcaaaaggcacacttgccgtgtatgctaaaaatgacattactatcagctcaggcatccatgccggccaagttgatgatgcgtccaaacatacaggcagaagcggcggcggtaataaattagtcattaccgataaagcccaaagtcatcacgaaactgctcaaagcagcacctttgaaggcaagcaagttgtattgcaggcaggaaacgatgccaacatccttggcagtaatgttatttccgataatggcacccggattcaagcaggcaatcatgttcgcattggtacaacccaaactcaaagccaaagcgaaacctatcatcaaacccaaaaatcaggattgatgagtgcaggtatcggcttcactattggcagcaagacaaacacacaagaaaaccaatcccaaagcaacgaacatacaggcagtaccgtaggcagcctgaaaggcgataccaccattgttgcaagcaaacactacgaacaaaccggcagcaacgtttccagccctgagggcaacaaccttatcagcacgcaaagtatggatattggcgcagcacaaaaccaattaaacagcaaaaccacccaaacctacgaacaaaaaggcttaacggtggcattcagttcgcccgttaccgatttggcacaacaagcgattgccgtagcacacaaagcagcaaacaagtcggacaaagcaaaaacgaccgcgttaatgccatggcggctgccaatgcaggttggcaggcctatcaaacaggcaaaggcgcacaaaacttagccaatggtacaaccaatgccaaacaagtcagcatctccataacctacggcgaacagcaaaaccgacaaaccacccaagttcaagccaatcaagcccaagcgagtcaaattcaagcaggcggcaaaactacccttattgccgaaggtgcggcgaacaatccaatatcaacatcacaggctcaggtgtttcaggcagagcaggaaccggcctgattgccgataagcaaatccatctgcaatcagccgagcaaagcaataccgaacgcagccaaaacaaatcagcaggctggaacgcaggtgctgccgtatcattcggacaaggaggctggtcattaggcgttgccgcaggcggcaatgtcggcaaaggctacggctatggcgatagcgtaacccaccgccatagccatattggcgacaaaggcagccaaacccttatccaaagtggtggcgataccatcatcaaaggcgcgcaagtacgcggcaaaggcgtacaagtcaatgccaaaaacctaagcattcaaagtgtacaagatagagaaacttatcaaagcaaacaacaaaacgccggtgcacaagttaccgtaggttatggcttcagtgccagtggcgattacagccaaagcaaaatccgagccgaccatgcttcggtaaccgagcaaagcggtatttatgccggagaagacggctatcaaatcaaggtcggaaaccatacaggcctcaaaggcggcatcatcaccagcagccaaagcgcaaaagacaagggtaaaaaccgattcagcacaggcacactcgccggcagtgatattcaaaattacagccaatacgaaggaaaaagttttggattgggtgccagcgttgccgtaagcggcaaaacactgggacagggcgcaaaaaataaacctcaagacaaacacctgacaagcatagccgataaaaacggcgcaagttcatcagtagggtacggcagcgacagcgacagtcaaagcagcatcacaaaaagcggcatcaatacccaaaaacattcaaatcacagacgaagccgcacaaatcaggctgacaggcaaaatagcggcacaaaccaaagccgatattgatacaaacgtaaccacagacaccgccgaacgacattcgggcagcctgaaaaacatatttgacaaagatagagtgcaaagtgaactggatttacaaagaaccgtcagccaagattttagtaaaaatgttcaacaaaccaataccgagattaaccaacatttagacaaactcaaagcagacaaagaagcagccgaaacagcagcagccgaggcattagccaatggcgatatggaaactgccaaacgcaaagcccatgaagctcaagatgcggcagcaaaagcagataattggcaacaaggcaaagtcattctcaacatgttagcctcaggtttagctgagccgacccaaagcggagcgggcatcgctgcggctaccgcatcgccagacgtatcgtatgcgattggacagcactttaaagatttagccggtcaaaacgcgaatggcaaactaaccgccagtcaagaaaccgctcacgttcttgcccacgcggtattaggagcagcggttgccgcagcatgaggcaacaatgcc

SEQ ID NO: 29116 - DNA, 1443 bp, Neisseria gonorrhoeae
atgagtacacagacaaattttgatttggtgttgttcggtgcgaccggcgatttggcaatgcgcaaacttttgccctgcctgtatcaggcgcatgttgccggtctgcttcatcccgaagggcgtattttgggggtcagccgcagcgagttggataccgaaggttttctggcgaaggtggaaaccagttccaaaatccatgtgaaagaaaatttttccggtgaggcgtgggcttcgtttgttgaacgtctcgcatatctcaaagtcgatgttacgcagccggacgattttgccgctttgggcgatttggtcaaagcacgcaaagaaaccgacaacgtcgtcatctatctgtccaccgcgccgaaattcttcgcgcaagcctgcgaaaaccttgctgcgatcggtttgaatgccgacaatgtgcgcgtggttttggaaaaaccgctgggtacggatttggcttcttcccaacaaatcaataccgatgtggcgcgttatttcaaagaagggcaaatttaccgcatcgaccactaccttggcaaagaaagcctgcaaaacctgcttgcgctgcgttttgccaatgtaatgttcgagccgctgtggaacaataaatacatcgaaagcgtgcagctgaccatcgccgaacagctcggtgtggaagagcgcggcgagttttacgacattaccggcgcgttgcgcgatatggtgcaaaaccatttgatgcagatgctgtgcatgactgcgatggaagcccccgccggcttggatgccgacgcggtgcgcgatgaaaaagtcaaagtcatcaagtcattgaagccgctgaccatcgaatctgtcaatgaaaatgtcgtgcgcggacaatataccgctgccaaaggcatgaacggctatcttgaagaaatcaacgttccgcaagacagctttaccgaaacctacgtcgccattaaagccgaaatcgaaaacgaacgctggaagggcgttcccttctacctgcgtaccggcaaacgcatggcgggcaaagtggcggaaatcgttttgaacttccgcccgctgcaaaaccatattttcgacaacagccaaaccgcgccgaaccgtttggttatcgagcttcaaccgaatgaatccgtccgcctttacacgcaggtgaaaaccccgggtgcgggcaacaaagtggaagtaacgcctttgggcgtggatttgggcaaggccgttgaaggccgccgcgccgaggcttacgaacgcctgctgttggatgtgattaacggcaaactcgctttgttcaaccgccgcgacgaactcgaagccgcgtgggaatatgtgatgccgattttggaaaactgggcaaataacaccacgccgccgcacggttacggcgcacactcttggggtcctgaagccgcccgcgaactgttggcgcgcgacggcaacaagtggcacgaagaacag

SEQ ID NO: 29117 - DNA, 777 bp, Neisseria gonorrhoeae
atgagcgcaaccattcccccaaaaatcatccgatacgacagcaatccgacagatgtctattttttcggcacttgcgtccttgatctttttatgcccgaagcaggcatggatgccattgccctaatcgagcagcagggcatacgcgtccatttcccgatggcgcaaagctgctgcggtcagcctgcctattcatccggccatccgaccgaagccttcgatgtcgccaaagtgcaactcgaccttttccccgaaaactggccgattgtcgtaccgtccggctcatgcggcggcatgatgaaacatcactggcctaccctgtttaaaaatacagaatacgaatccaaagcggttgattgtgccaaccgtatcattgagtttactcatttcttgcttgccatcggctacaagcctgaagacaaaggcgagccagtcaaagtcgccgttcacacttcctgtgccgcccgccgagaaatgaatgtccatctttcaggctggcagttgattgacggtatggaaaacgtcgaacgcatcgtccacgaccacgaaagcgagtgttgcggcttcggcggcacattctccgtcaaacaagccgatatttccggcgcgatggtaaccgacaaagttgccgcgctgaaagaaaccggcgcaaccgaaatcatcagcgcggactgcggctgtatgatgaacatcggaggcaaaatcgccaaggacgagccggatatgccgcgtccgaagcatatcgcatccttcttgttggaacgcaccggaggcaaagta

SEQ ID NO: 29118 - DNA, 1704 bp, Neisseria gonorrhoeae
  misc_feature (648)..(648): n=g, a, t or c
gtgcgcatcgatgtgcggaaacgccccccgtcacggaaaacctcaatcgggagcatacagatgaaacaccttcacgacttaccggcctggtcaaaattgtggaaccactttgacgacagcaaaacattgcatatgcgcgaaatgttcgagcaagacccgcagcgggcggaacgctactggctgcaagtcggcggactgacgctggactactccaaaaaccgcatcaacgacgaaaccatgtccctactgttcgagttggcgcgtgaagcaggcgtgccggagcggatgcggcagatgttccacggcgaaaaaatcaataccaccgaaaaccgcgccgtcctgcatgtcgcccttcgcaaccgcaccaattcgccgattatggttgacggtgaagatgtgatgcccaaagtcaaccgcgttttgcaacgtatgggcgaatttgcacacgaagtccgcagcggaagctggctgggctataccaaccaagtcattaccgacgttgtcaacatcggcatcggcggatcggatttgggcccgctgacgatgtgtaccgcgctcaaacctttcggtcatccgcgcctcaatatgcacttcgtctccaacgtggacggctcgcaactgcgcgacgtattgtccaaagtccacccngaaaccacgctgttcatcatcgcctccaaaacatttaccacgcaggaaacgctgaccaacgcgctgaccgcgcgcgaatggtttttgaatcatgcgggtgacgaagaagccgttgccaaacacttcgccgccgtttccaccaatcgaaaagccgtcgccgaattcggcatcgacatcgccaatatgtttgaattttgggattgggtcggcggtcggtacagcctgtggtccgccatcggattgccgattatgctgtatctcggcgaagaaaacttcatcgaaatgctcaacggcgcgcacctgatggaccaacacttcatcaacaccccgctcgagcgcaacctgcccgtcatcctcgccctcatcggcatctggtatatcaactactacggtggcggcagccacgtcatcgcgccttacgaccaacatttgcaccgcctgcccaaattcatccagcagctcgatatggaaagcaacggcaaacaggttacgttggacggcaaagcagtcggacacgaaacctcgccgattatctggggagaaacgggcattaacggtcagcacgccttcttccaactgctgcatcaaggcacgcacatcacccccatcgacctgattgcctcgcttgaaaaacgcagcaacctgcccggacaccacgaaatcctgcttgccaacgtctttgcacaagcagaagcctttatgtgcggcaaaacccccgacgaagtccgcgccgaactcaaagcgcagggtatggatgaggcgcgcatcgaagagctggttccgcacaaaaccttctccggcaaccgcccgaccaacctcatcctgatggataaggtcaacccccgcaatatgggcagcctgattgccatgtacgaacacaaaaccttcgtccaaggcatcatttggggcatcaacagcttcgaccagtggggcgtggaactcggcaaacaactggctaaaaccattttgggcgaactgacaggcgaaaccgaacctcaaaaacacgacagctcgaccgaacgcctgattaacctctacctgcagaccaaccgcaaa

SEQ ID NO: 29119 - DNA, 809 bp, Neisseria gonorrhoeae
atgccatccgttgaactgctgttggggattgtcggactgccacgcagcaccttctattaccaattggccgtccaatcggcagaaggcaaatatgccgatttgaaacgacatatccatgatatttatcaacgatataagggaagatacggctaccggaggattgcggcagccatccgtcacgcaggaataccggtcaatcacaagaaagtcagccgtctgatggcgaagacggggctgaaggcagtgatacggcggcgcaaataccgctcgttcaaaggagaagtcggcaaagttgcgccgaacatcctgcaacgctgtttccattcagaaaagccggaatgagaaaatgggtaacggacgttaccaagttcgatgtaggcggagaaaagatatacctttctccgattatggatttgtttaacggggaaatcgtcagttaccgtattcaaacccgcccgactttcgatttggccggcgagatactgaaaggtgcgccggagaaaccggggccgtctgaaaagccgatgctgcattcggatcaaggttggcaatatcagatgtttttttatcaaaagcagttgaaaggcaacggtctggttcagagtctgtcccgcaagggaaactgcttggacaatgcggcaatggaaagtttcttcggaacgttgaaatcggaatgtttccatacgtgcaaatatgattccgttaccgaatcggaagcggcactgcacgaatatatccgttactacaacaacgatagaatcaagttgaaattaaaaggactgagccctgttcagtacagaattcagtcc

SEQ ID NO: 29120 - DNA, 520 bp, Neisseria gonorrhoeae
atgaagcaccgggcgaaccggttccgtaccatttgtactgcctgcggtccgccgccttgtcctgatttttgttaattcactatatttttccatttccgattcattggtacgcaaatgggtggcaagatacagattacacggtgaaagcggcatcaaacgcagaaagcatacgacaaaatattcggtcgaatacaaacttgaggcaatccgcccggtaacggggcagggaatgtcccaaaaagctgccgcagaccaactgaatctgcccgaatgctccgttttgccgcaatggttgcgcctctaccgtttgaatggtattaacggtttaaagcccaaacccaaaggaagaaagcccgtgaaaaaacagtatccgccgcaaacgaaaaaagccgactatctgaaaaccaaggaagaactgtttgcggaattggcttaccttaaagcggaagcggctgtcctaaaaaagctcgatgccttgaaagaagtgcggcagaaagaacgcaactcgtcgcagggttaa

SEQ ID NO: 29121 - DNA, 888 bp, Neisseria gonorrhoeae
atgagcgtattgattaataaagacaccaaagtattggttcaaggttttaccggtaaaaacggtactttccactccgaacaagctctggcttacggcactaaagttgtcggcggcgttaccccaggcaaaggcggtcaaacccacctagacctgcctgtattcaacaccatgaaagaagccgttaaagaaaccggcgctgacgcatccgtgatttacgttcccgctccgtttgtgttggattctatcgttgaagccgttgattcaggcgtaggcttggtcgttgtgattaccgaaggcgttccaactctggacatgctcaaagccaaacgttacttggaaaccaacggcaacggtacccgcttggtcggccctaactgcccgggcgtgattactccgggcgagtgcaaaatcggcattatgccgggccacatccacactccgggccgcatcggtattatttcccgttccggtacattgacttacgaagccgtggcacaaaccaccaacctgggcttgggtcagtcaacctgtatcggtatcggcggcgacccgattcctggtatgaaccaaatcgacgcactgaaactcttccaagaagacccagataccgatgccatcatcatgattggtgaaatcggtggtactgcggaagaagaagcagccgaatacatccaatccaacgtaaccaaacctgttgtcggttacatcgccggtgttaccgctcctaaaggcaaacgcatgggccacgccggtgcgattatctccggcggtaaaggtactgccgaagaaaaattcgccgcgtttgaaaaagccggtatcgcctacacccgcagccctgccgagttgggcacgacgatgctggaagtgttgaaagcaaaaggtttggca

SEQ ID NO: 29122 - DNA, 2948 bp, Neisseria gonorrhoeae
cgttccgccgacaaatgccgtctgaacgcggcttcagacggcatccgagaaagtgctacaatatcggttttcctttattttttcaggcggcatccattatgtgcaaccatcatccccgacattcgcacgacaacgacaccatccgcattcgcggcgcgcgcacgcataatttgaaaaacatcgatttggacattccccgccacaagctcgtggtggtaacaggattgtcaggcagcggcaaatcatcgctggcgtttgatactttatatgccgaagggcagcggcgttatgtcgagagcctgtctgcctatgcgcggcagtttttgcagatgatggacaaacccgatgtcgatttgattgaaggcctgtcgcctgcgatttccatcgagcagaaatccaccagccacaatccgcgttccaccgtcggcacggtaacggaaatccacgactacctgcgccttttatacgcccgtgtcggcacgccgtattgccccgaacacaagctgccgctatccagccaaaccgtatctcaaatggtcgatgccgtattaaaactgccggaagatacgcgcgtgatgattctggggccggcggtgcgcgagcgtaagggcgagtttgtcgatttctttgccgacttgcaggcgcaaggctttgcccgtgtgcgcgtggacggcgaagtctatcagcttgacgaagtaccgaagctggaaaaaaacatcaaacacaatatcgacgtcgtcatcgaccgcgtgaaagtgaaagccgacatcaaacaacgactggcggaaagttttgaaaccgcgctgcgccacggcaacgagcgcgcgctggcgatggaaatggacagcggcgaagaacattggttttccgcgcgttttgcctgccccgtgtgttcgtacagcctgcccgaattggaaccgcgcctcttttcgttcaacaacccgatgggttcctgcccgacttgcgacggcttgggcaacaccaatttcttcgaccccgaaaaagtagtcgcccatcccgaattgtcgctggcaaccggcgcgattgacggttgggacaaacgcaaccaattctatttccaaatgattcaatcgctggcgcatcattataaatttgatgtcaacgtcgcttgggaaactttgcctgaaaaagtcaaaaaagtcgtgttgcacggctcgggcaaagaagtcattgatttcacctacctgtccgaacgcggcaccaccttcaaccgcagccacgccttcgagggcatcatccccaatctcgaacgccgctaccgcgaaaccgacagcgaaaccgtgcgcgaaaaactgcgcgagtaccaaaatcaccgtgcctgcccgagctgcggcggcgcacgtttgcgcaaagaagcacgctacgtttacgtcggcggcgaaccgttgcacgaagtctccgcctggccgctgaccaaaacccaccgattcttcgaaacgctggatttggacggcaacaaaaaacagatcgccgaaaaaatcctcaaagaaatcaccgagcggctcggcttcttgattaacgtcgggctggattacctgaatttaagccgttccgccgaaaccctttccggcggcgaagcccagcgcatccgcctcgccagccaaatcggcagcggcctgaccggcgtgatgtacgttttggacgaaccctccatcggcctgcaccagcgcgacaacgaccgcctgctcgccaccctcaaacgcctgcgcgatttgggcaacagcgtaattgtggtcgaacacgacgaagacgccatccgcgaagccgatttcgtcgtcgatatgggccccggcgcgggcgaacacggcggcaacgtactgattgccgacacgcccgaaaatgtcgccaaatgcgaaaaatccgttaccggacaatacctcggcggtaaaaaatccattgccgtgccgtctgaacgcacgcccgtcaatcccggccgaatgctcgtcctcaaaggcgcgcgcggcaacaacctcaaaaacgtaaccctcgagttgccgcttggtttgattacctgcatcaccggcgtatccggcagcggcaaatccaccctgattaacgacaccctcgccaaaatcactgcccgcgaactcaaccgcgcccaagaagagcccgccccatacgacgacatccgcggcctcgaacacctcgacaaagtcatcaacgtcgaccaatcccccatcggccgcaccccgcgctccaaccccgccacctacaccggcctgtttacccccatccgcgaactcttcgccggcgtacccctctcgcgcgaacgcggctacaacgtcggcagattctccttcaacgtcaaaggcggccgctgcgaagcctgccaaggcgacggcgtaatcaaagtcgaaatgcacttcctgcccgacgtgtacgtcccctgcgaagtctgccacggcaaacgctacaaccgtgaaaccctcgaaatccaatacaagggcaaaaacatcagccaagtcctcgacatgacggtcgaagaagcccgcgaatttttcgacgccgtccccaccgtatcgcgcaaactgcaaaccctgatggacgtaggtctcggctacatccgcctcggccagtccgccaccaccctctccggcggcgaagcccagcgcgtcaaactcgccttggaactctccaaacgcgacaccggcagaacgctctacatcctcgacgaacccaccaccggcctgcacttcgccgacatcgccctgctgctggaagtcataggccgtctgaaaggcaaaggcaactcgattgtgattatcgagcataatctggatgtaattaaaaccgcggattggattgtggacttagggccggaaggcggcgatggtgggggtaaggttatcgcgaaaggtagccctgaggaagtggcgaaggttaaggggagttataccgggaagtatttgaaagtggttttgaagtaa

SEQ ID NO: 29123 - DNA, 468 bp, Neisseria gonorrhoeae
ttgtacaaacaatatgcggactggaacagattatcctacaatgcgccaatttatgttggcaaggccgtccccaaaggctggcggcaagcaagaaattctgataatgcgctaaaccaatcaaccgaactgttccaccggttgaaagaacacagcaggagtattgccgctgtttctgatttagatccttccgatttcatgtgcagattcgttatctttgaaggtgccggttctgacatgataggcacaatcgaagctgccctgattaaattacacaaacctctatggaactcttgtgtcgatggtttcggaaaccacgaccccggaaaaggccgttacgaacaagccaaatcggattgggatgtccttcatagcgggcgggtttgggcagataggctaaacggcataccgaatagctatgagtccatacttgaaaatatcaacacacatttagagataataaagagaaaa

SEQ ID NO: 29124 - DNA, 2826 bp, Neisseria gonorrhoeae
atgatggacgaaaaactcaatttctcttatctgttcggttcgaacgcaccctacattgaggaattgtacgaggcttttttggaaaaccccgatgcggttgatgaaaaatggaagcagtatttcaccgatttgagcaaacagccggggacggttgctgtcgatgtcgcacacacaccgattcgcgaatcatttgttactttggcgaaaaagaaaattgcatctgccgttgcgggcggtgcggatgaggcaatgctgaaaaagcaagtcagcgttttacggctgatttctgcctatcgtatccaaggcgtgggtgcggcccaacttgatccgctcaaacgtatccctccgcgcgatattgaagccctcgatccgaaattccacggtctgtcagatgccgatatggcgcttcgattcaatatgggcgagggtgattttgccaatcgcggcaaactgctcttgtcccaaatcatcagcaacctcaaacaaacctactgcggccacatcgcattggaatatatctatattcccaataccgaagagcgccgttgggtacgcaactattttgaaagcgtattgtccacaccgcattacaatgccgatcaaaaacgccgtatcttgaaagagatgaccgctgccgagactttggaacgttatctgcataccaaatatgtcggtcagaaacgtttcggtgtcgaaggcggcgaaagcgcgattgccggtttgaactacctgattcaaaacgccggtaaggacggcgtggaagaagtcatcatcggtatggcgcaccgtggccgtctgaatgttttggtgaacattttgggcaaaaaacccggcgatttgtttgccgaatttgaaggccgtgccgaaatcaaactgcctagtggcgacgtgaaataccatatgggcttcagctccgatattgccacccctcacggcccgatgcacgtttctttggcgttcaacccgtcacacttggaaatcgtcaatccggtagtggaaggttctgcacgcgccaaacaaaaacgtttgggcgaaaacggccgcgataaagtcttgccggtattgattcacggcgattccgcatttatcggtttgggtgtcaaccaagcaacattcaacctgtctaaaacgcgcggttataccacaggcggtacggtccatatcgtcatcaacaaccaaatcggctttaccacttccgatatccgcgatacccgttcaaccgtacactgtaccgatatcgcaaaaatggtttccgctccggttatccatgtgaacggcgatgatcccgaacgcgtttgctttgccattcaagccgctttggattaccgcaaaaaattccataaagacatcgtaatcgacgttgtctgctaccgtaaatggggtcacaacgagggcgatgatccgactttgacccaaccgatgatgtacaaaaaagtatcgcaacatccgggtgcgcgtgctttgtacaccgagcaactgattgccgaaggcgtggtaactcaagttgaggccgacggttacatccaagcctaccgtgatgctttggacaaaggcgaacatgttgagcaaacaacgttgagcaacttccaacgcacacaaatcgactggagcaaataccaaggtaaagattggcgcgaaaaaatcgaaaccggtttgcctgccgccgacattgagcgtcttactgagaaattcaccgctgtgccggaaggctttgccctgcatccgactgcaaaacgtgtgatcgaagcgcgtaaagccatggcatccggcaaacaagccatcgactggggtatggccgaaaccctcgcatacgcaagcctgctgaccaaaggtcatggcgtgcgtatctccggtgaggactccggccgcggtacattctcacaccgtcatgccgttctgcacgatcaaaaacgcgaaaaatgggacgacggtacttatgttcctcttcgcaacatgggcgaaggcttgggcgagttcctggttatcgactctatcttgaacgaagaagccgtgatggcgttcgagtacggctttgcctgctccgctcctgacaagctgaccatttgggaagctcaattcggtgacttcgccaacggcgcgcaagtaactattgatcaattcctgtcttcaggcgaaaccaagtggggtcgcttgtgcggtctgaccaccatcctgccgcacggctacgacggtcaaggccctgaacactcttctgcacgcgtagaacgttggttgcaactgtgttctgagaacaatatgcaagtcatcatgccgtctgaagcgtcgcaaatgttccatctcttgcaacgccaagtcttgggttcataccgcaaaccgctggtgattttcatgtccaaacgcctgttgcgcttcaaaggtgcaatgagcccgctggaaaacttcaccgaaggttcgactttccgtccggttattggtgataccgccgaacgcgcaagcaacgacagcgtgaaacgcgtggtattgtgtgccggtcaggtttactatgacttggaagccggtcgagccgaacgtaaactggaagatgatgtcgctatcgtccgcgttgagcagctgtatccgttcccatacgacgaggttaaagccgaactggcgaaatatccgaacgcaaaatctgtggtttgggcgcaagaagagccgaaaaaccaaggcgcgttctaccaaatccgccaccgcatcgaagacgttatcagcgaagagcaaaaactgtcttatgccggccgtccaagcagcgcatcgcctgcagtgggctactcaagcaaacacattgctcaattgaaacaattggttgaagacgctttggcgtta

SEQ ID NO: 29125 - DNA, 1632 bp, Neisseria gonorrhoeae
atgaccaaattcattttcgtaaccggcggcgttgtctcctcactgggtaaaggtatcgccgccgcttctattgccgccatcctcgaatcgcgcggcttgaacgttaccatgctcaagcttgatccttatatcaacgtcgatcccggcacgatgagcccgttccaacacggcgaagtgttcgtaaccgacgacggcgcggaaaccgacctcgacttgggacactacgaacgtttcatcgattccacgatgacccgccgcaacagcttcagcacgggtcaggtgtacgaaaacgttatcgccaaagaacgccgcggcgactatctcggcggtacggttcaagtcatcccgcacattaccgacgaaatcaaacgacgcatccacgaaggcgcggcgggttacgatgtggcgattgtcgaaatcggcggtacggtcggcgacatcgaatcgctgccgtttttggaagccatccgccagatgcgaagccagttgggacgcaacaacaccctgttcgcccacttgagctacgttccctacatcgccgccgcaggcgaaatcaaaaccaagccgacccagcacaccgtgaaagaaatgttgagcatcggcttgcaacccgacatcctgatttgccgtatggacaggaaaatgccggcagacgaacgccgcaaaatcgccttgttctgcaacgtggaagagcgcgcgattgtcggcagctacgatgtggacagcatctacgaatgccccgaaatgctgcacgaccaaggcatcgacaacatcattaccgagcagttgcagcttaacgtgcagcaggcggatttgaccgcgtggaaaaaaatcgtccacgccgtcaaaaacccgaaacacaccgtcaaaatcgcgatggtcggcaaatacgttgatttgaccgaatcctacaaatcattgattgaagccttgaaacacgcgggcatccataccgaaaccgatgtgcagattaccttcgttgacagcgaaagcatcgagaaaaacaagggcgacgtttccgtactcaaagatatggatgccatcctcgttcccggcggcttcggttcgcgcggcgtggaaggcaaaatcgccgccgtgcgctacgcccgtgaaaacaacgtgccatacttgggcatctgcctcggtatgcagattgcgctgattgaatacgcccgcgacgtggcaggtttgaaaggtgcgaattccactgagtttgacttgaaatgcgctgcccccgtcgtcgccctgattgacgaatggcaaaccgccgacggcagcgtcgaaacccgtgacgaatccgccgatttgggcggcacgatgcgtttgggcgcgcaagaagtcgaattgaaagcaggcagcctcgccgtcaaaatctacggcagcggacacattcgcgaacgccaccgccaccgctacgaagtcaacaacaactatgtttccgcgctggaacaggcaggtttggtcatcggcggcgtatccgccggacgcgaacgcttggtcgaaaccatcgaactgccgaaccatccttggttcttcgcctgccagttccatcccgagttcacgtccaacccgcgcaaagggcatcctttgttcaccgcgtttgtcaaagccgcgttgaacaataaaaaagcc

SEQ ID NO: 29126 - DNA, 1149 bp, Neisseria gonorrhoeae
gtgttaaaatccgcctttaaaaaccgccgtttccaagccatcctgcgtatgaatacgacatcaaacacttccaatatcatcgtcgggctttccggcggtgtcgattcttccgtaaccgccgccctgctcaagcagcagggttatcaagtgcgcggtgtgttcatgcagaactgggaaaacgacgacaacgacgaatattgcagcatcaaacaggattcgttcgatgccatcgccgttgccgatattgtcggcatcgacatcgacatcgttaatttcgccgcgcaatataaagacaaagtttttgcttattttcttcaggaatacagtgcggggcgcacgccgaatccggatgtgttgtgcaatgccgaaatcaaattcaaatgctttttggactacgccgtagggcagggcgcggataccattgccaccggacactatgcgcgcaaagaagcccgcaacggcgtgcattacctgctcaaaggtttggatcgaaacaaagaccaaagctattttctctaccgcctcaagcctttccaactcgaacgcgcgatttttccgttgggcggtttggaaaaacccgaagtgcgccgccttgccgccgaatttaatttgccgactgccgctaaaaaagacagtaccggcatctgtttcatcggcgagcgtccgttccgcgagtttctgcagaaatacttgccgaccgacaacggcaaaatggtgacgcccgaagggaaaaccatcggcgaacacgtcgggctgatgttttacacattgggtcagcgcaaaggattgggcatcggcggcgcgggcgaaccgtggtttgttgcggctaaagatttgacgaaaaacgaactcatcgtcgtacaaggacacgaccatccgctgctctatacccgcagccttgtgatgaacgatttgagtttcacgctgcccgaacgtccgaaggcaggacgctatacctgcaaaacgcgttaccgtatggcggacgcgccttgcgaattgtgctatttggatgatgaaaccgccgagctggtgtttgacgaaccgcaatgggcggttacgccgggtcagtccgccgtgctgtacgacgtcgacatctgtttgggcggcggcatcatccaaacgaccgacaaacccgtcatcatcacgcga

SEQ ID NO: 29127 - DNA, 1281 bp, Neisseria gonorrhoeae
atgtccaaatcaatcaaactcaacgtaccgggtcgggcaggtttggagctgccggtattggaagccagcatcgggcatgatgtggttgacattcgggggctgacaaaaaatacaggtttgtttgccttcgaccccggatttgtttcaaccgcaagctgtgagtctaaaattacttacatcgacggcgatcaaggcttgctttattatcgcggataccccatcgagcagctggccgaaaagtccgattatttggaagtctgctacctgttgatttacggcgaactgccgactcccgagcaaaaggcagaatttgacaatacagtccgccgccacacgatggtgcatgaacagctgacttggttcttccggggtttccgccgcgacgcgcatccgatggcgatgatggtcggcgtggtcggcgcgctgtctgcgttctaccaagacagcttggacattactaatcccgaacaccgcaaaatcgcgatttaccgccttatttccaaaatcccgaccattgcggcaatgtgttaccgctattcaaacggtctgccgttcaattatccgaagaataatctttcttattcagaaaacttccttcatatgatgtttgccacaccgtgtgaagactacaaacctaatcccgttttggcacgcgcgctcgaccgcatctttattttgcatgccgaccacgagcaaaacgcctcaacttcaaccgtccgtctggcaggctcttcgggtgcgaacccgtttgcctgtattgctgccggtatcgcctgcctgtggggtgcttcgcacggcggtgcgaacgaagccgtgttgaaaatgctggatgaaatcggcgatgtgtccaatgttgccgcatacatggaaggcgtgaaacagcgcaaataccgcctgatgggcttcggacaccgggtataccgcaatatggatccgcgtgccagcattatgcgcgaaacctgctatgaagttttgaaggaattgggcttggaagacagtccgaaattcaaactggcgatggaattggaacagattgcgctgaaagacccgttctttatcgaacgcaaactgtatcccaatgtcgatttctattccggcatcgtcctgtccgcgctgggcatcccgaccgaaatgtttaccgtcatcttcgccctgtcgcgcagcgtgggctggatttcgcactggcacgagatgattagcgatccttcgctgaaaatcggccgcccgcgccagctttataccggttcggaacgccgcgattatgtgccggcaggcgagagg

SEQ ID NO: 29128 - DNA, 246 bp, Neisseria gonorrhoeae
atgatggtttttgacgacattgccaaacggaaaatccgttttcaaacccgccggggattgttggaactagatttaatcttcggcaggtttatggaaaaagaattcgagcatttgagcgataaagagctgtccgagttttccgaaatccttgaatttcaagatcaagaattgcttgccttgattcacgggcattcggaaacggacaaagggcaccttatcccgatgcttgaaaaaatcagacgggca

SEQ ID NO: 29129 - DNA, 1761 bp, Neisseria gonorrhoeae
atgggttttcctgttcgcaagtttgatgccgtgattgtcggcggtggcggtgcaggtttacgtgcagccctccaattatccaaatccggtttgaattgtgccgttttgtctaaagtgttcccgacccgctcgcataccgtagcggcgcagggcggtatttccgcctctctgggtaatgtgcaggaggaccgttgggactggcacatgtacgataccgtgaaaggttccgactggctgggcgaccaagatgcgattgagtttatgtgtcgcgctgcgcctgaagcggtgattgagttggaacacatgggtatgccttttgaccgcgttgaaagcggcaaaatttatcagcgtcctttcggcggacatactgccgaacatggtaaacgtgcggtagaacgtgcatgtgcggttgccgaccgtaccggtcatgcgatgttgcatactttgtaccaacaaaacgtccgtgccaatacacaattctttgtggaatggacggcgcaagatttgattcgtgatgaaaacggcgatgtcgtcggcgtaaccgccatggaaatggaaacgggcgaagtttatattttccacgccaaggccgtgatgtttgctaccggtggcggcggtcgtatttatgcttcttctaccaatgcttatatgaataccggtgacggtttgggcatttgcgcccgtgcgggcattccgttggaagatatggaattctggcaattccacccgaccggcgtggcgggtgcgggcgtgttgattaccgaaggcgtacgcggcgagggcggtattctgttgaacgccgacggcgaacgctttatggaacgctatgcgccgaccgtaaaagacttggcttctcgcgacgtggtttcacgcgcgatggcgatggaaatctatgaaggtcgcggctgtggtaaaaacaaagaccacgtcttactgaaaatcgaccatatcggtgcagaaaaaattatggaaaaactgccgggcatccgcgagatttccattcagtttgccggtatcgatccgattaaagacccgattccggttgtgccgactacccactatatgatgggcggcattccgaccaattatcacggtgaagttgttgttccgcaaggcgacgagtacgaagtacctgtaaaaggcctgtatgccgcaggtgagtgcgcctgtgcttccgtacacggtgcgaaccgtttgggtacgaactccctgctggacttggtggtgttcggcaaagctgccggtgacagcatgattaaattcatcaaagagcaaagcgattggaaacctctgcctgctaatgccggtgagttgacccgccaacgtatcgagcgtttggacagtcaaaccgatggtgaaaacgttgatgcattgcgtcgcgaactgcaacgctccgtacaactgcacgccggcgtgttccgtaccgatgagattctgagcaaaggcgttcaagaaatcatggcgattgccgagcgtgtgaaacgtaccgaaatcaaagacaagagcaaagtgtggaataccgcgcgtatcgaagctttggaattggataacctgattgaagtggcgaaagcgactttggtgtctgccgaagcacgtaaagaatcacgcggtgcgcacgcttcagacgaccatcctgagcgcgatgacgaaaattggatgaaacacaccctgtatcattcggacaccaataccttgtcttacaaaccggtacacaccaagcctttgagcgtggaatacatcaaaccggccaaacgcgtttat

SEQ ID NO: 29130 - DNA, 831 bp, Neisseria gonorrhoeae
atgaaaaaaaccgcctacgccatcctcctgctgatcgggttcgcttccgcccctgcatttgcagaaacccgccccgccgacccttatgaaggctacaaccgcgccgtttccaaattcaacgaccaagccgaccgctacattttcgcccctgccgcgcgcggctaccgcaaagttacgccgaaacccgtccgcgccggcgtgtccaatttttttaacaacctgcgcgacgtggtcagtttcggcagcaatatcttgcgtttggacatcaaacgcgcaagcgaagacctcgtccgcgtcggcatcaataccaccttcggtttgggcgggctcattgatattgccggcgcgggcggcgttcccgacaataaaaacactttgggcgacacgtttgcctcgtggggctggaaaaacagcaattatttcgtgttgcccgtcttaggcccgtccaccgtccgcgacgcgctcggcacgggcattacctctgtttatccgcccaagaatatcgttttccatacccctgccggacgctggggcacgactgccgctgccgccgtcagtacgcgcgaaggcctgctcgatttgaccgacagtctggacgaagccgccatcgacaaatacagctacacgcgcgacctctatatgaaagtccgcgcacggcagaccggtgcaacacctgccgaaggtacggaagataacatcgacatcgacatcgacgaattggtcgaaagtgccgaaaccggcgcggcagagcccgccgttcacgaagattccgtatccgaaacacaggcagaagcagcaggggaagccgaaacgcaacctggaacacaaccc

SEQ ID NO: 29131 - DNA, 381 bp, Neisseria gonorrhoeae
atggaaccttcctcctacgcggcagaaaaaaaaggcaaaagcggcatcaggcgcgtcatcaacgcattcggctattcgatagacggcatcgccgccgcctaccgttacgaagtggcattccgtcaggttttgtggctgaacgcgctgctggtgtgcgcggcatttttttgggtttccgaaaccgccgtccgcctgccgttgattatcgcgtcttttgtgtcggtcattgtcgaactgttcaacaccgccgtcgaagccgccgtcgatcatacttcgaccgaaaaacacgagctggccaaacgcgccaaagatgcaggttctgccgcacaactggttgccatgctgatgttggcggcggtttggctgtccgccctgttcggg

SEQ ID NO: 29132 - DNA, 381 bp, Neisseria gonorrhoeae
atgaagctgaccgtccgcaattaccatctcgacggctacggtcatgtcaacaatgcacgctacctcgaatttctcgaggaagcgcgctgggcgttttttgaaaaacgcggactgatgcacgagttggcaggcctcatactgattgtcgcccgcatcgacatccgatacagccgtcccgccgtcgaaggcgacgtattgcagttttcatgccgcctgaaaacccccggcatgcgccgcattgtgctgacccagacgattacactgccaaacggcaaaaccgccgcagaagccgacatcaccctgatgcccgtccacgccgccacacaacgcaccgtcagcctgcccgccacccttgcccgcgcactggaagccttgtccgaa

SEQ ID NO: 29133 - DNA, 1686 bp, Neisseria gonorrhoeae
atgctcaataaagaccaattcgcggacaaccatttcatccgcaccatcatcgaagacgacctcaaaagcggcaaacacgaagccgtccaaacccgttttccgcccgaacccaacggctatttacatatcggacacgccaaatccatctgcctgaacttcggtttggcgtatatttacgacggtttgtgcaacctgcgtttcgacgacaccaaccccgaaaaagaaaacgacgaatacgtcaacgccatcaaagaagatgtcgagtggctcggtttccattgggcgggcgagccgcgtttcgcttccgactatttcgaccggctttatgactacgccgtcggtttaatcaaagacggcaaagcgtatgtcgatgatttgacgcccgaagaaatgcgagaataccgcggtacgctgaccgaagcgggtaaaaacagcccttaccgcgaccgcagtatcgaagaaaacctcgacctgttcacgcgtatgaaaaacggcgagttccccgacggcagcaaaaccctgcgcctgaaaatcgacatggcggcaggcaacatcaatatgcgcgatcccgtcatctaccgcatccgccgcgcccatcaccataacaccggcgacaaatggtgcatctacccgatgtacgattacacgcattgcatttccgatgccatcgaaggcatcacgcattccttgtgcacgctcgaatttgaagcgcaccgtccgctttacgactgggtgttggacaacatccccgcgctgcacgccacccgtccgcgccaatacgagttttcccgtttggagcttttgtacaccattacctccaaacggaaattgaatcagttggttgtggaaaaacacgtttccggctgggatgatccgcgtatgccgaccatttccggtatgcgccgccgcggctacacgcccgaaggggtgcgcctgtttgccaaacgcgccggtatttccaaatctgaaaacatcgtcgacatgagcgtgttggagggtgcgattcgcgaagagctggaaaactccgccccgcgcctgatggcggttttgaacccgctcaaagtgaccctgaccaactttcaagccggcaaaacccaaagccgccgtgccgcgttccatccgaaccacgaagaaatgggcgatcgcgaagtacctgtttcacaaaccatctacatcgaagccgacgactttgccgaaaatccgcccaaaggcttcaagcgtctgattcccggcggcgaagtacgcttgcgccacggctatgtcatcaagtgcggtgaagtcgtcaaagacgaagcaggcaatgtggttgaactcaaatgcagcatcgaccacgacaccttgggcaaaaatccagaaggccgcaaagttaaaggcgtgattcactgggtttccgccgaacacgccgccgaaatcaaagtccgtctgtacgaccgcctctttaccgtcgagcgtcccggtgccgtgcgcggcgaagacggcgaatacctgccgtttaccgatttcctcaatccggaatccgttaaggaaatcactgcttacgccgaacctgccgcgaaagatttgccggcggaaagccgttggcagttcgagcgtatcggctattttgtgaccgaccgccaagaccacggcaaagacacgccggtgtttaaccgcacggtgacgttgaaagattcttggcagcctaag

SEQ ID NO: 29134 - DNA, 516 bp, Neisseria gonorrhoeae
ttgatggaatcaaaattctttttcctgctgctgcgttttgccggttcggtgttgccgccgtcatatatgcgcggcatcggcatcgtcggcagacgggtgcgcggttttttggcgcggcgggtttctccgcatatcggacgcggggtcaatatcgaacgcggggcgtatgtgtttccggatacggttttgggcgacggctcgggcatcggggcaaactgtgaaatctgccgtgggctggtggtcggcaaaaatgtgatgatggggccggaatgcctgctctattcgaccaaccacaagtttgaccgtgaaaacaaacgctttgagggctacacggaaatccgtccgattacgttggaggacgatgtctggccggggcgcagggtgattgtgatggcgggcgtaaccgtcggacgcggctcggtcgtgggcgcaggcgcggtggttacaaaagacattccgccctactctttggcggcaggcaatcctgcggtggtgaaaaagaatctgccggaaggt

SEQ ID NO: 29135 - DNA, 900 bp, Neisseria gonorrhoeae
atgagcagcctgatgacgttgttttcggtattggtaccgatgtttgccggattttttatccgtgttcccaagccttacctgcccgcttcggacaaggtgctgtcggttttggtgtatgccgtgctgctgctgatcggcgtatcgttgtcgcgcgtggaggatttgggttcgcggttgggcgatatggcgttgacggttctgtggctgtttgtttgtacggtaggggcgaacctgcttgccttggcagtgttgggaaagttgtccccgtggcggatagggggaaaagggaagggcgtttcggtcggcgtgtcgggcagtgtgaggcagctcggatgcgtactgctcggttttgtgtccggcaaattgatgtgcgatatttggatgccgtctgaaaacgcgggtatgtactgcctgatgctgctggtgttcctcatcggcgtacagctcaaaagtagcggcgtatcgttgcggcaggttttgcttaaccggcggggcatccggctgtcggtttggtttatattgtcatctctttcaggcgggctgctgtttgccgcatcggcagatggtgtgtcgtggacgaaaggtttggcgatggcttccggcttcggttggtattccctctcgggtttggtaatgaccgaggcttacggggcggtatggggcagcatcatgctgctgaacgatttggcacgagagctgtttgcactggcatttattccgctgctgatgaagcgttttccggatgcggcggtgggggtcggcggcgcgaccagtatggatttcacattgcccgtaattcagggtgcgggcggtttggaagtcgtgccggtagcggtcagcttcggcgtggtggtcaatatcgccgccccgtttctgatggtggtgttttccacgctgggc

SEQ ID NO: 29136 - DNA, 645 bp, Neisseria gonorrhoeae
atgggatgttttatgattcaaaatgttgttacttcaataatcctgtattctgggacagccgtagacttacttacttatcctaatgttattttttgccaaaaaaaaagcagaaaagacatcattaacatctatttaggacaatttctaggctctgttagcctgatattgctaagtttgctttttgcatttgtcttagattatattcctagtaaagagattttaggtttgctcggcttgattccgattttcctaggcctcaaagttttgctgttaggagattccgatggagagtctattgccaaagagggtttgcgcaaagataataaaaacctgatttttctagtcgctatgattacttttgcaagttgtggcgctgacaatattggtgtctttgtcccatattttactaccttaaatttagcgaatttgatagtggctttacttacctttctagttatgatttatctcttggttttttctgcccaaaaattggcacaagtcccttctgtcggagaaactttggaaaaatatagcagatggtttgttgccgttgtttatttaggattggggatatatatcctgattgaaaacaacagttttgatatgctatggactgtgtcgggccaggaaaaaatattatgaaaa

SEQ ID NO: 29137 - DNA, 876 bp, Neisseria gonorrhoeae
atgaattatgcaaaagaaatcaatgcgttaaacaacagcctttccgatttgaaaggcaacatcaacgtttcgtttgaatttttcccgccgaaaaacgaacaaatggaaacgatgctgtgggattccatccaccgtctgcaaaccctgcatcccaagttcgtatccgtaacttacggcgcaaactccggcgaacgcgaccgcacgcacggcatcgtcaaacgcatcaaacaggaaaccggtttggaagcagcttcgcacctgaccggcatcgatgcatcccacgacgaattgcgccaaatcgccaaagactattgggacagcggtatccgccgcatcgttgccctgcgtggcgacgagccggccggttatgagaaaaaaccgttttacgccgaagacttggttaagctattacgctccgtcgccgacttcgacatctctgtagcagcataccccgaagtacatcccgaagcgaaatccgcacaagccgacctgattaatctgaagcgcaaaatcgatgcgggcgcgaaccacgtcatcacccaattcttcttcgatgtggaacgctacctgcgcttccgcgaccgctgcgtgatgttgggcatcgacgtcgaaatcgttcccggcatcctgcctgttaccaacttcaagcaactcggcaaaatggctcaagtaaccaacgtcaaaatcccgaaatggctgtcgcaaatgtatgaaggcttggacgacgaccaaggcacgcgcaacctcgtcgccgccagtatcgccatcgatatggttaaagtcctgtcccgcgaaggcgtgaaagatttccacttctacacgctcaaccgcagcgagctgacttacgccatctgccatattttaggcgcgcgccct

SEQ ID NO: 29138 - DNA, 165 bp, Neisseria gonorrhoeae
atggtttggacagacggcaaagaatatctgctcttttccttagatacttcctcttcctcacatcccgtctataccggcaaacagcgtaacgtcaataccgaaggccgtgccagcaagttcaaccaacgtttccaatccgtcatgtcatcgtttagaaaggacaaa

SEQ ID NO: 29139 - DNA, 123 bp, Neisseria gonorrhoeae
atgcaggttctgtcttcgctcaaaaccgccaaacaacgccaccgcgactgccaaatcgtcagacgcaggggcaaagtgtacgtcatctgcaaaagcaatccgcgttttaaatcgcgccaacgc

SEQ ID NO: 29140 - DNA, 603 bp, Neisseria gonorrhoeae
atgatgaccctctattccggcattacctgccccttcagccaccgctgccgcttcgttttgtacgaaaaaggtatggattttgaaatcaaagatatcgatatttacaacaaacccgaagacctcgccgtcatgaacccgtacaaccaagtccccgtgctggtcgagcgcgatttggtgctgcacgagtccaacatcatcaacgaatacatcgacgaacgcttcccccatccgcagcttatgcccggcgatcccgttatgcgcggccgggggcggctggtgctgtaccgtatggaaaaagaattgttcaaccacgtccaagttttggaaaaccccgccgccgccaacaaggaacaggcaaaagcgcgcgaagccatcggcaacggcctgacgatgctttccccttcgttcagcaaaagcaaatacatcctcggcgaagatttttctatgattgatgttgccctggccccgctgttgtggcggctcgaccattacgatgtcaaactgggcaaaagtgccgcgccgctgctcaaatacgccgagcgtatcttccagcgcgaagcctttatcgaagcactgacacccgccgaaaaagccatgcgcaaa

SEQ ID NO: 29141 - DNA, 540 bp, Neisseria gonorrhoeae
atgaagacacaccgcaagacctgctctgcggtgtgttttgcttttcagacggcatcgaaacccgccgtttccatccgacatcccagcgaggacatcatgagcctgaaaacccgccttaccgaagatatgaaaaccgcgatgcgcgccaaagatcaagtttccctcggcaccatccgcctcatcaatgccgccgtcaaacagtttgaagtagacgaacgcaccgaagccgacgatgccaaaatcaccgccatcctgaccaaaatggtcaaacagcgcaaagacggcgcgaaaatctacactgaagccggccgtcaggatttggcagacaaagaaaacgccgaaatcgacgtgctgcaccgctacctgccgcaaatgctctccgccggcgaaatccgcaccgccgtcgaagcagccgttgccgaaaccggcgcggcaggtatggcggatatgggcaaagtgatggtcgtattgaaaacccgcctcgccggcaaagccgatatgggcgaagtcaacaaaatcttgaaaaccgtactgaccgcc

SEQ ID NO: 29142 - DNA, 438 bp, Neisseria gonorrhoeae
atgccgaaagttaccttttatacccatgttgaccaaatccccctttttacctgtcggttgattgcgcgcgctatccgagacggcggcaggatactggtgtggtccgactcgttcggacggcttcaggaattggacaaaatgctttggcaatacgaggccgagagttttattccgcacgaaatttgggaaacggaagaagccatgccgtctgacacatccgtcctgcttgcctgcgacggcaatctgccccgaattcccgaaggcatggccgttttgaacctgtccgacggtttttggaacaccgcttcggtcttgcccgcgcgcgttttggaaatcgtcggcaacagcctggaagatctcgccgacgcgcgcgaacgctttaccgcctaccgccgaagcggttttgccatcgaacatcacggcatggagggcaaggca

SEQ ID NO: 29143 - DNA, 1404 bp, Neisseria gonorrhoeae
gtggaatttagcacaaaaaccgaaatcttgcaggaacagcaggcaggcgcgcagttatttgtctgtgccgacaaagcacccgagcacaacaccgccgcacatgcgctcttctctgctttggaagagggtcagaatttttccgacaccaaaatcccgacggacaacggtttgcaggcagtcgccgtcgtccgcctcgaaaaaaccgaccgcgccgcgctgaacaaagccgccgccgaagccgccaaatgggcgcaaaatcaagaaacggtcaatgtggacgttcacgcctttgatgaggcgcaagcagcagccgttgccgaagcttttgccatcgcgttcggcaacgctgcatatcgtttcgaccgctacaaaaaagaagccaagcccgccaaattttcgcaagccgtgttccacagcgcacacgaagccgccgtcaaagaagccctgcgcgttgccgaagcacaagtttacggacaaagcctctgccgcgacttaggcaatgccgcaccgaacgaatgcacgcctgagttcctcgcgcgtaccgccaaagccgaagccgagaaactgggcgcgcacgccaaaatcatcgaaaaagactacatcaaagaaaacatgggttcgttttggtcggttgccaaaggcagcgtcgaagacccatatttggttgaactgagctatttcggtgcggccgacaaagaagccgcgcctgtggtattggtcggcaaaggcattaccttcgacaccggcggcatttccctcaaacccggcctgaacatggacgaaatgaagtttgacatgtgcggcgcggcaaccgtcatcagcaccttctgcgccgccgtcaaactgcaactgccgatcaatctgattgccatcgtcgccacttgtgaaaacatgccttccggcgcggcaaacaaaccgggcgatgttgtgaaaagtatgaaagggctgacgattgaagtgttgaacaccgatgccgaaggccgtctgattttgtgcgacgcgctcacttacgccgagcagttcaaacccaaagccgtcatcgatgtcgccaccctgaccggcgcgtgcatcgtcgccttggggcacgatgtcagcggcgtgatgggcaataatcaggatttgatcgacagcctgcttgccgcttcctacaacgtggacgacaaagcgtggcaactgccgctctttgaaacctacaaagaccagctcaaatccaactttgccgacatccccaatatcggcacgcccggcgcgggcacgattaccgccgcaacattcctgtcctatttcaccgaaggctacccgtgggcgcaccttgacatcgcgggtacggcgtggaaatccggagcggaaaaaggtgcgaccggccgccccgtaccgctgctgatgaactatctgcggaatctt

SEQ ID NO: 29144 - DNA, 684 bp, Neisseria gonorrhoeae
atggcagacttaacattcgaacaagccgtttccaccatcgtcggcatgaaagacgaaatcgtccgcgccttgggcgaaactttcgtgatggtcggcttgtccaccacattcgccgtcatcttcggcacgctcttgggcgtgttgctcttcgtaacttccagccgccaactgcattacaacaagccggtgaacttcctgctcgacaacctcgtcaacctcatgcgcgccttccccttcgtcatcctgatgattgcgatgatacccgccacacgcgccatcgtcggcagcaccatcggcccggttgccgcctcgctggtgttgagcgtgtcgggattgttttattttgcccgactggtggaacaaaacctgcgcgaagtcccaaaaggtgtgattgaagccgccgccgcgatgggtgcgccgccgattgccatcgtcctcaaagtcctcttgaacgaagcgcgcgcgggcatggtttccagcattaccgtgcttgccatcgggcttttgtcatacagcgcggcggcaggcatgataggcggcggcggcttgggcgacctcgccatccgctacggctactaccgctaccaaaccgaagtcatcgtcttcatcgtcgccctcctcgtgctgctggtcatcctgattcaaagcaccggcaacgcgttggcgcggaaactcgacaaacgt

SEQ ID NO: 29145 - DNA, 864 bp, Neisseria gonorrhoeae
atgaaaaccttcttcaaaaccctttccgccgccgcactcgcgctcatcctcgcagcctgcggcggtcaaaaagacagcgcgcccgcagcctctgccgccgccccttctgccgataacggcgcggcgaaaaaagaaatcgtcttcggcacgaccgtcggcgacttcggcgatatggtcaaagaacaaatccaagccgagctggagaaaaaaggctacaccgtcaaattggtcgaatttaccgactatgtgcgcccgaatctggcattggcggagggcgagttggacatcaacgtcttccaacacaaaccctatcttgacgatttcaaaaaagaacacaacctggacatcaccgaagccttccaagtgccgaccgcgcctttgggactgtatccgggcaaactgaaatcgctggaagaagtcaaagacggcagcaccgtatccgcgcccaacgacccgtccaacttcgcacgcgccttggtgatgctgaacgaactgggttggatcaaactcaaagacggcatcaatccgctgaccgcatccaaagccgacatcgcggaaaacctgaaaaacatcaaaatcgtcgagcttgaagccgcacaactgccgcgcagccgcgccgacgtggattttgccgtcgtcaacggcaactacgccataagcagcggcatgaagctgaccgaagccctgttccaagagccgagctttgcctatgtcaactggtctgccgtcaaaaccgccgacaaagacagccaatggcttaaagacgtaaccgaggcctataactccgacgcgttcaaagcctacgcgcacaaacgcttcgagggctacaaataccctgccgcatggaatgaaggcgcagccaaa

SEQ ID NO: 29146 - DNA, 2583 bp, Neisseria gonorrhoeae
atgttagaagcctatcgtaaagccgccgccgagcgcgccgccctcggcattcccgccctccctttgaatgcgcagcaaaccgccgatttggttgagctgctgaaaaacccgcccgcaggcgaaggcgagttcttggtcgagctgcttgcccaccgtgttccgcccggtgtggacgatgccgccaaagtcaaagcctcattcctggctgccgttgccgaaggcagcgcatccagcccgctggtttcccccaaatatgcgaccgaactcttaggtacgatgctcggcggttacaatatccacgccttaatcgaactcttggacgacgacaaactcgcgcccattgccgccaaaggcttgaaacatacgcttctgatgttcgattccttccacgacgttcaggaaaaagccgaaaaaggcaacaaatacgcgcaggaagttttgcaatcttgggcagatgccgaatggttcgcctcccgtgccaaagttcccgaaaaaatcaccgttaccgtcttcaaagttgacggcgaaaccaatacagacgacctctctcccgcgcccgacgcgtggagtcgtcccgatattccgctgcacgcgctggccatgctgaaaaacccgcgcgacggcatcacgcccgacaaaccgggcgaagtcggtccgattaaattgttggaagaactcaaagccaaaggccatccggttgcctacgtcggtgacgtggtcggtaccggttcttcacgcaaatccgcgaccaactccgtcatttggcataccggcgaagacatcccgttcgtgccgaacaaacgcttcggcggcgtgtgcttgggcggtaaaatcgcgccgattttcttcaacactcaagaagactccggcgcgctgccgattgaagtcgatgtttccgcgctgaaaatgggcgatgtcgtcaatatccttccttatgaaggtaaaatcgtgaaaaacggcgagactgttgccgagtttgaattgaaatcacaagtattgctggacgaagtgcaagccggcggccgtatcaacctgattatcggtcgcggtctgaccgccaaagcgcgcgaagccctgaaactgcctgcctctactgcattccgcctgccgcaagcgcctgccgaaagcaaagtcggttttaccttggcgcaaaaaatggtcggtcgcgcctgcggtctgcccgaaggacaaggcgtgcgtccgggtacttactgcgaaccgcgcatgacgacggtcggctcgcaagatacgaccgggccgatgacccgcgacgagttgaaagacttggcttgtttgggcttctccgccgatatggtgatgcagtctttctgccacaccgctgcctatccgaaacctgtcgatgtaaaaacccataaagaactgcccgcctttatttctacccgtggcggcgtgtccctgcgtccgggcgacggcgtcatccactcatggctcaaccgcctgctgttgcctgatacagtcggtacaggcggcgacagccacacccgtttccccatcggtatttccttccccgcaggttcaggcttggtcgcttttgccgccgcaacgggcgtaataccgctcgatatgcccgagtccgtattggtacgtttcagcggcaagctgcaaccgggcgtaaccctgcgcgatttggtgaacgccatcccgctttacgcgattaaacaaggtttgctgaccgttgccaaagccggtaagaaaaacatcttctccggccgcatcctcgaaatcgaaggcctgcccgatttgaaagtggaacaagcctttgaattgaccgacgcatccgccgaacgctccgccgccggctgtaccgtgaagctcaataaagagccgattatcgagtacatgaaatccaacgtcgtgttgatgaaaaatatgattgccaacggctatcaagatccgcgcgctttggaacgccgcatcaaagctatggaaaaatggctggcaaatcccgagttgctcgaagcggataaagatgccgaatacgccgccgtgattgaaatcaacatggacgacatcaaagagccgattatcgcctgcccgaacgacccggacgacgtatgctttatgtccgaacgctccggcaccaaaatcgacgaagtgttcatcggttcttgtatgaccaacatcggccacttccgcgccgcctccaaacttttggaaggcaagagcgacatccccgtccgcctgtgggtagcgccgccgaccaaaatggacgcgaaagagttgtccgacgaaggtcactacggcgtactcggccgcgccggcgcgcgtatggaaatgccgggctgttcgttgtgtatgggtaaccaagcccaagtacgcgaaggtgcaactgtcatgtccacttcgacccgcaacttcccgaaccgcttgggtaaaaacaccttcgtttacctcggctcggcagagttggcggcgatttgctccaaactgggtaaaatcccgaccgttgaagaatatcaagccaatatcggcatcatcaacgaacagggcgataaaatctaccgctatatgaacttcaacgaaatcgacagctacaacgaagtagccgagaccgtgaatgtt

SEQ ID NO: 29147 - DNA, 864 bp, Neisseria gonorrhoeae
atggcaggtgaaaccattaccgctgccgactacatcaagcaccacttgcagagcttgaccagtttgtcggatgttactcagggtcagggactgaaaaacattgctgatttttcgtttattaaccttgatgccgttttttttgccgtcctgttgggcgtaatcggcagcttcctgttgtggcgcggtgcaaaaaaagcaacggcaggcgttcccggacgtttccaggccgccgtggaaatcttgttcgagtttgtggacgatatgtgtaagagcatcattcacagcgaaaagtctaaaaaagccgtcgcgccgttgggtctgacgctgtttgtttggattttcctgatgaacgcgatggatatgctgccggtcgatttgctgccgatggtatggcagggcattaccggcaaccatcacgccctgctgcgcatcgtaccgactgccgatttgaacaccgctttggcactcgctgtcggcgtgttgctgatttgtatctattacaacatcaaaatcaaaggattgggcggctggtttcacgagttgttcagtgcgccgttcggtgcaaaactcgcacctgcgaactttctgttgaacttggtcgagtttctttctaaaaccgtatcccacggtatgcggttgttcggcaatatgtatgcgggcgagctggtattcctgctgatagccttgcttgtcggtgcttgggcggcttccggcagcgttgaagtcatggatccgattctgtttgtattccacattattgccggtttggcatgggcgattttccatattttggtgattaccctgcaggcatttattttcatggcgttggcgttcgtctatatcgggcaggcgcacgatgcccac

SEQ ID NO: 29148 - DNA, 1011 bp, Neisseria gonorrhoeae
atgcaagtctattacgataaagatgccgatctgtccctgatcaaaggcaaaaccgttgccatcatcggttacggttcgcaaggtcatgcccatgctgccaacctgaaagattcgggtgtaaacgtggtgatcggtctgcgccacggctcttcttggaaaaaagccgaagcagccggccatgttgttaaaaccgttgctgaagcgaccaaagaagccgatgtcgttatgctgctgctgcctgacgaaaccatgcctgccgtctatcacgccgaagttgcagccaatttgaaagaaggcgcgacgctggcatttgcacacggcttcaacgtgcactacaaccaaatcgttccgcgtgccgacttggacgtgattatggttgcccccaaaggtccgggtcataccgtacgcagtgaatacaaacgcggcggcggcgtgccttctctgattgccgtttaccaagacaattccggcaaggccaaagacatcgccctgtcttatgcggctgccaacggcggcaccaaaggcggtgtgattgaaaccactttccgcgaagaaaccgaaaccgatctgttcggcgaacaagccgtattgtgcggtggcgtggccgagttgatcaaagcaggttttgaaaccctgaccgaagccggttacgcgcctgaaatggcttacttcgaatgcctgcacgaaatgaaactgatcgttgacctgattttcgaaggcggtattgccaatatgaactactccatttccaacaatgcggagtacggcgaatacgttaccggccctgaagtggtcaatgcttccagcaaagaagccatgcgcaatgccctgaaacgcatccaaaccggcgaatacgcaaaaatgtttatccaagagggtaatgtcaactacgcgtctatgactgcccgccgccgtttgaatgccgaccaccaagttgaaaaagtcggcgcacgactgcgtgccatgatgccttggattacggccaacaaattggttgaccaagacaaaaac

SEQ ID NO: 29149 - DNA, 1545 bp, Neisseria gonorrhoeae
atgcagcttaatcctgctgaaattagcgatctgattaaagccaagatcgaaaatctgtctgtaaatgccgaagtgagtacccgtggtacggtgatttcggtaactgacggtatcgttcgcatccatggtttgtcagatgcaatgcaaggtgagatgctcgaattcccgggtaacactttaggcttggcgatgaacctggagcgcgactccgtcggtgccgtagtgttgggcgagtacgaacatattaaagaaggcgacacggttacctgtaccggccgtattttagaagtgccggtcggacgcgaattggtcggacgcgtcgtcgatgcattgggtcggcctatcgacggcaaaggtccgattaatacaactttgaccgcccctgtcgaaaaaatcgcaccgggcgtgattgcacgcaaatcggttgatcagccgatgcaaaccggtctgaaggcgattgactctatgattcctgtcggtcgcggtcagcgtgagttgattattggagaccgtcagacaggtaaaacggccgtagcattggatgccatcgtcaaccaaaaaggtacgggtgttatctgtatctatgtcgctatcggtcaaaaagcatcttctattgccaacgtggtccgcaaattggaagagcatggcgcgatggaacacacgattgtggttgctgcaactgcatctgaagcggcggcattgcaatatatcgcaccttattcaggttgtacgatgggtgaattcttccgcgatcgtggcgaagatgccttgattgtttatgacgatttgtccaaacaggctgtggcttaccgtcaaatttccctgcttttgcgccgtccgcccggccgcgaagcctatcccggcgatgtgttctacctgcactcccgtctgttggaacgtgcggcacgtgtcaatgaacacgaagtggaaaaattgaccaacggcgaagtaaaaggcaaaaccggttctctgaccgcgttgccgattatcgaaacccaagcgggcgacgtatctgctttcgttccgactaacgtcatttcgattaccgacggtcagattttcttggaaaccgacctcttcaacgccggtatccgtcctgcaatcaatgccggtatttccgtatcccgcgtaggcggtgctgcacaaaccaaagtgattaaaaagctgggtggcggtatccgtttggcgttggcacaatatcgtgaattggcggcgttctcgcaatttgcatccgatttggatgaagctacgcgcaaacagttggagcatggcgaagtcgtaaccgaactgatgaaacagaaacagttcagtacgttgaatacggctgaaatggctttgaccctttgggcaatcaacaacggttcgtattctgatgttccggttgccaaagctctagcttttgaatctgaatttttgagctttgtccgtacccaacatccggaagttttggaagccgtcaatgcttcaggtgcaatgtccgacgagagcgagaaaacgcttgaagcagccatgaaatccttcaaatcttcttacgcctatcaggca

SEQ ID NO: 29150 - DNA, 489 bp, Neisseria gonorrhoeae
atgcgacatatcttatctgttctgatcgaaaacgaatcaggtgcgatgagccgcgtggtcggtttgttctctgcacgcgattacaatatcgattctttggcggttgcgccgaccgaagacaaaaccctgtcacggatgaccatcgttacccacggcgacgagcaggttatcgaacaaatcaccaagcaactcaataaattgattgaagtgattaaagtggtcgatttgaacgaaagccgttttgtcgaacgcgaactgatgttggtaaaagtccgtgccgccggcaaagaccgcgacgaatttttacgcttgaccgaaatctaccggggcagcatcatcgacgtaaccgaccgcagctatacgattgaaattaccggctcgaccgacaagctggattcctttttggaaacggtcggacgcgcccaaattttggaaaccgtacgtacaggtgcggccggcatcggtcgcggtgagcgtattttgaaaatt

SEQ ID NO: 29151 - DNA, 1725 bp, Neisseria gonorrhoeae
atgcagttatcaggcgcgcaaatcatagtgcagagtctcaaagccgaaggcgtcgagtacgttttcggttatcccggcggtgcggttatcgaaatctacgatgccctgttccaactcaataaattcaaacacattcttacccgccatgagcaggcggcagtacacgcggcagatgcgtatgcgcgcgtcagcggtaaggtgggcgtggcattggttacatccggcccgggcgttaccaatgcgctgaccggtattgctactgcctatacggattcgattccgatggtggtcatcagcggacaggtaggcaattccctgattggtacggatgcgttccaagaagttgatacggtgggtattacccgtccgtgcgtcaaacacaatttcttggttacggacatcaatgagttggtggaaaccattaaaaaggcgttccaaattgccgcaagcggccgaccggggcccgtggtgcttgatgtcccgaaagatgttacgcaggcgatggcgaaattcagctatcctcaggaagacatttttatccgttcgtatcaaccggttgttcaagggcatatcggtcagattaaaaaggccgtgcagatgttggcatctgccaaacgcccggtcgtctattttggcggcggcgtggtgttgggtaatgcttctgaagagctgacccgatttgtccgaatgacgggtgctccgtgcacgggtacgctgatgggcttgggcgcttatccttccggcgaccgccaattcctcggtatgctcggtatgcacggtacttacgaggcaaaccttgccatgcagaatgcggatgtcgttcttgccgtaggtgcgcgttttgacgaccgtgtggtttccgtaccgtccaaatttttcgagaaggcgaagaaggttatccatatcgatgtcgatccttccagcatcgccaaacgcgtgaaggcggacattccgattgtcggcgacgtgaaaaacattttgtccgagatggttgcgctgtggcaaaaacaagagtccgtgccgtctgaagatgctttgggcaaatggtggaaaaccatagaggaatggcgttcccgcgattgcttgtggtttgacaacggcagcgaaattatcaagccccaatatgtgattcagaagcttgccgagattaccggcaattcggcaatcatcacatcggatgtagggcagcatcaaatgtttgcggctcaatattatcctttcgaacgtccgcgccaatggctcaactccggcggtttgggtacgatgggcgtgggtctgccttatgcgattggtgcaaaacttgccgccccggatcaagacgtattctgtattaccggcgacggctcgatccagatgaacatccaagagttgtccacctgtttccaatatcggattccggttaacgtcattacgctgaacaacggttatctgggtatggtacgccagtggcaggaaatatattacggcggtcgagagtcggaaacctatttcgattctttgcccgatttcgtcaaacttgccgaggcatacggccatatcggcatccgcgtggacaataaatctgatgtggaaggtgccttgttggaagcattgaaccaaaaagacaggctggtgtttatcgacttcctgaccgaccagaaacagaatgtgatgcctatggtcggcaacggcaaaggtttggacgaaatggtacttccgccgcatatgcgtacggacggaaaggcg

SEQ ID NO: 29152 - DNA, 894 bp, Neisseria gonorrhoeae
atgcttaccttccaacaaatcatcttcaaactgcaaaccttctgggcagacaaaggctgcaccgtcatccaacccttcgacatggaagtcggtgccggcacatcccatcccgccacctgcctgcgcgcgctcggccccgagccttggtttgccgcctacgtccaacccagccgccgccccaaagacggccgctacggcgacaaccccaaccgcctgcaacactattaccaattccaagtcgccctcaaacccgcccccgccaatatccaagacctctatctcgactccctgcgcgaattgggcatcgatcccaaagtccacgacatccgctttgtcgaagacgactgggaaaaccccaccctcggtgcgtggggtttgggctgggaagtctggctcaacggcatggaagtaacccagtttacctatttccaacaagtcggcggtatcgattgcacgcccgtactcggcgaaattacctacggcatcgaacgcttggcgatgtacctgcaaggcgtggaaaacgtctatgacctcgtttgggcaaaaacgccggacggcaataccgtaagctacggcgacgtgtaccatcaaaacgaagtcgagcaatctacctacaacttcgaatacagcgatgccgactggctgctgcgccagttcaacgactacgaagcgcaagccaaacgcctgttcgccgaagaaaacgccggccttgccttacctgcctacgagctggtcctcaaagcggggcatacgttcaaccttttagacgcacgcggcgcgatttccgtaaccgagcgggcaacttatattggacgtattcgtgcattgagccgcgccgtggcgcaaaaatatatcgaaagccgtgagaaactgggcttcccgttgattaaaaaa

SEQ ID NO: 29153 - DNA, 663 bp, Neisseria gonorrhoeae
atgcaggataatgctttgaccatcgccttatccaaagggcgcatttttgaggagacgctgccgctgcttgccgctgccggcattgctccgactgaagagcccgaaaaatcgcgcaagctgattatcgggacgaaccatgaaaacatccgccttgtcattgtccgcgcaaccgatgtgccgacttatgtccgctacggcgcggcggacttcggcattgcgggcaaagacgtgctgatcgaacacggcggcacggggctttaccggcctttggatttggagattgccaagtgccgcatgatggttgctgtgcgtaaagggtttgattacgaagccgcttcgcaacccggatgccgtctgaagattgccacgaagtatcctgaaatcgcggcatctcattttgccggcaagggtgtccatgtggacattatcaaactgtacggctcgatggaacttgcgccgctggtcggcttgagcgatgcgattgtggacttggtttcgacgggaaacaccttgaaggcaaacggcttggaggcagtcgaacacatcgtcgacatttccagctacctggtggtcaacaaggctgctttgaaaacgaaatacgcgctgctggagccgattattcagtcgttcggcggcgcagtgaaggcgaagtgggcattcatt

SEQ ID NO: 29154 - DNA, 2061 bp, Neisseria gonorrhoeae
atgacaacccaaacccttttaatcgaactccttaccgaagaactcccgccaaaagccctgaataatctgggcaaccattttgccgcttccgttgccgaaggcttggaaaaagcgcaactggttgacggcgcggccgaatttacggcttatgcctcgccgcgccgtttggcggttcaagtcaaaaacgtgaaggccgttcaagccgatcagaaaatcgtgaaaaaaggccctgccgtggcgaatgccgtaaaagacggtacgccgaccaaggctttggaaggttttgcgcgcggggcgggggcgaaaatcgaagacctgaccatcgtccacgacggcaggcaggacgtgtacgcctacgaatacgtccaaaccggcagaccgttgggcggacttttggaaaacattatcaatcaagctgttaagaagctgccgattccgaaagtaatgcgttggggcagcagcacgtttaccttcgtgcgccctgttcacgggctgattgtgctgcacggcggcgatgtcgtgaacgtcagcgttttgggcctgcaaagcggcaatcaaaccttgggacaccgctttctttccgacggcgaaatcatcattgaaaacgccgacagctacgccgcacaaatgcgcgggcaaggcaaagtcgtcgcttcgtttgccgggcgcaaagccgcgattcagacggcattggaagggcaggcacgccgtctgaacgcgaccgttgccgccgatgaagccctgttggacgaagtaaccgcgctggtcgaatggcctgttgttttggaagccggttttgaggaacacttcctcgccgtgcctcaagaatgcttgattttgacgatgcagcaaaaccaaaaatacttcccgctgctcgaccaaaacggcaagctgatgaaccgcttcctgctggtttccaacctgcaaaccgaagacccgtcgcacatcatccgaggcaacgaacgcgtattgcgcgcgcgcctgtctgatgccgagttcttctacaaacaagaccaaaaagcgaccttggaaagccgcctgcccaagctggcgaacgtggtgtaccacaacaaaatcggttcgcaggccgaacgcatcgaacgcctgcaaagcatcgccgcccatatcgccaaagcattgggcgcggatgccgcggcagccgagcgcgccgcgcgtcttgccaaagccgacttggtaactgaaatggtcggcgagttccccgaactgcaaggcacgatgggcaaatactacgcccgcttggacggcgaaaccgaagaaatcgccgaagctattgagcaacactaccaaccgcgttttgccggcgacaagctgcccgaaagcaaaattgccgccgccgtggcacttgccgacaaactggaaaccctggtcggcatttggggcatcggtttgattcctaccggcgacaaagacccctacgccctgcgccgcgccgccttgggtattttgcggatgctgatgcagtacggtttggacgtgaacgaactgattcagacggcattcgacagcttcccgcaaggtttgctcaacgaaaaaacgccgtctgaaaccgccgactttatgcaggcgcgccttgccgtgttgctgcaaaacgattatccgcaagacatcgttgccgccgtactcgccaaacagccgcgccgtttggacgatttgaccgccaaactgcaggccgtcgccgtattcaaacaactgcccgaagccgccgcgctcgccgccgccaacaaacgcgtgcaaaacctgctgaaaaaagccgatgccgagttgggcgcggttaacgaaagcctgctgcaacaggacgaagaaaaagccctgtacgctgccgcgcaaggtttgcagccgaaaatcgccgccgccgtcgccgaaggcaatttccaaactgctttgtccgaactggcttccgtcaagccgcaggttgatgccttcttcgacggcgtgatggtgatggcggaagatgccgccgtaaaacaaaaccgcctgaacctgctgaaccgcttggcagggcagatgaacgcggtggccgacatcgcgcttttgggcgag

SEQ ID NO: 29155 - DNA, 723 bp, Neisseria gonorrhoeae
atgcccagattctacctgcccgaaaacctttccgtcggacaaaccgtcgaccttcccgacaacatcgtccgccacctcaacgtcctgcgcgtccgccccaacgaaaacatcaccctcttcgacggcaaaggcaaggcacataccgcacggctgaccgttttggaaaaacaccgcgccgaagccgaaatcctgcacgaagacacaaccgacaacgagtccccgctcaacatcacgctcatccaatccatttcctccggcgatcgcatggatttcaccctgcaaaaaagcgtcgaactcggcgtaaccgccatacagcccgtcatcagcgaacgctgcatcgtccgcctcgacggagaacgcgccgccaaacgcctcgcacgctggcaggaaatcgtcatctccgcgtgcgaacaaagcggcaggaacaccgttccccccgtactgcccatcatcggctaccgtgaagcactcgacaaaatgccgtctgaaaacaccaagctgattatgagcatcaaccgcgcctgcaaactcggcgacatccgccacccgtccggcgcaatcgtctttatggtcgggcccgaaggcggctggacagaacaggaagaacaacaggcatttgaagccggctttcaggcggttacactcggaaaacggattttacgcacagaaaccgccccactcgccgccatcgccgcgatgcagacgctttggggcgattttacc

SEQ ID NO: 29156 - DNA, 1806 bp, Neisseria gonorrhoeae
atggtggcgtgcttattgaaatttcgacaaaggtcgtctgaaaaccgaaaacatggtttcagacgacctttgttgtatttggtaactatatgttcccgttgtataattacggatttgcaattcaataataaatacacaggaaccgccatgacagaatccatcacccgcgacagtatgcaatacgatgtcgtgattgtcggcgcaggcccgtcggggttgtccgccgccatcaaactcaagcagcttgccgaacagaacgggcgcgaaatcagcgtttgcgtggtggagaagggttcggaggcgggggcgcattcgctggcgggcgcggttatcgatccgattgcgctgaatgagctgattcccgactggaaagaaaaaggcgcgccgctgacgcgcacggtaactcaggacaaggtgttgttcctgacggagaaaaaagcgttcaatctgcctattaccccgaatttcgacaatcacggcaactacatcgtcagcttaggcgaagtcgtgcgctggttggcggagcaggcggaaaatatgggcgtggaaatctatccgggctttgccgccgccgaagtgctgtatcacgaagacggctcggtcaaaggtattgcgaccggcaatatgggtgtaggcaaagacggcgggccgaccgacagtttccagcccggcatggagctttgggcgcggcaaaccctgtttgccgaaggttgccgaggttcgctttccaagcaaatcatcgaacgtttccaactcgaccaaaacagccagccgcaaacttacggcttgggcatcaaagaagtttgggaagtgccgtctgaacagcatcagcccggtttggtggtgcatagcgcaggctggccgctggacagcaaaacctacggcggtgcgtttatttaccatttcgacgacaacaaagtcgccgtcggcttcgtggtcggtttggactatcaaaacccgtatctgtcgccgtttgaagagttccaacgtttcaaaacccatcccgaaatccgcaaaacctttgaaggcggccgccgcattgcttacggcgcgcgttcgctgattgaaggcggtttgcaaagcctgccgaagctctcgttcaaggggggcgttttaatcggcgatgcggcggggttcctcaatatgccgcgcatcaaaggcattcatacctcgatgaaatccgccatgctcgccgccgaagccgtgttccccttgttggaaaactttgaagaagtggaaagcttcgacagcggcaaagaagcgggaaactatcaaaaactgtttgaacaaagctggctgtatcaagagctttatgccgcgcgcaatgtccgtccgtcattcaaatggggcgtttacctcggctcgctttataccggcatcgaccagatgattttcagaggcaaagccccgtggaccttgaaacatcacggcaaagacaacgagcagctcaaaaaagccgccgtgtgcaagccgattgattatccgaaacccgacggtgtgttgacctttgaccgcttgagcagcgtcttccttgccaatctcgcgcacgaagaaaaccagcccgaccatttggtgctgaacaatccgcaaacgatgatagacgtgaactataaagaatacgcctctcccgaaacgcgctattgtccggccggcgtatatgaaatcatcgaagaaaacggcagtccgcgcctgcaaatcaacgcggcaaactgcgtgcactgcaaaacctgcgacatcaaagacccgacgcaaaacatcacttggatttgccccgaaggcgcaagcggaccgaattacggcgggatg

SEQ ID NO: 29157 - DNA, 744 bp, Neisseria gonorrhoeae
atgagcacacaagatttaagcggcaaaatcgctttggtaaccggcgcatcgcgcggcatcggcgcggcaattgccgacacactggcggcagccggtgccaaaatcatcggtacggcaaccggcgagagcggtgcggcggcgattagcaaacgtctggcacaatggggcggcgaaggccgcgtattaaattccgccgaacccgaaaccgtcgaaaacctgattgccgacatcgaaaaaacgttcggcaaactcgacattctggtcaacaacgccggcatcacccgcgacaacctgttgatgcgtatgaaagaagaagagtgggacgacatcatgcaggtcaacctcaaatccgtgttccgcgcttctaaagccgtcttgcgcggcatgatgaagcagcgcgccggccgcatcatcaacatcacctccgtcgtcggcgtgatgggcaatgccgggcaaaccaattatgccgccgcaaaagcgggcttgatcggttttgccaaatctatggcgcgcgaagtcggcagccggggcattaccgtcaactgcgtcgccccgggctttatcgataccgatatgacccgcgccctgcccgaagaaacccgccaaacatttaccgcccaaaccgccttgggcagattcggcgacgcgcaagacatcgccgatgcggttctgttcctcgcttccgatcaggcgaaatacattaccggtcaaacgctgcacgtcaacggcggcatgctgatgccc

SEQ ID NO: 29158 - DNA, 1563 bp, Neisseria gonorrhoeae
atgacccaagacaaaatcctcatcctcgacttcggttctcaagttacccggctgattgcccgccgcgtgcgcgaagcccacgtttactgcgaactgcattccttcgatatgcctttggacgaaatcaaagccttcaaccccaaaggcatcatcctttccggcggccctaattctgtttacgaatccgactatcaagccgataccggtatttttgatttgggcattccggttttgggcatctgctacggcatgcagtttatggcgcaccacttgggtggcgaagtgcagcccggcaaccagcgcgaattcggttacgcgcaagtcaaaaccatcgacagcggactgacacgcggcattcaagacgacgcgcccaacacactcgacgtatggatgagccacggcgacaaagtgtccaaactgcccgacggtttcgccgtcatcggcgataccccgtcctgcccgattgcaatgatggaaaacgccgaaaaacaattctacggcatccagttccaccccgaagttacccacaccaaacaaggccgcgccctgttgaaccgctttgtcttggatatttgcggcgcgcaaccgggctggacgatgcccaactacatcgaagaagccgttgccaaaatccgcgaacaagtcggcagcgacgaagtgattttaggtctgtccggcggcgtggactcttccgtagccgccgcgctgattcaccgcgccatcggcgaccaactgacctgcgtgttcgtcgatcacggtttgttgcgcctgaacgaaggcaaaatggtgatggatatgttcgcccgcaacttgggtgtgaaagtgatacacgtcgatgccgaagggcagtttatggcgaaactcgccggcgtgaccgaccctgagaaaaaacgcaaaatcatcggcgcggaatttatcgaagtatttgatgccgaagagaaaaaactcaccaacgccaaatggctggcgcaaggcacgatttaccccgacgtaatcgaatccgccggtgcgaaaaccaaaaaagcccacgccatcaaatcccaccacaacgtcggcggcctgcctgaaaatatgaagctcaaactgcttgagcccttgcgcgacttgttcaaagacgaagtgcgcgagttgggcgtggctttgggcctgccgcgcgaaatggtgtaccgccaccccttcccgggccccggtttgggtgtgcgcatcttgggcgaagtgaaaaaagaatacgccgacttgctgcgtcaggcggacgatattttcatccaagaattacgcaatactaccgacgaaaacggcacgtcttggtatgacctgaccagccaggcatttgccgtattcctgcccgtcaaatccgtcggcgtgatgggcgacggccgcacttacgactacgtcgtcgcactgcgcgcagtcatcaccagcgactttatgactgcacactgggcagagctgccatactcactgctcggccgcgtgtccaaccgcatcatcaacgaagtcaaaggcatcaaccgcgtggtgtacgatgtcagcggcaaaccgcccgccaccatcgagtgggaa

SEQ ID NO: 29159 - DNA, 924 bp, Neisseria gonorrhoeae
atgccgtctgaaaacacaaaaggaacaaccatgaccacacatcatgtcgaattgaggaaggtaaccaaacggttcggggcgcaaaaagccgtcagccaagtcgatttggttttgaaggcaggagaaagcgtcgggcttgccggacacaacggcgcgggcaagtccaccatcatgaagctgatactcgggctgattaccccgaccgaaggcgaagtgatgcttttgggcgaacgtaccggcagcaaagcgggggcgcggcttcgcagccaaatcggctacctgcccgaaaccgttgcgctgcacccttcgctgaccggcatcgaaacgctggatttttatgccaaacttaaaaaacagccgctcacgcagaaccgggggctgcttgagcgcgtcggcatttcccagaccgcacaccgccgcgtcggcacttattctaaagggatgcgccaacgccttgccttggcacaagccctgctgggcgagcccaaagtcctgctgtttgacgaaccgacaaccggccccgaccctgcatcacgacaaatgttttacgaagtcgtgcgcgaactcaacgggcgcggcgcgaccatattgctcagtacccacgcccttgccgagttggacggacacgccgaccgcattgtcgtgatgaaaaacggcgttaaggttgccgacggcagtatggacgaattgcacgtccaaagcgggctgccgctgaccgtcaatatccgcctcaatgcgccgcgcaccctcagcagccgctggcagccgctttcagacggcatttcctaccgggcgcaatgtcaggccgaagaacgtatggaactgttgggcgaattgggcagcctgtccgaccttgcctatttcgacatccacacgccgacgcttgacgaaatgtacgcacggttcttgaaaagggaggacgta

SEQ ID NO: 29160 - DNA, 561 bp, Neisseria gonorrhoeae
atgccttggaacatccccatcttcctcacatggttgagggtcttgctcattcccgtactgattgtccttttctacctgccgttctcatggttttcagaagaagcagtcaatgttgccgccgccgtcatttttgccgttgccgccttgaccgactggtttgacggatttttggcaaggttgtggaaacagacttccgatttcggcgcattcctcgaccccgtcgccgacaagctgatggttgccgtatcgctgctgctgctggtcaaactcgaccggacctatgttttgttcgcgatgattatcatcggcagggaaattaccatttccgcattgcgcgaatggatggcgcaaatgggaaaaaggagcagcgttgccgtcgccaccgtcggcaagttcaaaaccgccgcgcaaatgctggcgattttctttttgctgctgaattttcccgatttttacggatttaatcttgttgttatcggcaacatattgatgtttatcgcatctttgctgacagtctggtcgatgctgtattatctgaaaatggcgtggaaagaaattgcc

SEQ ID NO: 29161 - DNA, 1866 bp, Neisseria gonorrhoeae
atgatagaaaaactgactttcggactgtttaaaaaagaagacgcgcgcagctttatgcgcctgatggcgtacgtccgcccctacaaaatccgcatcgttgccgccctgattgccattttcggcgttgccgccaccgaaagctatcttgccgccttcatcgcccccctgatcaaccacggcttttccgcgcccgccgcgccgcccgatctgtccgccgccgccggcatcctttccaccctgcaaaactggcgcgaacagtttacctatatggtttgggggacggaaaacaaaatctggaccgtcccgctctttctcatcatcctcgtcgtcatccgtggcatctgccgctttaccagcacctatctgatgacttgggtctccgtgatgaccatcagcaaaatccgcaaagatatgtttgccaaaatgctgaccctttcctcccgctaccatcaggaaacgccgtccggcaccgtactgatgaatatgctcaacctgaccgaacagtcggtcagcaacgccagcgacatcttcaccgtcctcacgcgcgacacgatgatcgttaccggcctgaccatcgtcctgctttacctcaactggcagctcagcctcatcgtcgtcctgatgttccccctgctctccctgctctcgcgctactaccgcgaccgtctgaaacacgtcatttccgactcgcaaaaaagcataggcacgatgaacaacgtgattgccgaaacccatcagggacaccgcgtcgtcaagctgttcaacgggcaggcgcaggcggcaaaccggttcgacgcggtcaaccgcaccatcgtccgcctcagcaaaaaaatcacgcaggcaacggcggcacattccccgttcagcgaactgattgcctcgatcgccctcgccgtcgtcatcttcatcgccctgtggcaaagccaaaacggctacaccaccatcggcgaatttatggcattcatcgtcgcgatgctgcaaatgtacgcccccatcaaaagccttgccaacatcagcatccctatgcagacgatgttcctcgccgccgacggcgtatgtgcatttctcgacaccccgcccgaacaggacaaaggcacgctcgcgccgcagcgtgtcgaagggcgcatcagcttccgcaacgtcgatgtcgaataccgttcagacggcatcaaagccctcgacaacttcaacctcgacatcagacaaggcgaacgcgtcgccctggtcggacgttccggcagcggcaaatccaccgtcgtcaaccttctgccccgctttgtcgaaccgtctgccggcaacatctgcatagacggtatcgacatcgccgacatcaaactcgactgcctgcgcgcccaattcgccctcgtctcccaagacgtattcctgtttgacgacaccctgtttgaaaacgtccgatacagccgtcccgacgcgggcgaagccgaagtcctgtccgccctccaagccgccaacctgcaaagcctgatcgacgcatccccgctcggactgcaccagcccatcggatcgaacggcagcaacttatccggcggacagcggcaacgcgtcgccatcgcccgcgccattttgaaagacgcgccgatattattattggacgaagccaccagcgcattggacaacgaatccgaacgcctcgtccaacaagcgctcgaacgcctgatggaaaaccgcaccggcatcatcgtcgcccaccgcctgaccaccgtcgaatccgccgaccgcatcatcgtcatggatggcggcaaaatcatcgaacaaggcacacacgatcaactcatgttccaaaacggctactacaccatgctgaggaacatctccggaaaagataccgccgccgttcagacggca

SEQ ID NO: 29162 - DNA, 924 bp, Neisseria gonorrhoeae
atgtctttcgcattcttcttccccggacaaggttcccaaagcctcggcatgatgaacggctttgccgaacacgtcatcgtcaaaaacacatttgacgaagcctccgccatattggggcaggacttgtgggcgatgattaacggcagcgatgccgaaatcatcggtcaaacagtcaacacccagcccattatgctcgccgccggcgttgccgtttaccgcgcctatttggaagtgggcggcaaaacgcctgccgccgttgccggacacagcctcggcgaatacaccgcgcttgtcgccgccgaagcattggattttgccgatgccgtcaaactcgtccgcctgcgcgccgaactgatgcagtccgccgtaccgcaaggcgtaggcgcaatggcggccattttgggtttggaagatgaacaggtcaggcagatttgtgccgaatccgcacagggcgaagtggtcgaagccgtcaacttcaactcgcccggacaagtcgtgattgcaggcaacgccgccgccgtcggacgcaccatggctgccgccaaagaagccggagccaaacgcgccctgccgctgccggtatccgttccttcccattgcagcctgatgaaacccgccgccgacaaacttgccgaaacactcaaaaccgttgaaatcaagcagccgcaaatccgcgtcatccacaacgccgacgttgccgcctacgatgatgccggcaaaatcaaagacgcgctcgtccgccagctttacagccccgtgcgctggacggaaaccgtcaacgccctcgtttcagacggcattgccgaatccgccgaatgcagcccgggcaaagtgttggcgggcttggcaaaacgcatcaacaaggccgccgcgtgcagcgcactgaccgatgccggacagattaccgcctttatcgaagcgcat

SEQ ID NO: 29163 - DNA, 895 bp, Neisseria gonorrhoeae
atggacattctggacaaactggtcgatctcgcccaattgacgggcagtgcggatgtgcagtgccttttgggcggacaatgatgaaaccttgcaacgcgaagggctggtacacattgttacggcgggcagcggttatctctgcatcgacggcgaaacttccccgcgtccggtcggcacgggcgatattgtatttttcccgcgcggcttgggtcatgtgttgagccacgacggaaaatacggagaaagtttacaaccggacatacgacaaaacggcacatttatggtcaaacagtgcggcaacgggctggatatgagcctgttttgcgcccgtttccgctacgacacccacgccgatttgatgaacgggctgccggaaaccgtttttctgaacattgcccatccaagtttgcagtatgtggtttcaatgctgcaactggaaagcgaaaaacctttgacggggacggtttccgtggtcaacgcattaccgtccgtcctgctggtgcttatcctgcgcgcctatctcgaacaggataaggatgtcgaactctcgggcgtattgaaaggttggcaggacaaacgtttgggacatttgatccaaaaggtgatagacaaaccggaagacgaatggaatattgacaaaatggttgccgccgccaatatgtcgcgcgcgcaactgatgcgccgcttcaaaagccaagtcggactcagcccgcacgcctttgtgaaccatatccgcctgcaaaaaggcgcattgctgctgaagaaaaccccggattcggttttggaggtcgcgctgtcggtgggctttcagtcggaaacgcatttcggcaaggcgttcaaacggcaatatcacgtttcgccggggcaataccggaaagaaggcgggcaaaaataa

SEQ ID NO: 29164 - DNA, 960 bp, Neisseria gonorrhoeae
atgcagtatgcaaaaatttccggcacgggcagctatcttcctgccaaccgcgtcagcaatgacgaccttgcccaaaaggtagatacctctgacgagtggattaccgcgcgtacgggcatcaaattccgccatattgcagccgaaaacgaaaaaaccagcgatcttgcagccgaagcggcgcggcgcgctttggcagatgccaaattaaatataaacgacattgatttgattatcgtggcgacggcaacgccggatatgcagtttccttctaccgccaccatcgtgcagcaaaaattgggcatcaccaacggctgccccgcgtttgacgtgcaggcggtgtgcgcaggctttatgtacgcgctgactacggcaaatgcctacattaaaagcggtatggcgaaaaacgcgctggtcatcggcgcggaaaccttcagccgcatcgtcgattggaacgaccgcacaacctgcgtgctgttcggcgacggcgcgggcgcggtggttttaagcgcgtccgacaaaccgggcatcatccacagcaaactcaaagccgacggcaattatctgaaactcttaaacgtccccgggcaaatcgcctgcggcaaagtttccggttcgccgtacatttcgatggacggtcccggcgtgttcaagtttgccgtcaaaatgctgtccaaaatcgccgatgacgttatcgaagaagcaggttacaccgccgaacaaatcgactggattgttccccatcaggcaaaccgccgcattatcgaatcgaccgcgaaacatttgggtttgagtatggacaaagtcgtcctgaccgtccaagaccacggcaacacgtccgccgcatccattccgctggctttggacgcgggcatccgcagcggacaaatcaaacgcggtcaaaacctgctgctcgaaggcataggcggcggtttcgcgtggggcgcggtgctgttgcaatat

SEQ ID NO: 29165 - DNA, 1245 bp, Neisseria gonorrhoeae
atgcaacttaccgctgtcggactcaatcatcaaaccgcacctttaagcatacgggaaaagctggcgtttgccgccgccgccctgccagaagccgtccgcaatcttgcccgaagcaatgcggcaacggaggcggtaatcctttctacctgcaaccgcaccgagctttactgcgtcggcgattcggaagaaatcatccgatggcttgccgattaccacagtttgccgattgaagaaatccgtccgtatctgtacacgctggatatgcaggaaaccgtgcgccacgccttccgcgttgcctgcggcttggattcgatggttttgggcgagccgcagattttggggcagattaaagatgcggtgcgtgcggctcaagaacaggaaagtatgggggcaaaactcaatgccctgttccaaaaaaccttttccgttgctaaagaagtccgtaccgataccgctgtcggcgaaaattcggtttcgatggcttccgcgtccgtcaagttggcggaacagatttttcccgacatcggcgatttgaacgtattgtttatcggcgcaggcgaaatgattgagctggttgccacttattttgccgccaaaaatccccggctgatgacggttgccaaccggacgctggcgcgtgcacaggagttgtgcgacaagctcggtgttaacgccgaaccgtgcctgctgtccgatctgcctgccattctgcacgattacgacgtggtggtttcttcaacggcgagccagcttccgatagtcggcaaaggcatggtcgaacgcgcattgaaacagcgtcagagtatgccgttgttcatgcttgacttggccgtgccgcgcgatattgaagcggaagtcggcgatttgaacgatgcgtatctttatacggtggacgatatggtcaacatcgtccaaagcggcaaggaggcaaggcagaaggccgccgccgccgccgaaacgctggtgtccgaaaaggttgccgaatttgtcaggcagcagcagggcaggcagagcgttccgctgattaaggccttgcgggacgagggcgagaaagcgcgcaagcaggtgttggaaaatgcgatgaaacagcttgccaaaggcgcaacggcggaagaggttttggaacggctgtccgtccaactgaccaacaagctgctgcattcgccaactcaaaccttgaataaggcgggggaagaagataaagatttggttcatgccgtcgcgcagatttatcatttggacaaa

SEQ ID NO: 29166 - DNA, 1098 bp, Neisseria gonorrhoeae
atgactgctctgaaaaccaccccgtttcatcaagcccatcaagatgcaggcgcgaagccggtagattttgccggctgggaactgcccatccattatggttcgcaaatcgccgaacacgaagccgtgcgcaccgacgccggtatgtttgacgtatcccatatgctcgttaccgacgtcgtcggagcgaacgccaaagcctttttccgcaaattgattgccaacgacgttgccaaactcgcttttgtcggcaaagccctttattccgctttgctcaacgacaacggcggcgtgattgacgacttgatcgtttaccgcaccaacgaggccgaaacccaataccgcatcgtgtccaacggtgcgacccgtgaaaaagacacggcacaattccacaaagtcggacaagagttcggcgttgccttcaatccgcgctacgacctcggtatgcttgccgtacaaggtcctaaagccattgaaaaactcctgaccgtcaaacccgaatgggcggatgtgattcacggcctcaaaccgttccaaggcgcggatttgggcaacgactggtttgtcgcccgtacaggctacaccggcgaagacggcgtcgaagtgattctgccggataccgaagccgtcgcattcttcaaagccctgcaaacagcaggcgtacagccttgcggcctcggcgcgcgcgacaccctgcgcatggaagccggtatgaacctctacggcaacgatatggacgacgacaccagcccgctcgaagcaggcatgggccggacggttgatttgaaagacgaaagccgcgattttgtcggtaaagccgccttgttggcattgaaagaaaaaggcgttgccgtcaaacaagtcggtttgctgctcgaaaaaggcggcatcctgcgcgcgcatatggaagtgttgaccgacaaaggaaaaggcgaaaccaccagcggcgtattctcgcccagcctgaaacaatctatcgccatcgcccgcgtaccgaaagattttgacggcgataccgccaaagtcctgattcgcggcaaagaagcggacgtgcgcgtactgaagctgccgttcgtccgcagcggtcaaaaacagtttgat

SEQ ID NO: 29167 - DNA, 2622 bp, Neisseria gonorrhoeae
atgaaaacctccgaactgcgccaaaaattcctaaaattttttgaaaccaaaggccacaccgtcgtccgctcttccagcctcgtgccgcacgacgacccgaccctgctgtttaccaacgcaggcatgaaccagtttaaagacgtatttttaggtttcgacaaacgcccgtacagccgcgccaccaccgcgcaaaaatgtgtacgcgcaggcggcaagcacaacgacttggaaaacgtcggctacaccgcccgccaccacaccttctttgaaatgatgggcaacttctccttcggcgattacttcaaacgcgacgcgatccacttcgcttgggagtttctcacttcccccgaatggctcaacatccccaaagacaaactcttggcgaccgtttacgcagaagacgacgaagcctacaacatctggttgaacgaaatcggtatgccgtctgaacgcatcgtccgcatcggcgacaacaaaggcgcgaaatacgcgtccgacaacttctggcaaatgggcgacaccggcccttgcggcccctgctccgaaattttctacgaccacggcaaagaaatctggggcggcattcccggcagccccgaagaagacggcgaccgctggattgaaatttggaactgcgtattcatgcagttcaaccgcgacgaacaaggcaatatgaatccgctgcccaagccgtccgtcgataccggtatgggcttggaacgtatggccgccgtgatgcagcacgtccacagcaactacgaaatcgacctgttccaagacctgctcaaagccgttgcccgcgaaaccggcgcgccgttcagtatggaagaacccagcctgaaagttatcgccgaccacatccgctcctgctcattcctgattgcagacggcgtattgccttccaacgaaggacgcggctacgtattgcgccgcatcatccgccgcgccgtgcgccacggttacaaactgggtcaaagcaaaccgttcttccacaaactcgttgccgatttggttcaagagatgggcggcgcgtatcctgaattgaaagaaaaacaggcgcaaatcgaagaagctttgaaaaacgaagaaagccgttttgcccaaactctggaaaccggtatggctttgttggaaaacgcgctggccaaaggcggcaaaacactcggcggcgaaattatcttcaaactctacgatacctacggcttcccatacgacctgactgccgacatctgccgcgaacgcaatatcgaaccggacgaagcaggcttcgagcgcgaaatggaagcccaacgcgcacgcgcacgcgccgcccaaagcttcaaagccaacgcccaactgccttacgacggtcaagacaccgagtttaaaggttatagcgaacgccaaaccgaatccaaagtcctcgccctctacaaagacggcgagcaagtcgtcgaattgaacgaaggcgacagcggtgccgtcgttatcgactttaccccgttctatgcagaatccggcggccaagtcggcgacgtcggctatatcttcgcaggcgaaaaccgctttgaagtacgcgatacccaaaaaatcaaagcggccgtattcggccaattcggcgtacaaacttcaggccgtctgaaagtcggcgacagcattaccgccaaagtggatgacgaaatccgcaatgccaatatgcgcaaccacagcgcgacccacctgatgcacaaagccctgcgcgacgtattgggcggacacgtcgaacaaaaaggctctttggttaccgccgaatccacccgtttcgacatttcccatccccaagcggtaactgccgaagaaatcgccgaagtagaacgccgcgtcaacgaagccatcttggccaacgttgccgtcaacgcagccattatgagcatggaagacgcgcaaaaaaccgacgccatgatgctcttcggcgaaaaatacggcgacgaagtacgcgtactgcaaatgggcggtttctctaccgaattgtgcggcggcacacacgtttcacgcaccggcgacatcggcctcttcaaaatcatcagcgaaggcggtattgccgcaggcgtacgccgtatcgaagccatcaccggcctgaacgcactcaaatgggcgcaagagcaagagcgtttggtaaaagacatcattgccgaaaccaaagcccaaaccgaaaaagacgtactggcgaaaatccaagcaggcgcggcacacgccaaagcattggaaaaagaattggcacgcgccaaagccgaactcgccgtccacgcaggcgccaaactcttggacgacgcaaaagacctgggcgcggccaaactcgttgccgcacaaatcgaagccgacgcagccgccctgcgcgaaaccgtaaccgacctgaccggaaaatccgacaacgccgtgattcttttagcggcagtaaacgagggtaaagtctccctgtgcgccggcgtatccaaagccctgaccggaaaagtcaaagcaggagatctggttaaatttgcagccgaacaagtcggcggcaaaggcggcggccgtcccgacttggcgcaagccggcggtacggatgccgacaaattgcccgaaatgctggcaagcgcggaaggttggctttgtcagaaattaagt

SEQ ID NO: 29168 - DNA, 588 bp, Neisseria gonorrhoeae
atgggtttggaactgcctttggttttgggtacgagttcggttttccgccgcgaacagatggaaaggctcggcattgcctttcaggcggcatcccccgattttgacgaaacgccgatgttgggggaatccgcccctcagacggcattgcgccttgccgagggtaaggcgcggtcgttgaccgggcgtttccccggggcgttgattgtcggtgcggaccaggtggcgtggtgcgacggcaggcagtggggcaagccgatgaaccttgccaacgcgcaaaagatgttgatgcatttgagcggcagggagattgagttttacagtgcggtcgttctgctaaatacggttacgggcaggatgcatcggcatatcgataagacggtggtcgtgatgaggcagttggacgagctgcacatcctccgctatttggagcgcgagccggatgcggtttattgttcgtgtgcggcgaaaagcgagggcttgggcgcgctgttgatcgaacggattgaaagtaccgatccgaatgccttgattggtctgccggttttccgtctggtcgattttttgaaaaacgagggcgtggatgttttg

SEQ ID NO: 29169 - DNA, 1635 bp, Neisseria gonorrhoeae
atggattttaaaagactcacggcgtttttcgccatcgcgctggtgattatgatcggctgggaaaaaatgttccccaccccgaaacccgtccccgcgccccaacaggcggcacaaaaacaggcagcaaccgcttccgccgaagccgcgctcgcgcccgcaacgccgattaccgtaacgaccgacacggttcaagccgttattgatgaaaaaagtggcgacctgcgccggctgaccctgctcaaatacaaagcaaccggcgacgaaaacaaaccgttcgtcctgtttggcgacggcaaagaatacacctacgtcgcccaatccgaacttttggacgcgcagggcaacaacattctgaaaggcatcggctttagcgcaccgaaaaaacagtacaccctcaacggcgacacagtcgaagtccgcctgagcgcgcccgaaaccaacggactgaaaatcgacaaagtctatacctttaccaaagacagctatctggtcaacgtccgcttcgacatcgccaacggcagcggtcaaaccgccaacctgagcgcggactaccgcatcgtccgcgaccacagcgaacccgagggtcaaggctactttacccactcttacgtcggccctgttgtttatacccctgaaggcaacttccaaaaagtcagcttctccgacttggacgacgatgcgaaatccggcaaatccgaggccgaatacatccgcaaaaccccgaccggttggctcggcatgattgaacaccacttcatgtccacctggatcctccaacctaaaggcggccaaagcgtttgcgccgcaggcgactgccgtatcgacatcaaacgccgcagcgacaagctgtacagcgcaagcgtcagcgtgcctttagccgctatccaagccggcgccaaagccgaaactgccgtcaacctgtatgccggtccgcaaaccacatccgttatcgcaaacatcgccgacaacctgcaactggcaaaagactacggtaaagtacactggttcgcatcgccgctcttctggctcctgaaccaactgcacaacattatcggcaactggggctgggcaatcgtcgttttgaccatcatcgtcaaagccgtactgtatccattgaccaacgcctcctaccgttcgatggcgaaaatgcgtgccgccgcacccaaactgcagaccatcaaagaaaaatacggcgacgaccgtatggcgcaacagcaagcgatgatgcagctttacaaagacgagaaaatcaacccgctgggcggctgtctgcctatgctgttgcaaatccccgtcttcatcggcttgtactgggcattgttcgcctccgtagaattgcgccaggcaccttggctgggctggattaccgacctcagccgcgccgacccctactacatcctgcccatcattatggcggcaacgatgttcgcccaaacctatctgaacccgccgccgaccgacccgatgcaggcgaaaatgatgaaaatcatgccgttggttttctccgtcatgttcttcttcttccctgccggtttggttctctactgggtggtcaacaacctcctgaccatcgcccagcagtggcacatcaaccgcagcatcgaaaaacaacgcgcccaaggcgaagtcgtttcc

SEQ ID NO: 29170 - DNA, 363 bp, Neisseria gonorrhoeae
ttggactaccgcttcggaaggcagtaccgcttgttaaaaacggatgatttttcatccgtttttgcattcagaaaccgccgcagccgcgacctgctgcaagtttcgcgctcaaacggcaacgggctggaccatccccgcatcggtctggtggtcggcaaaaaaaccgccaaacgcgccaacgagcggaactatatgaaacgcgtcatccgcgactggttcagattgaacaaaaaccggctgccgcctcaggatttcgtcgtgcgcgtccgccggaaattcgacagggctaccgcaaaacaggcaagggcggaactggcacaactcatgttcggcaaccccgcaaccggatgcgggaaacaggta

SEQ ID NO: 29171 - DNA, 1302 bp, Neisseria gonorrhoeae; identical to SEQ ID NO: 28899

SEQ ID NO: 29172 - DNA, 816 bp, Neisseria gonorrhoeae
atgaaaaaaaaccatttgaacacaaccggtttcgacctctggcacaccatccgcgaagaaaccgcggccgctgccgccgccgaaccgatgctggcaagttttttgcaccaaaccgtgttgcgccacgagtccctcggctccgtccttgcctaccacctttccagcaaactcggcagcccgattatggacgtgcgcgcgctgtttgaaatttaccagcaggcattgggcagcgacacccaaatcagcaaatgtgtcgaagcagacttaaaagccatctacgaacgcgatcccgcctgcgacgaatattcgctgccgcttttatatttcaaaggcttccacgcgattcaggcacaccgcatcaaccaccggctgtatctcgacggacgcaaaacgctggcgtatttcctacaaaaccgtatgtccgaagtattcggcgtggacatccatcccgccgcccgtttaggatacgggctgatgctcgaccacgccaccggctttgttgccggagaaaccgccgtgttgggcaacaatatttcgattttgcacggcgtaacgctcggcggttcgggcaaagaaggcggcgaccgccaccccaaaatcggcgacggcgtgatgatcggcgcaaacgcctcgatattgggcaatatccgcatcggcagcaatgccaaaatcggcgcgggcagcgtcgtggtttcagacgtgccgccgtccatcacggttgtcggcgtacccgccaaacccgtggcgcgatcgctcaaaaccccgtcggcggatatggatcaaaatatccagtttgccgaaatcgactttatgatt

SEQ ID NO: 29173 - DNA, 1926 bp, Neisseria gonorrhoeae
atggcaaaagtaatcggtatcgacttaggtacaaccaactcttgtttggccatttccgaaaacggtcaaaccaaagtcatcgaaaacgcagaaggcgcacgcaccacgccgtccattatcgcttatttggacggcggcgaaatcctcgtcggcgcgcctgccaaacgccaagcggtaaccaacgccaaaaacactatttacgccgccaaacgtttgatcggtcacaaatttgaagacaaagaagtccaacgcgacatcgaatctatgcctttcgaaatcatcaaagccgacaacggcgacgcatgggtaaaagcacaaggcaaagagctgtctcctcctcaaatttccgcagaagtcctgcgtaaaatgaaagaagccgccgaagcttacttgggcgaaaaagtaaccgaagccgtgattaccgtccctgcctacttcaacgacagccaacgtcaagccaccaaagacgcaggccgtatcgccggtttggacgtaaaacgcatcatcaacgagccgaccgcagccgctttggcattcggtatggacaaaggcgacaacaaagaccgcaaaatagccgtatatgacttgggcggcggtaccttcgatatttccatcatcgaaatcgccaacctcgacggcgacaaacaatttgaagtattggctaccaacggcgatactttcttgggcggtgaagacttcgaccaacgcttgattgactacatcattgacgagtttaaaaaagaacaaggcattgatttgaaacaagacgtaatggctctgcaacgtctgaaagaagctgccgaaaaagccaaaatcgaattgtccagcggccagcaaaccgaaatcaacctgccgtacattaccatggacgcaaccggcccgaaacacttggcaatgaaaattacccgcgccaaattcgagagcctggttgaagacctgattgcccgctctatcgagccttgccgcaccgcattgaaagatgccggcttgagcaccggcgacatcgacgacgtgattttggtcggcggtcagtcccgtatgccgaaagtacaagaagccgttaaagacttcttcggcaaagaaccgcgcaaagacgtgaaccctgacgaagccgttgccgtaggtgcagcgattcaaggcgaagtattgagcggcggccgcagcgacgtattgctgctggacgtaacccctctgtccttgggtatcgaaaccatgggtggtgtgatgaccaagctgattcaaaagaacactactattccgactaaagcgtctcaagtgttctctactgccgaagacaaccaaagcgcagtaaccatccacgtactgcaaggcgaacgcgaacgcgcttctgccaacaaatctttaggtcaattcaacttgggcgacatcgcacccgcaccacgcggtatgccgcaaattgaagttactttcgacatcgacgccaatggtatcttgcacgtttccgccaaagacaaaggcactggcaaagcggccaacattaccatccaaggttcttcaggtttgagcgaagaagaaatcgaacgcatggtgaaagatgccgaagccaatgccgaggaagataaaaagctgactgaattggtcgcttcccgcaaccaagccgaagccctgattcactccgtgaaaaaatctttggcggactacggcgacaaactcgacgctgccgagaaagaaaaaatcgaagccgcgctgaaagaagccgaagaagccgtgaaaggcgacgacaaaaccgccatcgatgccaaagccgaagcactgggtacagccagccaaaaactgggcgaaatggtttacgcgcaagcgcaagccgaagcccaagccggcgagggcgcacaagccaatgcttctgcaaagaaagacgatgatgtcgtagatgccgactttgaagaagtaaaagacgacaaaaaa

SEQ ID NO: 29174 - DNA, 783 bp, Neisseria gonorrhoeae
atgaaaaccaagttaatcaaaatcttgaccccctttaccgtcctgccgctgctggcttgcgggcaaacgcccgtttccaatgccaacgccgaatccgccgtcaaagccgaatccgccggcaaatccgttgccgcttctttgaaagcgcgtttggaaaaaacctattccgcccaagatttgaaagtgttgagcgtcagcgaaacaccggtcaaaggcatttacgaagtcgtcgtcagcggcaggcagattatctacaccgatgccgaaggcggctatatgttcgtcggcgaactcatcaacatcgacacgcgcaaaaacctgaccgaagaacgcgccgccgatttgaacaaaatcgacttcgcctccctgcctttggacaaagccatcaaagaagtacgcggcaacggcaagctgaaagtcgccgtcttctccgaccccgattgtccgttctgcaaacgcttggaacatgagtttgaaaaaatgaccgacgtgacggtttacagctttatgatgcccattgccggcctgcacccagatgccgcgcgcaaggcgcaaatcttatggtgtcagcccgaccgtgccaaagcgtggacggattggatgcgtaaaggcaaattcccggtcggcggcagcatctgcgacaatcccgtcgcggaaaccacttccttgggcgaacagttcggcttcaacggcacgccgaccctcgtcttccccaacgggcgcacccaaagcggttacagcccgatgccccaactggaggaaatcatccgcaaaaaccagcag

SEQ ID NO: 29175 - DNA, 885 bp, Neisseria gonorrhoeae
atgtacacaggacgcttcgcccccagcccgaccgggttgctccacatcggctctctgctgaccgccgtcgcttcctatgccgatgcacgttcaaacggcggcaaatggctggtccgtatggaagacctcgatccgccgcgcgaaatgccgggggcggcaagccatatcctgcacacgctcgaggcattcggattcaagtgggacggcgaagtcacctatcagagccgccgttacgccctgtatgaagaaaccctataccgtctgaaaaccgccggactggtctatccctgccattgcaaccgcaaagactggcaggccggggcaaggcggggcacagacgggttcgtctataacggacgctgccgccaccccggccaacgccctgcactgcaaggcaaacagccgtcgtggcgcatccgcgtccccgaccgcgacatcggcttttcagacggcatcgtcggcagttacgcccaaaacctcgcccgcgacatcggcgatttcgtcctgttccgtgcagacggttactgggcataccagctcgccgtcgttgccgacgatgccgaacagggcgttacccacatcgtgcgcggacaagacctgctcgtttccacaccgcgccaaatctatttgcagcagtgtttgggcgttccgacaccgcaatatgcccacctgccgctgctgaccaacgcgcaagggcagaaatggtcgaagcagacgctcgcccccgcattggatttaaaccgccgcgaacaacttctccgccaagtgttccgctacctcaagctgcccgaagcaccggaaaccgaccgccctgccgaattgctcgactgggcggtggcacactgggatatggacaaagtgccgaaacacgccattaccgccccc

SEQ ID NO: 29176 - DNA, 957 bp, Neisseria gonorrhoeae
atgctcgactggacggacaggcactaccgttaccttgcccgccagattacccgaaatgcttggctgtacagcgaaatggtcaacgccggcgcgattgtttacggcgacaaagaccgctttttgatgttcaatgaaggcgagcagcccgtcgccctgcaactgggcggcagcgatccgtccgatttggcgaaagccgccaaagccgccgaagaatacggctacaacgaggtcaacctcaactgcggctgtcccagtccgcgcgtgcagaaaggcgcgttcggcgcgtgtctgatgaacgaagtcgggctggttgccgactgcctcaacgccatgcacgacgcggtcggcatccccgttaccgtcaaacaccgcatcggtgtggacaggcagaccgaataccaaaccgttgccgatttcgtcggcacgctgcgcgacaaaaccgcctgcaaaaccttcatcgtccacgcccgcaacgcttggctggacggtctttcgcccaaagaaaaccgcgatgttccgcccttgaaatacgattacgtttaccgcctcaagcaggagtttcccgagctggaaatcatcatcaacggcggcatcaccaccaacgaagcaatcgccggacacttgcaacacgttgacggcgtgatggtcgggcgcgaggcataccacaacccgatggtgatgcgcgaatgggacaggctgttttacggtgacaaccgcgccccgatcgaatacgccgatttggtgcagcgcctctacacatacagccaagtccaaatccaagccggacgcggcacaatcctgcgccacattgtccgccacagcctcgggctgatgcacggtttgaaaggcgcgcggacttggcggcgtatgctttccgatgcaacgctcttgaaagacaacgacggcggcctgattttcgaagcgtggaaagaagtcgaacgggcaaatacgcgcgaa

SEQ ID NO: 29177 - DNA, 1044 bp, Neisseria gonorrhoeae
atgaaaatgcaggcagttgttgtgaataaaaatgtagcgggcgatgtggaagtagtcgaacgcgaggttcgcccgttggaatacggcgaggcattggtcgaagtcgaatattgcggcgtgtgccataccgacctgcacgttgcggcaggcgactacggcgaaaaaccgggccgcgtgctgggacacgagggcatcggtttggttaaagaagttgccgacggtgtgaaaaatctgaaagtcggcgaccgcgtcagcatcgcctggctgttccaaagctgcggctcttgcgaatactgcaataccggccgcgaaaccctgtgccgttccgtattgaacgcgggctacaccgccgacggcggtatggcgacccactgcatcgtgagtgccgattacgcggtcaaagtccctgaaggtttggatcctgcgcaagcttccagcattacttgtgccggcgtgaccacttataaagccattaaagtttccggcgttcgtcctggtcaatggattgcgatttacggcgcgggcggcttgggcaacttgggtgtccaatacgcgaaaaaagtattcggcacgcacgttgtcgccatcgacatcaacgacgacaagctggcatttgccaaagaaaccggcgcggatttggttgtcaacgccgccaaagaggacgctgccaaagtgattcaggaaaaaaccggcggcgcacacgctgcggtcgtaaccgccgtatctgctgccgcattcaactctgccgtgaattgcgtccgcgcgggcggacgtgtggttgccgtcgggctgccgccggaatcgatggatttgtccatcccgcgtttggttttggacggcatcgaagtggtcggctctttggtcggcacgcgcaaagatttggaagaagccttccaattcggcgcggaaggtttggttgtgccgaaagtccaactgcgtgctttggatgaagcacccgccattttccaagaaatgcgcgaaggcaaaatcaccggccgtatggtgatcgatatgaaaaaagaatgcggctgcgatcatcaccac

SEQ ID NO: 29178 - DNA, 555 bp, Neisseria gonorrhoeae
atggatgctttaaaattattgacgaaccgccgatcttccaaaaagctgaagcaccccgcccccgatgcggcggagttggaacaaatattgcaggcggcaacccaagtttccgatcacggcaacatgcgccccttccgttttaccgtgattcaaggcgaggtaggattgcaacgttttcgcgatgtgttgaagcaaacggttgccgaactgaatttcggcgacgatgcgatgaaaaaggcggaaaaagtgggcaatatggcgccgatggtcatcggggtaacgtttgtgccgaaccgcgatgtgcctaagccgaaaccggaatgggagcagatgctgacggcgggttgtgcggcgtatgcgctgcaactggcggcaacggctcagggattcgacaatgtctggattacggggatgtgggtcaacagcccattgttgcgggaggctttcggttgcgaggataaggataaaatcatcgggctgatgatggtcggcacgccgacagaggaagtgcataagcccaagaataccgatttggaagcgtttgtcagccattgg

SEQ ID NO: 29179 - DNA, 3483 bp, Neisseria gonorrhoeae
atgcgcctgacccacatcaaactctccggcttcaaatcttttaccgacccgaccacgattcatgttccggggcagcttgtcgcggttatcgggccgaacggctgcggcaagtcgaatgtgattgacgcggtgcgctgggtgttgggcgaggcttcggcgaagcagcttcgcggcgagagtatgcaggacgtgatttttaacggtgcggcgacgcgccgtcctgcgccgagggcttcggtggagctggtatttgacaacagcgaccacagtttgcagggcgcgtgggggcagtatgccgaggtgagcatcaagcggcagctgacgcgtcagggggaatcgacttatttcatcaacaatcagaccgtgcgccgccgcgatattactgatttgttcttgggtacgggcgtgggcgcgcgcggttatgccgtcattgagcaggggatgatttcgcgcatcatcgaagcgcggccggaggagttgcgcgcctatatcgaggaggcggcgggcgtgtccaaatataaggaacgccgcaaggagacggaaggccgtctgaaagacacgcgcgagcatttgcagcgtttgggcgatttgcagaacgagttggcgcgtcaggtggaaaagctggaaaaacaggcggaaaccgccgaacgctacaaatccctgaccgcgcagttgaatcaacaacaggatttgctcgattacgcccaatggcagcaatcgcttgccgccgccgacaaggcgaccgcgcagcatcaatctttgcaggcgcagcaggatgaaaccgccgcacaggttcaggcgttaaataacgaagtacacgccttgcagactgccgaacagtcgcagcagcaggcagtacacgaattgagcaacaaacgcggcgtgttgcgcgagcagattgcccgtttggaagaacaaatccgccaccggcaaaacctgcaccaacgcatcgaacgcgacaagcaggcagcgcaggcgcagttgcaacgcatccggcaggagcagcagcaaatccgcgtgcagcttgaggaaaacgagttgcaggtcgaagaaaagcaaaccgaattggcggaatgggcgatgcaggttgccgaacacgaagagcgtctgcccgaattggaagaagtccaagccacgctcaacgctgccttccaaacccagcaggacgaggcaaaccgcatccgccgcgaactggcgttgaagcagcagcagcttgcccatgccgaacaaaccgttgccaagcacgaagagcgcaaaggccgtctgaagcaggaaaaccaagccctgaacctgcccgacgaggccgaaaccgccgccgctcaggaagccgccgccttgttgcaaagccggcaagagcattacgaagaacaaatcattgccgccgaagaagccttgcacgccgcccgcgaggcgtttcagacggcctcaaaccgcttccaaagcctgaagcagcaacacattaccttgcaggcgcagcagcaggcgttgtcgcaaatcctgtcgcaacagcaggaagccgccgacttttggcaggcaaccgaccacgccgccgcgccgcaactgtggcaacacatcaccgcgcccgccgagtggcagcacgccctgtccgtcatccttgccgaacgcctgcacgcccgtagcgtgccgaatagtttcgtaccgcccgcacctttgccgcaggggcaggcggcatggctttcagacggcctctccggcggcatcaaaaaatccctgcccgtacaggcattgctgaaccaaatccaagcgcagccgccgtttcagacggcattgcaccactggctcgacggcgtattgtgcgcgcccgatttgagctacgccctcgcgcatcaaaacgatttgggcacgcatcaaatctggctcacacccgaaggccatcaggtcgataaggtcagcgtcctgctctatgccaagcccgcgcaggaaagcctgattgcccaaaaagcacgcctcgacggcatcgcggccgaactggaaaacctcgcccccggactttccgccgccgaagccgcgttcaaacagacggaggctgccgtgtgctcgtccgaagtgcagcacaaaaatctgatgcagcagcaacagcagcacacgcgccaatacagtcaagcgcagcaacgcaccgccgaacttctggcgcgcaccaaccaagggcaaatccgccgcgaacacatcgagcgcgaactggcacagttggcggaagagcagaccgtgttgcaacacacgtccgacgggctttcagacgacatcgctactttgcaggaagccgccgccgaactcgaacaccagcagcaaaccaccgcgcacagccgccaagagcagcaaggccgtctgaaacaggcgcagcttgccctgttggaagccaaccgccaatacgggcttgccgaagtcgccgtccacaaactcaaccagcaaaaacaaaactaccggcagcaaatcgcccggctcgaacagcaaaccctggactggcaggaacgccggcaagagcttgccctcgcctatgaaaccgagttccaaaacgacgagcagcacatcaagctcgacgagttgaccgaaaccgtacacacgctggacgaagaatacatcgccgtgcaggaaaaactcgcgcagattcaggaacagggcagggagcaatacgcccgcgtacaaaccctgcaaaccaagctgccgcagcttcaggccgccacccaaaccgccctgttgcagcagcaggaggccctgatcaacgccaaacgctaccatcaaaacctgaccgaacgcgctgccgatctggacgtgctcgaagcgttggcgaaagaatcggcgaaagtattgaacagcagcatcggcagccttacccggcaaatcgaagccctcggcgccgtcaacctcgccgccctgcaagaactcgaagaagcgcgcgaacgcgacggctactaccgcagccagagcgaagacgtgcaggccgccatcgcgcttttggaagaagccatcgcccaaatcgacgacaaaaccaaagcgcgtttcaaagaaactttcgacgccgtcaacggcaaagtccaaaccttcttcccgaccctgttcggcggcggcgaagccaccctcaaaatgataggcgacgacctcctgaccgccggcgtgtccatcatggcgcgtccgcccggcaagaaaaacagcaccatccacctcctctccggcggcgaaaaagccctcaccgccatgagcctcgtgttcgccctgttcagcctcaaccccgcccccttctgccttctggacgaagtcgatgccccgctggacgatgccaacacctcgcgtttctgcaagctggtcaaagaaatgtcggtgcaaacccagttcctctacatctcccacaaccgcctgaccatggaaatggcggagcagctggtcggcgtaaccatgcaggaaaaaggcgtgtcgcgcgttgtcgccgtggacatcaaacaggcgttggaaatggcggaagccgtt

SEQ ID NO: 29180 - DNA, 1488 bp, Neisseria gonorrhoeae
atgttacagctggcagaagcactggcaagcgaaaaaaacgttgatgcggaagtcgtcttccaagcactggaattcgcactctctaccgccgccaagaaaaaggcagaccgcgaacacatggacgtgcgcgtccaaatcaaccgcgataccggcgaataccaaaccttccgccgctggctgattgtggccgatgaagactatacctatcccgatgtcgaaaaaaccatcgaggaaatccaagaggaaatccccgatacgaccatccaaatcggcgaatactacgaagagcagctgcccaacgaaggcttcggccgccaagcggcgcaaactgccaaacaaatcatcctgcaacgcatccgcgatgccgagcgcgagcagaatctgaacgagttcctcgccgtcaaagaagacatcgtgtccggcacggtcaaacgcgtcgaacgccacgggatcatcgtcgaagtcgttgccggcaaactggacgcgctgattccgcgcgaccaaatgattccgcgcgaaaacttccgcagcggcgaccgcatccgcgccctcttcctgcgcgtcgaagaaatcggcaacaccggccgcaaacaaatcatcctgagccgtacttccggcgatttcctcgtcaaactgtacgccaatgaagtacctgaaattgcagacggcatgcttgaaatccgcgctgtcgcccgcgacccgggccaacgtgccaaagtcgccgtcaaagccaacgaccagcgcatcgatccgcaaggcacctgtatcggcgttcgcggttcgcgtgtcaatgccgtcagcaatgaattgtccggcgagcgcatcgacgttgtcctttggtcgcccgagcctgcccaattcgtcatgagcgcgctctcacccgccgaagtcagccgcatcgtcatcgacgaagacaaacacgccgtcgatgtcatcgttgccgaggaccggctcgcgctcgccatcgggcgcggcggtcaaaacgtgcgccttgcttccgacctgaccggctggcagctcaacatcatgacttccgccgaagcagacgaacgcaatgcggcagaagatgccgccatccgccgcctgtttatgaatcacttgaatgtagatgaagaaaccgccgacgtactggttcaagaaggttttgcaaccttggaagaagtcgcctatgttcctgccgccgaactgcttgccattgaaggatttgacgaagaaatcgtcgatatgctccgcaaccgtgcccgcgatgccatcctgaccatggcgattgctgccgaagaaaaactgggcgaagtgtccgacgatatgcgtaacctcgaaggcgtagatgccgatatgctcctcagccttgccgaagcaggcattaccacccgcgacgacttggcagagcttgccgtggacgaactgattgaaatcaccggtgtaaacgaagaaactgcaaaagccgtcatcctgaccgcacgcgaacactggtttaccgaagacaaa

SEQ ID NO: 29181 - DNA, 2319 bp, Neisseria gonorrhoeae
aaacccgccgagcccaaagaaaaagccgtcaagccgaaacacgagcgaaacggcaaaggcaaagatgccaaaaaaccggcgaaacctgccgcacctgccgtgccgcaacccgtggtcagcgcggaagaacaggcgcaacgcgacgaagaggcgcgccgcgccgccgcattgcgcgcccaccaggaagccctgttgaaagagaaacaggaacgccaggcacgtcgcgaagccatgaaacaacaggcagaacaacaggcaaaagccgcacaggaagccaaaaccggcagacagcgtcccgccaaacctgccgagaaaccgcaggcagccgcaccggccgtcgaaaacaaacctgtcaatccggcaaaagcgaaaaaagaagaccgccgcaaccgcgatgacgaaggtcaaggccgcaacgccaaaggcaaaggtgcaaaaggcgggcgtgaccgcaacaatgcccgcaacggcggcgacgagcgcgtacgcggcggcaagaaaggcaaaaaactcaaactcgagccgaaccaacacgccttccaagcaccgaccgaacccgtcgtacacgaggttttggttcccgaaaccattaccgttgccgatttggcgcacaaaatggcggtcaaaggcgtggaaatggtcaaagccctgatgaaaaagggcatgatggttaccatcaaccaatccatcgaccaagacaccgccctgattgtcgtcaaaaaactcggacacatcggcaaacccgccgccgccgacgatcccgaagccttcttgggcgagggcgcggaagcggaggaagccgaagcattgccgcgtccgcccgtcgttaccgtcatgggccacgtcgaccacggcaaaacctcgctgctggactacatccgccgcgccaaagtggtacagggcgaagcgggcggcattacgcagcacatcggcgcgtaccacgtcaaaaccccgcgcggcgtgattaccttcttggacaccccgggccacgaagcctttaccgctatgcgcgcgcgcggcgcgaaagcaaccgatatcgtgattcttgtggtcgccgccgacgacggcgtgatgccgcaaaccatcgaggcaattgcccacgctaaagcggcaggcgttccgattgtggttgccgtcaataaaatcgataaagacactgccaaccccgaacgcatccgtcaggaactgacccaacacgaagtcatccccgacgattggggcggcacggttcaattcatcgacgtttccgcgaaaaaaggaacgaacatcgacgcgctgctcgaagccgtattgctcgaagccgaagtattggaactgaccgcacctgtcgatgcacccgccaaaggcatcatcgtcgaggcgcgtttggacaaagggcgcggcgcggttgccacattgctggttcaaaacggtacgctgaaaaaaggcgacatgctgctggccggtacggcattcggcaaaatccgcgcgatggtcgatgaaaacggcaaatccattaccgaagccggcccgtccatccccgtcgaaatcctcggcttgtccgacgtaccgaatgcgggtgaagacgcgatggtattggcggacgagaaaaaagcgcgcgaaatcgccctcttccgccaaggcaaataccgcgacgtgcgccttgccaaacagcaggcggcgaagctggaaaatatgttcaacaatatgggcgaaacccaggcccaatctttgtcggtcatcatcaaggcagacgttcagggctcttacgaggctttggcgggcagcctgaaaaaactgtccgccgacgaggtgaaagtgaacgtgttgcacagcggcgtgggcggcattaccgaatcggatgtcaaccttgccatcgcttcgggcgcgttcattatcggctttaacgtgcgtgcagatgcctcttcgcgcaaacttgccgaaaatgaaaacgtggaaatccgctactacaacatcatctacgatgccatcgacgacgtgaaggcggcgatgagcggcatgctttctcccgaaaagaaagaacaggttaccggtacggtcgaaatccgtcaggtcatctccgtttccaaggtcggcaacattgcaggctgtatggtcaccgacggcgtggtcaaacgcgattcccatatccgcctcatccgcaacaacgtggtcatccacacgggcgaactggcttcgttgaaacgctataaagacgacgtaaaagaagtccgcatgggcttcgagtgcggtctgatgctcaaaggctacaacgaaatcatggaaggcgaccaactggaatgcttcgacatcgtcgaagttgcccgcaccctgtaattc

SEQ ID NO: 29182 - DNA, 624 bp, Neisseria gonorrhoeae
atgtatgcaggcgaacgcttcaatacttacagccatttgagcggtttgattctggcggcggcaggtttgatgctgatgctgctgaaaaccataggacacggggacggctaccgtatcttcagcgtatcggtttacggcatcagccttcttctgctctatttgagttcctcgctgtaccacggaattgcagccggaaaactgaaaagcattttgaaaaaaaccgaccactgcatgatttatgtgctgattgccggaagctacacaccgtttgcactggtttctttgagaaacgggccgggctggacggtattttcactgtcctggctgctggcggctgcaggaatcgcacaagaactcaccatcggacggaaaagcgaaaaacgtctgctgtctattgcgatttatatcgtaatgggctggatggtcttggcggtaatgaaatccctgacagcctcactcccgccggcaggactggcttggctggcggcaggcggtatgctgtacagcgtcggcatttactggtttgtaaacgatgaaaaaatccgacacgggcacggaatctggcatctgttcgtattgggcggcagcataacccaatttgtcagcgtgtacggttatgtaatc

SEQ ID NO: 29183 - DNA, 954 bp, Neisseria gonorrhoeae
  misc_feature (836)..(836): n=g, a, t or c
  misc_feature (847)..(847): n=g, a, t or c
  misc_feature (870)..(870): n=g, a, t or c
ttggctaaagttgcttaattggattggaataattttgttttaaatcgttgcacatttgattggaacggcggaggttgtgcggtcaataaaggtgatgatttcagagctggggcttctttttcccttggccgcaatccgaaatacaaagaagaaatggatgccaaaaagccggaagagattttatcgttgaaagtcgatgccgatcccgacaaatacatagaggcaaccggatatcccggttattccgaaaaagtagaagtcgcacccggaacaaaagtgaatatggggcccgtcacggacaggaacgggaatcccgttcaggttgccgcaacattcggcagggacgcgcaaggcaacaccacggcggatgttcaagtaatcccgcgtcccgacctcacgcccgcaagcgcggaagcacctcacgcacagccgctgcccgaagtatcgcccgcggaaaaccccgcaaacaacccggaccccgatgagaaccccggcacgcgtcccaatcccgaacccgaccccgatttgaatcccgatgcaaatcccgatacggacggacagcccggaacaagccccgattccccggccgttccggaccgcccaaacggcaggcatcgcaaagaaaggaaagaaggcgaagacggcgggctttcgtgcgattattttccggaaatcctagcctgtcaggagatgggcaaaccttcggaccgcatgtttcacgatataagcataccgcaggttacagacgataaaacatggtcttcacataactttttaccgtctaacggcgtatgtccgcagccgaaaacctttcatgttttcggcaggcaatatcnggcaagctatnaaccgttgttgctgtgtttgccnaaaaaatccggtttgccgtactgctcgccctttatcattatgtcggcttttgtcgttttcgggttcgttggggggggaataaat

SEQ ID NO: 29184 - DNA, 1509 bp, Neisseria gonorrhoeae
atgagcgaacaaaaccatccgcaaaccgagccgcagttggacgaaaaccaaatcatcgccctgcgccgcgaaaaactgaacaacatccgccaacagcgcaacgcttatcccaacgatttcaagcgcgacagctttgccgccgatttgcaggcgcaatacggcgaaatcggcaaagaagaactcgacccgcaggccgttcccgttaaaattgccggccgcatgatgctcaaacgtcaaatgggcaaagccagcttcgccaccattcaagacgttaccggtcaaatccagctttatctgaacaacaaaggcgtgagccaagaagttttggacgacttcaaccactgggacttgggcgacatcgtcggtgcggaaggcactttgttcaaaaccaaccacggcgaactaaccgtgcgtgtgtccgacatccgcctgctgtccaaatccctgcgtccgctgcccgacaaacacaaaggcttgagcgatcaggaaaccaaataccgccaacgctacgtcgatttgattgccaatgaagaatcgcgcaatacctttatcaaacgcagccaaatcatccaatctgtgcgtaattttatggtgggcgagcattatctcgaagtcgaaaccccgatgatgcacccgattcccggcggcgcgacagcgaaacccttcgttacccaccacaatgccttggacattccgctctacctgcgcatcgcgcccgagctgtatctgaaacgcttggtggtcggcggcttggaacgcgtgtttgaaatcaaccgcagcttccgtaacgagggcatgtccgtgcgccacaaccccgaatttacgatgattgaattttacgaagccttctccgactacgaacgtatgatgcagatggcggaagacatcatccgcaacgcatcgcgcacggtaaacggcacggcaaacatcacttacaacggcaaagaagtcgatttggaaagcccgttcgaacgtctgaccatcctcgaagccatcaaaaaatacaatccgcactacaccgacgagcagttgaacgatgcggaatggctgaaaaaagaaatcgtcaaacacggcgaaagcctgccgccgtccccgggcatcggcagcctgcaactcgccctgtttgaaggttgcgccgagggcaaactgtggaatccgacctttattgtcgattacccggtcgaagtttccccgttggcgcgcgcttcggatacgaaacaaggtctgaccgaacgcttcgagcttttcgttgtcgggcgcgaactggcaaacggctattccgagttgaacgaccccgaagaccaagccgaacgcttcaaatcgcaagtggcgcaaaaagatgcgggcgacgacgaagccatgcactacgatgccgactacatccgcgcgatggaattcggtttgccgccgaccggcggttgcggcatcggcatcgaccgcttagtgatgctgctgaccgatttgcaaaccatccgcgatgtgattctgtttccgcagatgcgtcccgag

SEQ ID NO: 29185 - DNA, 1251 bp, Neisseria gonorrhoeae
atgtccgaacaacatatttcgacttggaaaagcaagatcaacgcattgggaccggggattatgatggcttcggcggctgtcggcggttcgcacctgattgcctcgacgcaggcgggcgcgctttacggctggcagctcgcgctcatcatcatcctgaccaacctcttcaaatacccgtttttccgcttcagcgcgcattacactctggacacgggcaagagtctgattgaaggttatgccgagaaaagctgcgtttatttgtgggtttttttgattttgtgtatcgcctccgccacgattaacgcgggcgcggtcgccattgtaaccgccgccatcgtcaaaatggcgattccctcgctgatgtttgatgccggcacggttgccgccttgattatggcatcctgcctgattattttggtgagcggacgttaccgcgctttggatcgtgtttccaaaatcatcattgttactttgagcatcgccacgcttgccgccgccggcatcgctatgtcgcgcggtatgcagatgcagcccgattttatcgagccgacaccgtggacgcttgccggtttgggcttcctgatcgcgctgatgggctggatgcccgcgccgatcgaaatttccgccatcaattctttgtgggtaaccgaaaaacaacgcatcaatccttctgaataccgcgacgggattttcgatttcaacgtcggttatatcgccagtgcggttttggctttggttttccttgcactgggcgcgtttgtgcaatacggcaacggcgaagcagtgcagatggcgggcggcaaatatatcgggcaattgattaatatgtatgccgtaaccatcggcggctggtctcgtccgctggtggcgtttatcgcgtttgcctgtatgtacggcacgacgattaccgttgtggacggttatgcgcgtgccattgccgaacccgtgcgcctgctgcgcggcagggataaaaccggcaacgccgagttgtttgcctggaatatttgggtggcgggcagcggtttggcggtgattttctggtttgacggcgcaatggcggaactgctcaaatttgcgatgattgccgcctttgtgtccgcccctgtgttcgcctggctcaactaccgcctcgtcaaaggggacaaacgccacaggcttaccgccggtatgaacgcccttgccattgtcggcctgctctacctggccgggtttgccgttttgttcctgttgaaccttaccggacttttggca

SEQ ID NO: 29186 - DNA, 1056 bp, Neisseria gonorrhoeae
atgcggcctttgaacgtgcagatcaggttgggcaaccttaggcacaattatcggattttgaaggaaatgcacggaggcaagctgttggcggtagtgaaggccgacgcatacggacacggtgcggtcagatgtgctttcgcgctggcagacttggcagacggctttgccgtggcgacaatcgacgagggaatcaggctgcgggagagcggcattacccatccgattgtccttttagaaggcgtatttgaagcatcagagtacgaagcggtcgaacaatactcgctttggccggcagtcggaaaccaatggcagcttgaggctttgctttcccgccattggaaaaaacctgtcaaggtctggttgaaaatggattcgggaatgcaccgtaccggatttttccctcatgattacacttcggcatatgcggcattgaaacagtcggaatatgtggacagtattgtcaagttctcgcatttctcctgtgcggacgaacctgaaagcggtatgacggaaatacagatggaagcattcgatttgggtacgaaagggctggaaggcgaagaaagccttgccaattcggcagctattttgaatatccccgaagcacgcagggattgggggcgcgcgggcttggcgttatacggcatttccccgttcggaggcagcgatgacaggctgaaacccgtgatgaggctttcaacccgtattttcggcgaacgcgttttacagccgcactcccctatcggttatggcgcaacattttataccagtaaatctacgcgcgtcggtctgattgcctgcggttatgcggacggttatccgcgccgcgctccaagcaattcccccgtcgccgtcgacggtaaattgacccgggtcatcggcaggatctctatggatatgatgactatcgagctggacgcttcgcaagaaggtttgggacacgaggtcgaactgtggggcgatacggtcaatatcaataccgttgccgaagcggccggaaccatcccttacgaattgatgtgcaatatcaaacgtgcaaaattcacttatatcgag

SEQ ID NO: 29187 - DNA, 2175 bp, Neisseria gonorrhoeae
atgacacgcttcaaatactccctgctttttgccgccctgctacccgtgtacgcgcaggccgatgtttctgtttcagacgaccccaaaccgcaggaaagcaccgaattgccgaccatcaccgttaccgccgaccgcaccgcgagttccaacgacggctacaccgtttccggcacgcacaccccgttcgggctgcccatgaccctgcgcgaaatcccgcagagcgtcagcgtcatcacatcgcaacaaatgcgcgaccaaaacatcaaaacgctcgaccgcgccctgttgcaggcgaccggcaccagccgccagatttacggctccgaccgcgcgggctacaactacctgttcgcgcgcggcagccgcatcgccaactaccaaatcaacggcatccccgttgccgacgcgctggccgatacgggcaatgccaacaccgccgcctatgagcgcgtagaagtcgtgcgcggcgtggcggggctgccggacggcacgggcgagccttctgccaccgtcaatctggtacgcaaacacccgacccgcaagccattgtttgaagtccgcgccgaagccggcaaccgcaaacatttcgggctgggcgcggacgtatcgggcagcctgaacgccgaaggcacgctgcgcggccgcctggtttccaccttcggacgcggcgactcgtggcggcagctcgaacgcagccgcgatgccgaactctacggcattttggaatacgacatcgcaccgcaaacccgcgtccacgcaggcatggactaccagcaggcgaaagaaaccgcagacgcgccgctcagctacgccgtgtacgacagccaaggttatgccaccgccttcggcccaaaagacaaccccgccacaaattggtcgaacagccgcaaccgtgcgctcaacctgttcgccggcatagaacaccgcttcaaccaagactggaaactcaaagccgaatacgactacacccgtagccgcttccgccagccctacggtgtggcaggcgtactttccatcgaccacagcactgccgccaccgacctgattcccggttattggcacgccgatccgcgcacccacagcgccagcatgtcattgaccggcaaataccgcctgttcggccgcgagcacgatttaatcgcgggtatcaacggctacaaatacgccagcaacaaatacggcgaacgcagcatcattcccaacgccattcccaacgcctacgaattttcccgcacgggcgcctatccgcagccatcatcgtttgcccaaaccatcccgcaatacgacaccaggcggcaaatcggcggctatctcgccacccgtttccgcgccgccgacaacctttcgctgatactcggcggcagatacagccgctaccgcgcaggcagctacaacagccgcacacaaggcatgacctatgtgtccgccaaccgtttcaccccctacacaggcatcgtgttcgatctgaccggcaacctgtcgctttacggctcgtacagcagcctgttcgtcccgcaattgcaaaaagacgaacacggcagctacctgaaacccgtaaccggcaacaatctggaagccgacatcaaaggcgaatggcttgaagggcgtctgaacgcatccgccgccgtgtaccgcgcccgtaaaaacaacctcgccaccgcagcaggacgcgaccagagcggcaacacctactatcgcgccgccaaccaagccaaaacccacggctgggaaatcgaagtcggcggccgcatcacgcccgaatggcagatacaggcaggctacagccaaagcaaaccccgcgaccaagacggcagccgcctgaaccccgacagcgtacccgaacgcagcttcaaactcttcaccgcctaccacttagcccccgaagcccccagcggccggaccatcggtgcgggtgtgcgccggcagggcgaaacccacaccgacccagccgcgctccgcatccccaaccccgccgccaaagcccgcgccgtcgccaacagccgccagaaagcctacgccgtcgccgacatcatggcgcgttaccgcttcaatccgcgcaccgaactgtcgctgaacgtggacaacctgttcaacaaacactaccgcacccagcccgaccgccacagctacggcgcactgcggacagtgaacgcggcgtttacctatcggtttaaa

SEQ ID NO: 29188 - DNA, 528 bp, Neisseria gonorrhoeae
atgaaatttgtcagcgaccttttgtccgtcatcttgttttttgctacttataccgttaccaaaaatatgattgccgctgcggcggttgccttggttgcaggcgtggttcaggcggctttcctgtattggaagcataaaaggctggatacgatgcagtgggtcggactggtgctgattgtcgtattcggcggcgcaaccattgttttgggcgacagccgcttcattatgtggaagccgacagtattgttctggtgcggggcgttattcctgctgggcagccaccttgcgggtaaaaacggcttgaaagcgagtatcggcagggagattcagcttccggatgccgtatggggaaaattgacatatatgtgggtcggttttctgatttttatgggtattgccaactggtttgtgtttactaggtttgaagcgcaatgggttaactataagatgttcggttcgactgcgctgatgctttttttctttattattcagggtatttatctgagtacctatctgaaaaaggaggat

SEQ ID NO: 29189 - DNA, 2411 bp, Neisseria gonorrhoeae
ctgatgacgaaatttacagactgtacgcggtcaaaccgtattcagccgccaacccacaggggatacatcttgcaaaaacaacagacaaatcaaactgattgccgcctccatcgcagttgccgcatcctttcaggcacatgcgcgactgggcggactgaatatccggtccaaccttgacgaacccttttccggcagcattaccgtaaccggcgaagaagccaaagccctgctaggcggcggcagcgttaccgtttccgaaaaaggcctgaccgccaaagtccacaagttggacggcaaagccgtcattgccgtttcttccgcacaggcagtccgcgatcccgtcttggtgttccgcatcggtgcaggcgcgcaggtacgcgaatacaccgccatcctcgatcctgtcggctgctcgcccaaaaccaaatctgcactttcagacggcaagacacaccgcaaaaccgctccgaaagcagagtcccaagaaaatcaaaacgccaaagccctccgcaaaaccgataaaaaagacagcgcaaactcagccgtcaaaccggcgcataacggcaaaacccataccgtccgcaaaggcgaaacgctcaaacagattgccgccgccatccgtccgaaacacctgacgctcgaacaggttgccgatgtgctgctgaaggcaaacccaaatgtttccgcacacggcagactgcgtgcgggcagcgtgcttcacattccgaatctgaacaggatcaaagcggcagcacccaaaaaaatcaaagcggaacaacccaaaccgcaaacggcgaaacccaaagccgaaactgcatccatgccgtctgaaccgtccaaacaggcaacggtagagaaaccgatagagaaacctgtcgaaaaaccggttgaaaaacctgaagcaaaagttgccgcgcccgaagcaaaagcggaaaaaccggccgttcgacccgaacccaaacccgcagtgtccgaaactccggcttcggcgacagaacgccaacccggacctgtacccgctgcaaatactgccgcatcggaaaccgctgccgaatccgcccccccaagaagccgccgcttctgccatcgacacgccgaccgacgaaaccggtaacaccgtttccgaacctgttgcggaaacagccagtgaagttgccgccgaacccgttgccgaacctgtcgaacaggtttctgccgaagaagaaaccgaaagcggactgtttgacggtctgttcggcggttcgtacaccttgctgcttgccggcggaggcacggcattgatcgccctgctgctgctgcttttacgccttgcccaatccaaacgcgcgcgccgtaccgaagaatccgtccctgaagaagagcctgaccttgacgacgcggcagacgacggcataaaaatcacctttgccgaagtcgaaactccggcaacgcccgaacccgctccgaaaaacgatgtaaacgacacacttgccttaggtggggaatctgaagaagagttatcggcaaaacaaacgttcgatgtcgaaaccgatacgccttccaaccgcatcgacttggatttcgacagcctggcagccgcgcaaaacggcattttgtccggcgcacttacgcaggatgaagaaacccaaaaacgcgcggatgccgattagaacgccatcgaatccacagacagcgtgtacgagcctgagaccttcaacccgtacaaccctgtcgaaatcgtcatcgacacgcccgaaccggaatctgtcgcccaaactgccgaaaacaaaccggaaaccgtcgataccgatttctacaacaacctgttctcaaacaaccatatcggcacagaagaaacagcttccgcaaaacctgccgcaccctccggactggcaggcttcctgaaggcttcctcgcccgaaaccatcttggaaaaaacagttgccgaagtccaaacaccggaagagttgcacgatttcctgaaagtgtacgaaaccggtgccgtcgcggaaactgcgcctgaaacgcccgatttcaacgccgccgcagacgatttgtccgcattgcttcaacctgccgaagcaccggccgttgaggaaaatgcagcggaaatcactttggaaacgcctgattccaacacctctgaggcagacgctttgcccgacttcctgaaagacagcgaggaggaaacggtagattggagcatctacctctcggaagaaaatatcccaaataatgcagatacctgtttcccttcggaatctgtaggttctgacgcgccttccgaagcgaaatacgaccttgccgaaatgtatctcgaaatcggcgaccgcgatgccgctgccgagacagtgcagaaattgctggaagaagcggaaggcgacgtactcaaacgtgcccaagcattggcgcaggaattgggtatttgattc

SEQ ID NO: 29190 - DNA, 1536 bp, Neisseria gonorrhoeae
atgaaaatcggtatcccacgcgagtcattatccggcgaaacccgcgtcgcctgcacgcccgccaccgttgccctgctgggcaaactaggctttgaaaccgttgtcgaaagcggtgcaggtttggcggcaagtttggacgatgccgcttaccaaacagcaggcgcaaccgttgccgacaaagcggcggtttgggcctgccctttaatttataaggtcaacgcgccgtccgaaggcgagctgccgctgctcaaagaaggtcaaaccatcgtcagcttcctgtggccgcgccaaaacgaggctttggtcgaggccttgcgcgccaagaaagtcaacgcgctggcgatggacatggttccccgcatttcccgcgctcaggccttggacgctttgtcttcaatggcaaacatcagcggctaccgcgccgtgattgaagccgccaacgccttcggccgtttcttcaccggtcaaatcactgccgccggcaaagtgccgcctgcgcaggttttggtgattggcgccggtgtggcgggtttggcggcaatcggtacggcaaattcgctcggcgcagtggtgcgcgcgttcgatacccgcttggaagtggcggaacaaatcgaatcgatgggcggtaagttcctgaaactcgacttcctgcaagaatcgggcggcagcggagacggctacgccaaagtgatgagcgacgaatttatcgccgccgaaatgaagctctttgccgaacaggcgaaagaagtggacatcatcatcaccaccgccgccattccgggcaaacccgctcccaagctgattaccaaagaaatggtggaaagcatgaaatccggatccgtcatcgtcgatttggcggcgacgggcggcaactgcgaactcacccgaccgggcgaattgtccgtaaccggcaacggcgtgaaaatcatcggctacaccgacatggcaaaccgccttgccggacagtcttcccagctttacgccaccaacttggtgaacctgaccaagctgttaagcccgaacaaagacggcgaaatcacgctggacttcgaagacgtgattatccgcaatatgaccgttacccgcgacggcgaaatcaccttcccgcctccgccgattcaggtttccgcccggccgcagcaaacgccgtctgaaaaagccgcgcctgccgccaagcccgagccgaaacctgttcccctgtggaaaaaactcgcgcccgccgccatcgccgccgtattggtgctgtgggtccgcgcggtcgcacccgcagcattcttgaaccactttatcgtcttcgtcctcgcctgcgtcatcggctaccatgtcgtttggaacgtcagccactcgctgcacacaccgctgatgtcggtaaccaacgccatctccggcatcatcgtcgtcggcgcgctgctgcaaatcggtcagggcaacggcttcgtttcgctgctgtcgtttgttgccatcctgattgccggcatcaatatcttcggcggctttgcggttacacggcgtatgctgaatatgtttaagaaaggg

SEQ ID NO: 29191 - DNA, 409 bp, Neisseria gonorrhoeae
atgcgcttactccatactatagctccgcgtgggcaatctcgaaaaatccctcgattcctaccaaaacgttttgggtatgaaactgctccgccgaaaagactatcccgaaggcagatttacccttgccttcgtcggttacggcgacgaaaccgacagcacggttttggaactgacgcacaactgggatacgaaacgatacgacttgggcgacgcctacggacacatcgcggttgaagtggacgatgcctacgaagcctgcgaacgcgtgaagcggcagggcggaaacgtcgtccgcgaagccggcctgatgaaacacggcacaaccgtgatagccttcgtagaagaccccgacggatgcaaaatcgagttcgttcaaaagaaaagcggcgacgattcggttgcctatgcg

SEQ ID NO: 29192 - DNA, 1062 bp, Neisseria gonorrhoeae
atggcactcgtatccatgcgccaactgcttgaccacgccgccgaaaacagctacggcctgcccgcgttcaacgtcaacaacctcgaacaaatgcgcgccattatggaagccgccgaccaagtcaacgcgcccgtcatcgtacaggcgagcgcaggtgcgcgcaaatacgcgggcgcgccgtttttgcgccacctgattctggcggcagtcgaagaatttccgcacatccccgtcgtgatgcaccaagaccacggcgcatcgcccgacgtgtgccaacgctccatccaactgggcttctcctccgtgatgatggacggctctttgctcgaagacggcaaaaccccttcttcttacgaatacaacgtcaacgccacccgtaccgtcgtcaacttctcccacgcctgcggcgtgtccgtcgaaggcgaaatcggcgtattgggcaacctcgaaaccggcgaagcaggcgaagaagacggagtgggcgcggcaggcaaactctcacacgaccaaatgctcaccagcgttgaagatgccgtgcgtttcgttaaagataccggcgttgacgcattggcgattgccgtcggcaccagccacggcgcatacaaattcacccgtccgcccacaggcgacgtattgcgtatcgaccgcatcaaggaaatccaccaagccctgcccaatacacacatcgtgatgcacggctccagctccgttccgcaagaatggctgaaagtcatcaacgaatacggcggcaatatcggcgaaacctacggcgtgccggttgaagaaatcgtcgaaggcatcaaacacggcgtgcgcaaagtcaacatcgataccgacctgcgcctcgcttccaccggcgcggtacgccgctaccttgccgaaaacccgtccgactttgatccgcgcaaatacttgggcaaaaccattgaagcgatgaagcaaatctgcctcgaccgttatcttgcgttcggttgcgaaggtcaggcaggcaaaatcaaacctgtttcgttggaaaaaatggcaagccgttatgccaagggcgaattgaaccaaatcgtcaaa

SEQ ID NO: 29193 - DNA, 915 bp, Neisseria gonorrhoeae
atggttttggacgggtttgcggcgtattttgacgcttatttggaaaacatcgtgcgcgagggcaagtcggagcacacggttgcggcataccggcgcgatttggaagaactgtttgcactgttggcacaaatgccgtctgaagatgcaggcggcgtgccgcaggacttgtcgcggcgcgattttacggcggcgttgcggcggctgtcgcagcgcggtttggacggtcggacgctggcgcgcaagctgtcggcgtggcggcagtattgcgcctggctggtcaaacgcgggctgatgcgcgccgacccgaccgccgacatcaaaccgccgaagcagcccgagcgcgtacccaaagccctgccgcaggaatggctgaaccggatgttggatttgcccgtggacggcggcgacccgctggcggtgcgcgaccacgcgctgttcgagctgatgtacggcagcggtttgcgcgtgagcgagatacacggcttgaatgcagatgatgtatatttggacgaagcgtgggtacacgttaccggcaaagggcgcaagcagcgtcaggttccgctgaccggcaaaagcgtggaagccttgaaaaactatctgccgctgcgtcagacggcatcggacggcaaagccctgtttaccggcaggaacggcacgcgcctgagccaacgccaaatccaaaaacgcctcgaatcgtgggcggcgcaatacggcgacggcaggcacgtttcgccgcatatgatgcgccacagctacgccggccacctgttgcaggcttcgcgcgacatcagggcggtgcaggagctgctcggacacagcagcctttcgaccacgcagatttataccaagctcgatttcgaccacatcgcccgcctctatgacgaagcccacccgcgcgccaagcggcaggacgaa

SEQ ID NO: 29194 - DNA, 1911 bp, Neisseria gonorrhoeae
atgaacccaagccccctactccacctgattgacagcccgcaagatttgcgccgcctggacaaaaaacagctgccgcgccttgccggcgagttgcgcgcctttctgctggaatctgtcgggcagaccggcgggcatttcgccagcaatctgggtgcggtcgaactgaccatcgccctgcactatgtgtacgacacgcccgaagacaagctggtgtgggatgtcggacaccaaagctacccgcacaaaatcctgacaggcaggaaaaaccagatgcacaccatgcgccaatacggcggtttggcgggttttccgaaacgttgcgagtccgagtacgacgcgttcggcgtggggcattcctccacctccatcggcgcggctttgggcatggcggcggcggacaaactcttgggcggcgaccgccgcagcgtcgccatcatcggagacggcgcgatgacggcggggcaggcgtttgaagccttgaattgcgcgggcgatatggatgtggatttgctggtcgtcctcaacgacaacgaaatgtcgatttcccccaacgtcggcgcgttgcccaaatatcttgccagcaacgtcgtgcgcgatatgcacggactgttgagtaccgtcaaagcgcaaacgggcaaggtattagacaaaatacccggcgcgatggagtttgcccaaaaagtcgaacacaaaatcaaaacccttgccgaagaagccgaacacgccaaacagtcgctgtcgctgtttgaaaatttcggcttccgctacaccggccccgtggacggacacaacgtcgagaatctggtggacgtattgaaagacttgcgcagccgcaaaggccctcagttgctgcacgtcatcaccaaaaagggcaacggctacaaactcgccgaaaacgaccccgtcaaataccacgccgtcgccaacctgcctaaagaaggcggggcgcaaatgccgtctgaaaaagaacccaagcccgccgccaaaccgacctatacccaagtattcggcaaatggctgtgcgaccgggcggcggcagattcccgactggttgcgattacccccgccatgcgcgagggcagcggactggtggagtttgaacaacgattccccgaccgctatttcgatgtcggcatcgccgagcagcacgccgttacctttgccggcggtttggcgtgcgaaggcatgaagcccgtcgtggcgatttattccacctttttacaacgcgcctacgaccaactggtgcacgacatcgccctgcaaaacctgcccgttttgtttgccgtcgaccgtgcgggcatcgtcggcgcggacggtccgacccatgccggcttgtacgatttgagcttcttgcgctgtgtgccgaacatgattgttgccgcgccgagcgatgaaaacgaatgccgcctgctgctttcgacctgctatcaggcggatgcgcccgccgccgtccgctatccgcgcggcacgggtacgggcgcgccggtttcagacggcatggaaaccgtggaaatcggcaagggcattatccgccgcgaaggtgagaaaaccgccttcattgccttcggcagtatggtcgccaccgcattggcggttgccgaaaaactgaacgccaccgtcgccgatatgcgcttcgtcaaaccgatagacgaagagttgattgtccgccttgcccgaagccacgaccgcatcgttacccttgaagaaaacgccgaacagggcggcgcaggcggcgcggtcttggaagtgttggcgaaacacggcatctgcaaacccgttttgcttttgggcgttgccgataccgtaaccgaacacggcgatccgaaaaaacttttggacgatttgggtttgagtgccgaagcggtggaacgccgggtgcgcgagtggctgccggaccgtgatgcggcaaat

SEQ ID NO: 29195 - DNA, 996 bp, Neisseria gonorrhoeae
atgagcagacccgtacccgccgtattcggcagcgtttttcacagtcaaatgcccgtcctcgcctaccgcgaaggcaaatggcagccgaccgaatggcaatcttcccaagaccttacccttgcacccggcgcgcatgccctgcattacggcagcgaatgctttgaaggtttgaaggccttccgtcaggcagacggtaaaatcgtgctgttccgtccgaccgccaatatcgcgcgtatgcggcaaagtgcggacattttgcacctgccgcgccccgaaacccaagcttatctcgatgctttggtcgaactggtcaaacgtgccgccgacgaaattcccgatgcgcctgccgcgctgtacctgcgcccgaccttaatcggtaccgatcccgttatcggcaaggccggttctccttccgaaaccgccctgctgtatattttggcttcccccgtcggcgactatttcaaagtcggctcgcccgtgaaaatcttggtggaaaccgaacacatccgctgcgccccgcatatgggccgcgtcaaatgcggcggcaactacgcttccgccatgcactggttgctgaaggcgaaagccgaatacggcgcaaatcaagtcctgttctgcccgaacggcgacgttcaggaaaccggcgcatccaactttatcctgattaacggcgatgaaatcattaccaaaccgttgacagacgaattcctgcacggcgttacccgcgattccgtgctgactgtcgccaaagatttgggctataccgtcagcgaacgtaatttcacggttgacgaactgaaagctgctgtggaaaacggtgcggaagcgattttgaccggtacggccgccgtcatctcgcccgttacttccttcgtcatcggcggcaaagaaatcgaagtgaaaaaccaagaacgcggctatgccatccgtaaggcgattaccgacatccagtacggtttggcggaagacaaatacggctggctggtcgaagtgtgc

SEQ ID NO: 29196 - DNA, 783 bp, Neisseria gonorrhoeae
atgggttttctgcaaggcaaaaaaattctgattaccggcatgatttccgagcgttccatcgcttacggcatcgccaaagcctgccgcgaacagggcgcggaactggcgtttacctacgttgtggacaaactggaagagcgcgtccgcaaaatggcggcggaattagattccgaactcgtattccgctgcgatgtcgccagcgacgacgaaatcaaccaagtgttcgccgacttaggcaaacattgggatggcttggacggtttggtgcattccatcggcttcgcgccgaaagaagccttgagcggcgacttcctcgacagcatcagccgcgaagcgttcaacaccgcacacgaaatttccgcatacagcctgcccgcattggcaaaagccgcccgtccgatgatgcgcggcaggaactccgccatcgtcgcccttagctacttgggcgcggtacgcgcgattccgaattacaacgtgatgggtatggcaaaagccagccttgaggcaggcatccgctttaccgccgcctgtctgggtaaagagggcatccgctgcaacggcatttccgccggcccgatcaaaacgctcgccgcctccggcatcgccgatttcggcaaactcttgggacacgtcgccgcccacaacccgctgcgccgcaacgttaccatcgaagaagtcgggaatactgccgccttcctgctgtccgacctgtcgtccggcattaccggcgaaatcacttatgttgacggcggttacagcattaatgccttgagcaccgaggga

SEQ ID NO: 29197 - DNA, 819 bp, Neisseria gonorrhoeae
atgtctttgcaaaacattatcgaaaccgcctttgaaaaccgcgcggacatcactccgaccaccgttgcccccgaagtcaaagaagccgtgttggaaaccatccgccaactcgattcaggcaaactgcgcgtcgccgaacgcttgggcgtgggcgagtggaaagtcaacgaatgggcgaaaaaagccgtgttgctgtccttccgcatccaagacaacgaagtcctcaacgacggcgtgaacaaatacttcgacaaagtgccgaccaaatttgccgactggtctgaagacgagttcaaaaacgcaggcttccgcgcagttccgggtgcggttgcccgacgcggcagctttgttgccaaaaacgccgtgctgatgccgtcttacgtcaacatcggcgcatacgtcgacgaaggcgcgatggtcgatacttgggcgaccgtcggctcttgcgcgcaaatcggcaaaaacgtccacttgagcggcggtgtcggcatcggcggcgtactcgaacccctgcaggccgcacccaccatcattgaagacaactgcttcatcggcgcgcgttccgaaatcgtcgaaggcgcgattgtcgaagaaggcagcgtgatttcgatgggcgtgttcatcggtcaatccaccaaaatcttcgaccgtaccacaggcgaaatctaccaaggccgcgtaccggcaggttcggtcgtcgtgtccggcagcctgccttccaaagacggcagccacagcctttactgtgccgtcatcgtcaaacgcgtggacgcgcaaacccgcgccaaaaccagcgtgaacgaactcttgcgcggcatc

SEQ ID NO: 29198 - DNA, 882 bp, Neisseria gonorrhoeae
ttggaagagcttgtcgcacaacgtttccaacgggaaagcgcgttattgttcaacagcggctatcacgccaatctcggtattttgcctgctttgacgacgacgaaaagtttgattttggcagataaattcgttcacgccagtatgattgacggcatccgtttgagccggtgtgcgtttttccgttatcgtcataatgattatgaacatttgaaaaatctgcttgaaaaaaacgtcggaaaatttgaccgcacttttatcgttaccgaatctgttttcagtatggacggcgatgtggcggatttgaaacagcttgtccaattaaaaaaacagtttcccaatacttatctttatgtggatgaagcccacgcaatcggtgtttatgggcaaaacggattggggattgccgaacgggataatctgattgccgagattgatttattggtcggcactttcggtaaagccttagcctcggtgggggcgtatgccgtctgcaaccaagtattgaaagaatgtttgattaatcaaatgcgcccattgattttttcaaccgcattgccgccgtttaatgtggcttggacttattttatttttgaacgattgccgcaattctcaaaagaaagaagtcatcttgagcagttaagcgcatttttacggcgggaagtggcgcatcggacgcaaataatgccgagcgaaacctgtatcgtcccctatattttaggcgggaatgaagccacccttgccaaagcggaatatctgcaaggtcagggttattattgcctgcccatcggaccgccgacagtaccaaaaaacacatccagaatccgcctgtctttaactgccgatatgacaacggatgaagttcggcagtttgcggcgtgcctg

SEQ ID NO: 29199 - DNA, 1239 bp, Neisseria gonorrhoeae
atgagtaaagccgtcaaacgcctgttcgacatcatcgcatccgcatcggggctgattgtcctgtcgcccgtgtttttggttttaatatacctcatccgcaaaaacttaggttcgcccgtcttcttcattcgggaacgccccggaaaggacggaaaaccttttaaaatggtcaaattccgttccatgcgcgacgcgcttgattcagacggcattccgctgcccgatagcgaacgcctgaccgatttcggcaaaaaattacgcgccaccagtttggacgaacttcctgaattatggaatgtcctcaaaggcgagatgagcctggtcggcccccgcccgcttttgatgcagtatctgccgctttacaacaaatttcaaaaccgccgccacgaaatgaaaccgggcattaccggctgggcgcaggtcaacgggcgcaacgcgctttcgtgggacgaaaagttctcctgcgatgtttggtacaccgacaatttcagcttttggctggatatgaaaatcctgtttctgacagtcaaaaaagtcttgattaaagaaggcatttcggcgcaaggggaagccaccatgccccctttcgcggggaatcgcaaactcgccgttatcggcgcgggcggacacggcaaagtcgttgccgagcttgccgccgcactcggcacatacggcgaaatcgtttttctggacgaccgcacccaaggcagcgtcaacggcttccccgtcatcggcacgacgctgctgcttgaaaacagtttatcgcccgaacaattcgacatcaccgtcgccgtcggcaacaaccgcatccgccgccaaatcaccgaaaacgccgccgcgctcggcttcaaactgcccgttctgattcatcccgacgcgaccgtctcgccttctgcaataatcggacaaggcagcgtcgtaatggcgaaagccgtcgtacaggccggcagcgtattgaaagacggcgtgattgtgaacactgccgccaccgtcgatcacgactgcctgcttgacgctttcgtccacatcagcccgggcgcgcacctgtcgggcaacacgcgtatcggcgaagaaagccggataggcacgggcgcgtgcagccgccagcagacaaccgtcggcagcggggttaccgccggtgcaggggcggttatcgtatgcgacatcccggacggcatgaccgtcgcgggcaacccggcaaagccccttacgggcaaaaaccccaagaccgggacggca

SEQ ID NO: 29200 - DNA, 921 bp, Neisseria gonorrhoeae
atgcaatacagcacactggcaggacaaaccgacaactccctcgtttccaataatttcgggtttttgcgcctgccgcttaattttatgccgtatgaaagccatgccgattgggttattaccggcgtgccttatgatatggcggtttcagggcgttccggcgcgcgtttcggtcctgaagccatccggcgcgcctccgtcaacctcgcttgggagcaccgcaggtttccgtggacatttgatgtgcgcgaacgcctgaacattattgattgcggcgacttggttttttcttttggcgacagcagggattttgtcgaaaaaatggaagcgcacgccggcaaattactttctttcggcaaacgctgtttgagtttgggcggcgaccatttcattaccctcccgttgttgcgcgcccacgcccgctatttcggcaaactcgcactgattcattttgacgcgcacaccgacacctacgacaacggcagcgaatacgaccacggcacgatgttttataccgcccccaaggaaggcctcatcgacccgtcccgttccgtacaaatcggcatacgcaccgaacacagtaaaaaattgccttttactgtgttgtccgcccccaaagtcaatgaagacagtgttgaagagaccgtccgtaaaatcaaagaaaccgtcggcaatatgcccgtttacctgactttcgacatagactgtctcgacccgtcgttcgcccccgggaccggtacgcccgtatgcggcggcttgagcagcgacagggcattaaaaatcctacgtgggctgacggatctcgacatcgtcggtatggatgttgtagaagttgccccctcttacgaccaatccgacattaccgctttggccggcgccacaattgccttggaaatgctttaccttcaaggtgcgaaaaaggac

SEQ ID NO: 29201 - DNA, 1107 bp, Neisseria gonorrhoeae
atgttttcggacacaaatatatccatgatggaaaacgccctccgacttgccgctttggggcgtttttccacttcacccaacccgcgcgtcggctgcgttatcgcacacggcagccaaattgtcggacagggcttccacgtcaaagcgggcgaaccccatgccgaagtccacgccctgcgtcaggcgggggaaatggcaaaaggcgcgaccgcctttgttaccctcgaaccgtgcagccattacggacgcacaccgccctgcgccgaagccctgctccgttccggcgtaacacgcgtcgtcgccgccatgcgcgaccccaacccgccggttgcaggcaaagggcttgtcctgctcaaagcagcgggcatcaagacggaatgcggactacttgaaaacaaagcacgcgaactcaaccggggatttttatcgcgcatcgaacgccgccgcccctttgtccgcctcaaatgcgccgtttcgctggacggcaaaaccgccctttcagacggcagcagcttttggattaccggcgaggaagctcgtgccgacgtacaggttttgcgtgccgaaagctgcgcggtgctgaccggcatcggcacggtgttggcagacaatccccggctcaacgtccgcgcttttccaactttgcgccaacccgcacgcatcgttttagacagccgcctgcgcctgcccccgaacagccatttggttaccgacgggcaatctccgacctacatcgccaccttggaacgcgatgaagacaaactccgcccctatcgggaacacgcacacatccgcatcctgatgccgtctgaaacggcagacggcaaaatcgacctgcaccatctgatgcgcctccttgccgacgaaggtttcggcgaaatcatggtcgaagcaggctccgaactcacatccgcatttttggcggaaaatttggcggacgaaatcgtgctgtaccgttcgcccaaaatcctcggcggcggcaaagacctgttttccctgcccgaaaaccgtgccgccctttccgcaccgcccttgtggacacccgtttcaagcgaaatcctcggacacgacatcaaaaccgtgttccggaaaaacggcaacgccttt

SEQ ID NO: 29202 - DNA, 831 bp, Neisseria gonorrhoeae
atggcaatcgttaaaatgaagccgacctctgcaggccgtcgcggcatggttcgcgtggtaacagaaggtttgcacaaaggtgcaccttatgcacccttgcttgaaaagaaaaattctactgccggccgtaacaataatggtcatatcaccacccgtcacaaaggcggcggtcataaacaccattaccgtgttgtagactttaaacgtaacaaagacggcatttctgctaaagtagagcgtatcgaatacgatcctaaccgtactgccttcatcgcactgttgtgctatgcagacggcgagcgtcgttacatcatcgctcctcgcggtattcaagccggtgtcgtattggtttccggtgctgaagctgccatcaaagtaggcaacaccctgccgatccgcaacattcccgttggtacgactatccactgtatcgaaatgaaacccggtaaaggtgctcaaatcgcacgttctgccggtgcttctgcggtattgttggctaaagaaggtgcatacgctcaagtccgtctgcgctctggcgaagttcgtaaaatcaacgtagattgccgtgcgaccatcggtgaagtcggtaacgaagagcaaagcctgaaaaaaatcggtaaagccggtgctaaccgttggcgcggtattcgtccgaccgtacgcggtgttgtcatgaatcccgtcgatcacccgcatggtggtggtgaaggccgtaccggcgaagcccgcgaaccggttagtccatggggtactcctgctaaaggctaccgcactcgtaataacaaacgcacggataatatgattgttcgtcgccgttactcaaataaaggt

SEQ ID NO: 29203 - DNA, 618 bp, Neisseria gonorrhoeae
atggaattgaaagtaattgacgctaaaggacaagtttcaggcagcctgtctgtttctgatgctttgttcgcccgcgaatacaatgaagcgttggttcaccagctggtaaatgcctacttggcaaacgcccgctctggtaaccgtgctcaaaaaacccgtgccgaagtaaaacactcaaccaaaaaaccatggcgtcaaaaaggtaccggccgcgcccgttccggtatgacttcttctccgctgtggcgtaaaggcggtcgcgcgttcccgaacaaacccgacgaaaacttcactcaaaaagtaaaccgtaaaatgtaccgtgccggtatggcgactatcctgtcccaattggcgcgtgacgagcgtttgtttgtgattgaggcgttgactgccgaaactcccaaaaccaaagtttttgccgaacaagtaaaaaatttggctctggagcaagtgctgtttgtaaccaaacggctcgacgagaatgtttacttggcttcacgcaacttgccaaacgtattggttttggaagctcaacaagttgatccttacagcttgctgcgttataaaaaagtaatcatcactaaagatgcggttgcacaattagaggagcaatgggta

SEQ ID NO: 29204 - DNA, 1359 bp, Neisseria gonorrhoeae
atgctgaaaaaagttttaatcgccaaccggggcgaaatcgccttgcgcgtactccgtgcctgccgcgaaatgggcattgccaccgttgccgtgcattccgaaaccgacaaaggcagcctgcacgtcaaactcgccgacgaatccgtgtgcatcggtcctgccgcttctgcgcaaagttatctgaacattcccgccatcattgccgccgccgaagtaacctgcgcggacgctgtccacccgggctacggcttccttgccgaaaacgccgatttcgccgaacaggtcgaacagtccggctttaccttcatcggcccgaaacccgacaccatccgcctgatgggcgacaaagtctccgccaaacacgcgatgatagcggcaggcgtgccctgcgtccccggctctgacggcgcattgcccgacgatgatgccgaaatcctcaaaatcgccgacaaagtcggttatcccgtgattatcaaagcatcgggcggcggcggcgggcgcggtatgcgcgtggtcgagaaaaaagaagacctcctccagtctgtcgaaatgaccaaggctgaagcgggcgcggcgttcggcaacccgatggtttatatggaacgctacctgcaacgcccgcgccacgtcgaaatccaagtgcttgccgacgaacacggcaacgccgtctatcttgccgagcgcgactgttcgctgcaacgccgccaccagaaagtcatcgaggaagcacccgccccgtttatcgatgaaaaggcacgcaaaaaaatcggcaaagcctgtaccgacgcgtgcaaacgcatcggctaccggggcgcgggcacgtttgaatttttatacgaagacggcgaatttttctttatcgagatgaacacgcgcgttcaggtcgagcatccggttaccgaactcattaccggcgtggacatcgtccaagagcaactccgcatcgcatccggcctgccgctgcaatacaaacagaaagacatcaaaatcgaaggccacgccttcgagtgccgcatcaatgccgaagacccgtacaacttcatccccagcccgggcccgattgaaagctgccacctgcccggcggcttcggcatccgcgtggacagccacatctaccaaggctaccgcatcccgccgtactacgacagcctgatcggcaaaatctgcgtacacggcaaaacgcgtgaacaggcaatggcgaaaatgcgcgtcgcactcgccgagctggcggtaaccggcatcaaaaccaatacgccgttgcaccgcgacctgttcgccgatgcgggtttccaagaaggcggagtgagcatccattacctggagcactggctggaagcgcgcaaaaccaaacaggacaaa

SEQ ID NO: 29205 - DNA, 642 bp, Neisseria gonorrhoeae
atgactttaggtctggttggacgcaaagttggtatgacccgcgtgttcgacgagcagggtgtttctgttccggtaaccgttttggatatgtctgccaaccgcgttacacaagtaaaatccaaagatactgacggctataccgccgttcaagttacctttggtcagaaaaaagccaatcgtgtcaacaaagccgaagccggacactttgcaaaagcaggtgttgaagccggtcgcggtttgattgagtttgctttgactgaagaaaaactggctgaattgaaagccggtgacgaaatcaccgtttctatgtttgaagtcggtcaactggtcgatgtaaccggtacctctaaaggtaaaggtttctccggcacgatcaaacgtcataacttcggtgcccaacgtacttcccacggtaactcccgttctcaccgcgttccaggctctatcggtatggcgcaagacccgggtcgcgtgttccccggtaagcgcatggccggccaatacggcaacaccaaagcaactgttcaaaaattggaagttgtccgtgttgatgcagaacgccaactgctgttggttaagggtgctgttccgggtgcggtcaacagcgatgttgtagttcgtcccagcgtgaaagtaggtgcg

SEQ ID NO: 29206 - DNA, 459 bp, Neisseria gonorrhoeae
atggatttgcgcaaattaaaaaaactgattgatttggttgaagaatcgggtatcgccgaaatcgaagtaaccgaaggcgaggaaaaagtccgcattacccgtaccattgcagctgcggcagctcccgtttacgccgcgcccgtacctgccgccgcgccggccgtaacgccggccgccgcacccgttgcggcatccgcgcccgccgccgcgccggccgcccgcgatttgtccgacgctcaaaaatcgcctatggtcggcacgttctaccgcgcgcccggcccgaatgccgccgcatttgtcgaagtcggtcaacaggtcaaagccggcgacacgctgtgcatcatcgaagcgatgaagctgatgaacgaaatcgaagccgaaaaatccggcacggtcaaagaaattctggtcgaaaacggtacgcccgtcgaattcggcgaaccgctcttcatcatcgga

SEQ ID NO: 29207 - DNA, 1186 bp, Neisseria gonorrhoeae
atggctaaggaaaaattcgaacgtagcaaaccgcacgtaaacgttggcaccatcggtcacgttgaccatggtaaaaccaccctgactgctgctttgactactattttagctaaaaaattcggcggcgctgcaaaagcttacgaccaaatcgacaacgcacccgaagaaaaagcacgcggtattaccattaacacctcgcacgtagaatacgaaaccgaaacccgccactacgcacacgtagactgtccgggtcacgccgactacgttaaaaacatgattaccggcgccgcacaaatggacggtgcaatcctggtatgttctgctgccgacggccctatgccgcaaacccgcgaacacatcctgctggcccgtcaagtaggcgtaccttacatcatcgtgttcatgaacaaatgcgacatggtcgacgatgccgagctgttggaactggttgaaatggaaatccgcgacctgctgtccagctacgacttccccggcgacgactgcccgatcgtacaaggttccgcactgaaagccttggaaggcgatgccgcttacgaagaaaaaatcttcgaactggctaccgcattggacagctacatcccgactcccgagcgtgccgtggacaaaccattcctgctgcctatcgaagacgtgttctccattttccggccgcggtaccgtagtcaccggccgtgtagagcgaggtatcatccacgttggtgacgagattgaaatcgtcggtctgaaagaaacccaaaaaaccacctgtaccggcgttgaaatgttccgcaaactgctggacgaaggtcaggcgggcgacaacgtaggcgtattgctgcgcggtaccaaacgtgaagacgtagaacgcggtcaggtattggccaaaccgggtactatcactcctcacaccaagttcaaagcagaagtgtacgtattgagcaaagaagagggcggccgccataccccgtttttcgccaactaccgtccccaattctacttccgtaccactgacgtaaccggcgcggttactttggaaaaaggtgtggaaatggtaatgccgggtgagaacgtaaccattactgtagaactgattgcgcctatcgctatggaagaaggtctgcgctttgcgattcgcgaaggcggccgtaccgtgggtgccggcgtggtttcttctgttatcgcttaa

SEQ ID NO: 29208 - DNA, 2103 bp, Neisseria gonorrhoeae
atggctcgtaagaccccgatcagcctgtaccgcaacatcggtatttccgcccatatcgatgcgggtaaaaccacgacgacagaacgtattttgttctataccggtttgacccacaagctgggcgaagtgcatgacggtgcggctactaccgactacatggaacaagagcaagagcgcggtattaccattacctccgctgccgttacttcctactggtccggtatggcgaaacaattccccgagcaccgcttcaacatcatcgacaccccggggcacgttgactttaccgtagaggtagagcgttctatgcgtgtattggacggcgcggtaatggtttactgtgcggtgggcggtgttcaaccgcaatctgaaaccgtatggcggcaagccaacaaataccaagttccgcgcttggcgtttgtcaataaaatggaccgccaaggtgccaacttcttccgcgttgtcgagcaaatgaaaacccgtttgcgcgcaaaccccgtacctatcgtcattccggtaggcgcggaagacagttttaccggtgttgtcgatttgctgaaaatgaaatctatcatctggaatgaagccgataaaggtacaacctttacctatggcgatattcctgccgaattggtcgaaactgccgaagaatggcgtcaaaatatgattgaagccgcagccgaagccagcgaagaactgatggacaaatacttgggcggtgaagatctggccgaagaagaaatcgtaggcgcgttgcgtcaacgtactttggcaggcgaaattcagcctatgctgtgcggttctgcatttaaaaacaaaggtgttcaacgtatgttggacgcagttgtagaattgctgccagctcctaccgatattcctccggttcaaggtgttaatcctaacactgaagaagccgacagccgtcaagccagcgatgaagagaaattctctgcattggcattcaaaatgttgaacgacaaatacgtcggtcagctgacctttatccgcgtttactcaggcgtagtaaaatccggcgataccgtactgaattctgtaaaaggcactcgcgaacgtatcggtcgtttggtgcaaatgactgccgcagaccgtactgaaatcgaagaagtacgcgctggcgacatcgcagccgctatcggtctgaaagacgttactaccggtgaaaccttgtgtgcggaaagcgcgccgattatcttggaacgtatggaattccccgagccggtaatccatattgccgttgagccgaaaaccaaagccgaccaagagaaaatgggtatcgccctgaaccgcttggctaaagaagacccttctttccgcgttcgtacagacgaagaatccggtcaaaccattatttccggtatgggtgagctgcacttggaaattattgttgaccgtatgaaacgcgaattcggtgtggaagcaaatatcggtgcacctcaagtggcttaccgtgaaactatccgcaaagccgttaaagctgaatacaaacatgcaaaacaatccggtggtaaaggtcaatacggtcacgttgtgattgaaatggaacctatggaaccgggtggtgaaggttacgagtttatcgatgaaattaaaggtggtgtgattcctcgcgaatttattccgtctgtcgataaaggtatccgcgatacgttgcctaacggtatcgttgccggctatcctgtagttgacgtacgtatccgtctggtattcggttcttaccatgatgtcgactcttcccaattggcatttgaattggctgcttctcaagcgtttaaagaaggtatgcgtcaagcatctcctgccctgcttgagccgattatggcagttgaagtggaaactccggaagaatacatgggcgacgtaatgggcgacttgaaccgccgtcgcggtgttgtattgggtatggatgatgacggtatcggcggtaaaaaagtccgtgccgaagtacctctggcagaaatgttcggttactcgaccgacctgcgttctgcaacccaaggccgcgctacttactctatggagttcaagaaatattctgaagctcctgcccacatagctgctgctgtaactgaagcccgtaaaggc

SEQ ID NO: 29209 - DNA, 1038 bp, Neisseria gonorrhoeae
atggatatttcagattttgactttaccctgcccgaacacctgattgcccagcatccgcccgaggtgcgcggcagcagccggcttttggtcgcgctgtccgatatgccgctgcaagaccgggtgtttggcgatttgcccgattatgtcgaggcaggcgacgttttggtattcaacaacaccaaagtcatgaaggcgcggctgtttgggcagaaagacagcggcggcaggatcgaagccctgattgagcgtgtgttggacaaccataccgcattggcgcacatccgttcgtccaagtcccccaagcccggtatggggctggtgtttgaaggcggtatccgtgccgtgatggtcgggcgtgagggcgaactgttctgcctgcgttttgaaggcggtcaaaccgtttacgaacttttggaacagaacggacacctgcccctgccgccttatatcgaacgtgccgccgatgcggacgacgacagccgttatcaaactgtttatgccaaatatcagggcgcggtcgccgcgccgacggcgggcctgcattttacggaagaacttttgcgccgtctgaaagacaaaggcgcggtaaccgcagaagtaaccctgcacgtcggtgcggggacattccaacccgtgcgcgtcgataaaatcgaagaacacaaaatgcacagcgaatggtttgaagtgccgtctgaaaccgtcgccgccgttgaggcggcaaaagcccgggggaacaaagcctgggcggtcggcacgacttccatgcgcgccctcgagtctgccgcgcgcgcaacgggatatttgaaagacggacagggcgacaccgatattttcatcacgccgggctaccgttttaatgttgtcgacaggctggttaccaattttcatctgccgaaatcgacgctgctgatgttggtcggcgcgttttcgggtatgggtcatatccgcgccgtgtaccgtcatgcgattgaacgtgaataccgtttcttcagctacggagatgcgatggttttggggcggaacgaagggggcgggctt

SEQ ID NO: 29210 - DNA, 468 bp, Neisseria gonorrhoeae
atgccaagacgtagagaagtccccaagcgcgacgtactgccagatcctaaattcggtagcgtcgagttgaccaaattcatgaacgtattgatgattgacggtaaaaaatccgttgccgagcgtatcgtttacggtgcgttggaacagattgagaaaaaaaccggcaaagcagcaatcgaagtatttaacgaagccattgcaaactccaaacctatcgtggaagtgaaaagccgccgtgtaggtggtgcaaactaccaagttcctgttgaagttcgtccttcacgccgtctggctttggcaatgcgttgggttcgcgacgcggcccgcaaacgtggtgagaaatccatggatctgcgtttggcaggcgagttgattgatgcgtccgaaggccgtggcggtgcgttgaaaaaacgtgaagaagtacaccgtatggctgaagccaacaaagcattctctcacttccgtttc

SEQ ID NO: 29211 - DNA, 972 bp, Neisseria gonorrhoeae
atgctcgagaatctgccctatttccagcgacatctgcctgaagaccttgccaaagtcaatgaagtcatcaaccgtgcggtgcaatccgatgtcgcactgatttcgcaaatcggtacatatatcatcagcgcgggcggcaaacgcctgcgtccgattatgacgattttggcgggtaaggcggtcggttatgatgacgagaaactgtattcgctggcagcgatggtcgagtttatccacacttccacactcctgcacgacgatgtcgtcgatgaaagcgatttgcgccgtgggcgggcaacggcaaacaatctgttcggcaatgcggcggcagtgttggttggcgactttttatatacccgtgcatttcaactgatggttgcctcgggcagtatgcgcgttttggaagtgatggcggatgcgaccaacatcattgccgagggagaggtcatgcagctgatgaacatcggcaatacggacattaccgaagaacaatatatccgagtcatccaatataaaacggcaaaattgtttgaagctgccgctcaagtcggcgcaattttgggcaaagcttcccccgggcacgaacaggccttgaaagactacggtatgtacgtcggtacggcattccagattattgacgatgtgctggattattcgggggaaaccgaagaaacaggtaaaaacgtcggcgacgatttggcggaaggaaaaccgaccctgcctttgatttatctgatgcgtcagggttccgaacaggttgcgaacgatgtgcgtactgctttggaaaatgcagatcgcggctattttgaaaaaatccgcgattatgtcgtccgttcggatgctttggcatattcgataggcgaggcgcgcaaagcagtcgattgtgccgttgccgcgttggatgccctgtccgacagcgaagtgaaggatgctatgattcagctggcgaaggaatctttggtcagggtgtcg

SEQ ID NO: 29212 - DNA, 3213 bp, Neisseria gonorrhoeae
atgcccaaacgtaccgacctaaaatccatccttatcatcggcgccggccctatcgttatcggtcaggcctgcgaatttgactattcgggcgcacaggcctgcaaggctttgcgtgaagaaggctataaagtcattctggtgaattccaaccccgccacgatcatgaccgaccccgaaatggcggatgttacctacatcgagccgattatgtggcagacggtggagaagattatcgccaaggagcggcccgatgcgattctgcccacgatgggcggtcagaccgcgctgaactgtgcgctggatttggcgcgtaacggcgtgctggcgaaatataatgtcgagttaatcggcgcaacggaagacgcgatcgacaaggcggaagaccgcggccgctttaaagaagcgatggaaaaaatcggcctctcttgcccgaaatcttttgtctgccacaccatgaacgaagccttggcggcgcaagaacaggtcggctttccgacgctgattcgtccgtctttcacgatgggcggttcgggcggcggcattgcctacaataaggatgagtttttggcgatttgcgaacgcggtttcgatgcgtcgcctacgcatgagctgctgattgagcagtctgtgctcggctggaaagagtacgagatggaagtggtgcgcgataaggcggacaactgcatcatcatctgttcgattgaaaacttcgacccgatgggcgttcatacgggcgactcgattacggttgcgccggcgcaaacgctgacggacaaggaataccaaatcatgcgcaacgcttcgttggcggtattgcgcgaaatcggcgtggacacgggcggctcgaacgtgcagtttgcggtgaaccctgaaaacggcgagatgattgtgatcgagatgaacccgcgtgtgagccgttcgtccgcgctggcttccaaagcaacgggcttcccgattgcgaaggtggcggcgaagctggcggtcggctttacgctggacgagttgcgcaacgacatcaccggcggccgcacgcccgcgtcgttcgagccttccatcgactatgtggtaaccaaaatcccgcgtttcgcgtttgaaaaattccccgccgcagacgaccgcctgaccacgcagatgaaatctgtgggtgaagtaatggcgatgggccgtaccattcaggaaagcttccaaaaagccctgcgcggtttggaaaccggcttgtgcggtttcaatccgcgcagcgaagacaaagcggaaatccgccgcgaactggccaaccccggccccgaacgtatgctgtttgtggcagacgcgttccgcgcgggcttcacgccggaagaaatccacgagatctgcgccatcgacccttggttcttggcgcaaatcgaagacttgatgaaggaagaaaaatcggtttcagacggccagttgcaagatttggattacgccgccctacgccgtctgaaacgcaaaggcttctccgacaaacgtttggcacaattgttgaacgtaagcgaaaaagaagttcgcgaacaccgctacgcgctgaagctgcatccggtttacaaacgcgtcgatacctgcgccgccgagttcgccaccgaaaccgcctatctttactccacttacgaagaagaatgcgaatcccgtccttccgaccgtaaaaaagtgatgattctcggcggcggcccgaaccgcatcggtcagggcatcgagtttgactactgctgcgttcacgccgcactcgccctgcgcgaatcgggctttgaaacgattatggtcaactgcaaccccgaaaccgtgtccaccgacttcgacaccagcgaccgcctctatttcgagccgctgacattggaagacgtgttggaaatcgtccgcaccgaaaacccgtggggcgtgattgttcattacggcggtcaaaccccgctgaaactcgccaacgcattggttgaaaacggcgtgaacatcatcggcacatccgccgacagcatcgatgccgccgaagaccgcgaacgcttccaaaaagtgttgaacgacttaggcctgcgccaaccgcccaaccgcatcgcccacaacgaagaagaagcactcgtcaaagccgaagaaatcggttatccgctggtcgtgcgcccgtcttatgttttgggcggccgcgccatgcagattatccactccgccgagcagttgcaaaaatatatgcgcgaagccgtgcaggtttccgaagacagccccgtgctgctcgatttcttcctcaacaacgcgattgaagtcgatgtggactgcgtttcagacggcaaagatgtggttatcggcggcatcatgcagcacgtcgaacaggcgggcatccactccggcgactccggctgctcgctgccgccctactccttaagcgaagaaatccaagacgaaatccgccgccaaaccaaagcgatggcgtacgcgctgggcgtggtcggactgatgaacgtgcagtttgccgtgcaggacggcgtggtgttcgtgttggaagtgaacccgcgcgccagccgtaccgtcccctttgtctccaaagccaccggcgtgccgctcgccaaagtcggcgcgcgctgcatggcaggcatttccctgaaagaacaaggcgtggaaaaagaagtcgtccccgatttctatgccgttaaagaagccgtgttcccattcatcaaattcccgggcgtggatacgattttgggtccggaaatgcgctccaccggcgaagtgatgggcgtgggcgcaagtttcggcgaagcctactacaaagcccaactcggcgcgggcgaacgcctcaacccgaccggcaaaatcttcctctccgtgcgcgaagaagacaaagaacgcgtcattaaaaccgccaaaaacttccaagccttaggctacggcatctgcgccacgcgcggcacggcgcaatacctgaccgaacacgggctgattgtgcaggccatcaacaaagtccccgaaggccgcccgcacatcggcgacgcgctgaaaaacggcgaaatcgcactggtcgtaaataccgtttccagcgatccgcaatccgtgtccgacagccacatcatccgccaaagcgcattgcagcaacgcgtgccgcaatacaccaccaccgccggcggcgaagcgatgagcgaaggcgcgaaaagccgggattatctgggtgtgtacagcgttcaagagctgcacggtcgtttgaaaaaccgcaac

SEQ ID NO: 29213 - DNA, 369 bp, Neisseria gonorrhoeae
atgccaactatcaaccaattggtacgcaaaggccgtcaaaagcccgtgtacgtaaacaaagtgcccgcactggaagcctgcccgcaaaaacgcggcgtgtgcacccgtgtatacacgactacccctagaaaacctaactctgcattgcgtaaagtatgtaaagtccgcctgaccaacggttttgaagtcatttcatatatcggcggtgaaggccacaacctgcaagagcacagcgtcgtactgattcgcggcggccgtgtaaaagacttgccgggtgtacgttaccacactgtacgcggttctttggatactgcaggtgttaaagaccgcaaacaagcccgttctaaatacggtgctaagcgtcctaaa

SEQ ID NO: 29214 - DNA, 342 bp, Neisseria gonorrhoeae
gtgcggatattaaccataacccttatggagttgagtatgtacgcggtcgtaaaaaccggcggcaaacagtataaagtttccgtcggcgaaaaattgaaagtagaacagataccagcccaactcgacagccaaatcgaactgaccgaagttttgatgattgctgacggcgaatctgtaaaagttggcgcaccctttatcgaaggtgcaaaagtaacggctaaagtagtggcacacggtcgtggcgaaaaagtccgcatcttcaaaatgcgccgccgcaaacactaccaaaaacgccaaggccaccgccaaaatttcacccaaatcgaaatcgtggcaatcgcc

SEQ ID NO: 29215 - DNA, 1786 bp, Neisseria gonorrhoeae
ggtgattttatgcgtaccaactattgcggcctgatcagcgagcaatacttatgccaaaccgttaccgtcaaaggctgggtacaccgccggcgcgaccacggcggtgtgatttttatcgacctgcgcgaccgcgaaggcatcgtccaagtcgtgatcgatcccgacacgcccgaagcgtttgccgctgccgattccgcccgtaacgaatacgttttgggcattgccggccgcgtacgcaaccgtccgaagcacgaccaacgataaaatgatttccggcaaaatcgagattcttgccaaagaaatcgaagtgttgaacgccgccgctacgccgccgttccaaatcgacgacgaaaacatcagcgaaaacgtgcgcctgaccaaccgcgttatcgacctgcgccgccctgtgatgcagcgcaacctgcgcctgcgttaccaagtcgctacgggcgttcgccgttatctggacgcgcaaggcttcatcgacatcgaaacgccgatgctgacccgctccactccggaaggcgcgcgcgactacctcgtaccgagccgcgttcatccgggcgagtttttcgcgctgccgcaatcgccgcaattattcaaacaactgttgatggtggcgggtttcgaccgttactaccaaatcaccaagtgcttccgtgacgaagacttgcgcgccgaccgccaacctgaattcactcaaatcgacttggaaacctcgttcctgaacgaggatgaaatcatggacatcactgaaggcatggccaaacaagtcttcaaagatgctttgaacgtagatttgggcgacttcccacgcatgccttattctgaagccatgttctactacggctctgacaaaccggacatgcgcatcaacttaaaattcaccgagttgaccgacctgatgaaaacggaagaattcaaagtcttccgtggcgcagccgacatgaaaggcggccgcgtagtcgctctgcgcgtgcctaacggcgccaaattcagccgcaaagaaatcgacgaatacactaaatttgtcggcatctacggcgcgaaaggtctggcatacatcaaagtaaacgatgcgggcaacctctccaacggcgaagacagcggcctgcaatctccaatcgtaaaattcttgtctgaaaacgccctgaaagaaatcatcgagcgtaccgccgcgcaaaacggcgacatcatcttcttcggtgcggacaaagccaaagtcgtgaacgaagccgtcggcgcattgcgtatcaaagtcggcttggaacacggcaaagacaacggctacttcacagacgaatggaaacctttgtgggttgtcgatttcccgatgttcgaatacgacgaagaagccgaccgctacgttgccgtacaccatccgtttaccgctcctaaagaaggtcatgaagacctgatggtttccgatcctgcaaactgcctggcccgtgcctacgatatggtattgaacggctgggaaatcggcggaggctctatccgtatccaccgtgcagacgtacaagggaaagtgtttgccgcgctgaaaatcagccctgaagagcaacaagagaaattcggcttcctcttggacaacctgaaattcggtgcgcctcctcacggcggccttgcattcggcctcgaccgtctggtaacgctgatgaccggtgccgaatccatccgcgacgtgattgccttcccgaaaacacaacgcgcccaatgcctgctgaccgatgcgcccaacagcgtggacgataagcagttgcgtgaattgagcctgcgtctgcgt

SEQ ID NO: 29216 - DNA, 270 bp, Neisseria gonorrhoeae
atggcaagtaaaaaagcaggcggcagcacccgcaacggtcgcgattcagaagccaaacgcttgggcgttaaagcctacggcaacgagctgattcccgcaggttccatcatcgtacgccaacgcggtaccaaattccacgcaggcgacaacgtaggtatgggcaaagaccacactttgttcgccaaaattgacggttatgtcgaattcaaaaccaaaggcgcgctgaaccgtaaaactgtcagcatccgtccttacaccggttctgaagaa

SEQ ID NO: 29217 - DNA, 7277 bp, Neisseria gonorrhoeae
atgaactattcgtttaccgagaaaaaacgtatccgtaagagttttgcaaagcgggaaaatgttttggaagttccttttctactggcaacccaaattgattcttatgcgaaatttttgcagctggaaaatgcttttgacaaacgtaccgatgacggtctgcaagcggcatttaattctattttcccgattgtgagccacaacggttatgctcgtctggagtttgtatattacacgctgggcgagcctttgttcgatatccctgaatgtcaattgcgcggaatcacttatgctgcccctctgcgcgcgcgtatccgtttggtgattttggataaggaagcgtctaaaccgacggtaaaagaagttcgtgaaaacgaagtgtatatgggcgaaattccgttgatgaccccgagcggttcttttgtgattaacggcacagagcgtgtgattgtttcccagttgcaccgttcgcccggtgtgttcttcgagcatgacaaaggtaagacacactcttccggcaaattgttattctccgcccgcatcattccctaccgtggttcatggttggattttgaatttgatccgaaagatttgctgtatttccgtatcgaccgccgccgtaaaatgccggtaacgattttgttgaaggctttgggctacaacaatgagcaaatcttggatattttctacgacaaagaaacgttttatttgtcttcaaacggtgttcaaaccgatttggtcgcaggccgtctgaaaggcgaaactgccaaggtcgatatcttggataaagaaggcaatgtattggttgccaaaggtaagcgcattactgcgaaaaatatccgtgatattaccaatgcaggcctgacccgtttggatgtagaacaggaaagcctgctgggcaaagcattggctgccgatttgattgattcggaaaccggcgaggtattggcttctgccaatgatgaaattacagaagagttgttggccaaatttgatattaacggcgtaaaagaaattacgaccctttacatcaatgagttggatcagggtgcttatatttccaataccttgcgcacggatgagactgccggccggcaggcggcgcgtgttgcgatttaccgtatgatgcgtccgggcgaaccgcccaccgaagaggcggtcgagcaattgtttaaccgcttgttcttcagtgaagacagctacgatttgtcccgcgtaggccgtatgaaatttaatacgcgcacatacgaacaaaaactgtccgaagcccaacaaaactcttggtacggccgcctgttgaacgagacgtttgccggtgctgccgacaaaggcggttatgtcctgagcgtcgaagatattgtcgcctcgattgcgactttggtcgagttgcgtaacggccatggcgaagtggacgatatcgatcacttgggcaaccgtcgagtacggtcggtaggcgagctgactgaaaaccaattccgcagcggtttggctcgtgtggaacgtgccgtaaaagaacgtttgaatcaggcggaatcagaaaacttgatgccgcacgacttgattaatgcgaaacccgtttctgccgccatcaaagaattcttcggctccagccaattgagtcagtttatggatcagaccaatcccttgtctgaagtaacccataaacgccgtgtatctgcattgggtccgggcggtttgacccgcgaacgtgccggcttcgaagtgcgggacgtgcatccgacccactatggacgtgtatgtcctattgaaacgcctgaaggtccgaacatcggtttgatcaactcattgtctgtttacgcgcgcaccaatgattacggtttcttggaaacgccttaccgccgcgttattgacggcaaagtaaccgaggaaattgattacttgtctgccatcgaagaaggccgctatgtgattgcacaggcgaatgccgatttggattcagacggcaatctgattggcgatttggttacctgtcgtgaaaaaggcgaaaccattatggcaacgcccgaccgcgtccaatatatggacgtggcaaccggtcaggtggtatccgttgcggcatccctgattccgttcttggaacacgatgacgcgaaccgcgcattgatgggtgccaacatgcaacgtcaggcagtgccttgtctgcgtcctgaaaaaccgatggtcggtaccggtatcgagcgttccgttgccgttgactctgctactgcaatcgttgcccgccgaggcggcgtggtcgagtatgtcgatgccaaccgcgttgtgatccgtgtccatgacgacgaagcgactgccggtgaagtgggtgtcgatatttacaatttggttaaattcacccgttccaatcaatctaccaacatcaaccaacgtccggctgtcaaagcaggcgatgttttgcaacgcggcgatttggtggccgacggcgcgtccaccgatttgggcgaattggctttgggtcaaaatatgaccatcgccttcatgccgtggaacggttacaactacgaagactcgattctgatttccgaaaaagtggctgcggacgaccgctatacttcgattcacattgaggaattgaatgtcgttgcccgcgataccaagctgggtgcggaagacattacccgcgatattccgaacttgtccgagcgtatgcaaaaccgtttggacgaatccggtatcgtttacatcggtgcggaagtagaagccggcgatgtgttggtaggcaaggtaacgcctaaaggcgaaacccagctgacgccggaagaaaaactgctgcgcgccatcttcggcgaaaaagcgtctgacgtaaaagatacttcattgcgtatgcctaccggtatgagcggtacggttatcgacgttcaagtctttacccgcgaaggcatccaacgcgacaaacgcgcccaatccattatcgattccgagttgaaacgctaccgtttggatttgaacgaccaattgcgtattttcgacaacgacgcattcgaccgtatcgagcgtatgattgtcggtcagaaagccaacggcggcccgatgaagctgaccaaaggcagcgaaatcacgaccgaatatctggcgggtctgccgagcaggcacgattggttcgatatccgtttgaccgatgaagatttggccaagcagttggaactgattaaattgagcctgcaacaaaaacgcgaagaagcggatgagttgtatgagatcaagaagaaaaaactgacccaaggcgacgagctgcaacccggcgtacaaaaaatggtgaaagtctttatcgccatcaaacgccgtctgcaagccggtgacaaaatggcgggccgccacggtaataaaggtgtggtatctcgcattctgcctgtggaagacatgccgtacatggcggacggccgtcctgtggacatcgtactgaacccgttgggcgtaccttcccgtatgaacatcggtcagattttggaagttcacttgggttgggcggcaaaaggtatcggcgagcgcatcgaccgtatgctgaaagagcgacgcaaagccggcgagctgcgcgagttcttgaacaaactctacaacggcagcggtaagaaagaagatttggacagcctgactgatgaagaaatcatcgaattggcttccaatctgcgtaaaggtgcatctttcgcctctcctgtattcgacggtgcgaaagagtctgaaatccgcgaaatgttgaacttggcttacccaagcgaagatcctgaggttgagaaactgggcttcaacgacagtaaaactcaaatcacgctgtatgacggccgttcaggcgaagcatttgaccgcaaggttacagtcggtgtgatgcactatctgaaactgcaccacttggttgacgaaaaaatgcacgcgcgttctaccggcccgtacagtctggttactcaacaacctctgggcggtaaagctcagtttggcggccaacgtttcggtgagatggaggtttgggcattggaagcatacggcgcggcatacacgctgcaagagatgctgactgtgaagtctgacgacgtgaacggccgtaccaaaatgtacgaaaacatcgtcaaaggcgaacacaaaatcgatgccggtatgcccgagtccttcaacgtattggtcaaagagattcgctcactgggtttggatatcgatttggaacgctactgatacgggtttcagacggcataaggggagctgttctgcaggtatgcggggcagcccgacaatgtttaaaaacgaaatgccgtctgaaagcactgtacctttatccatatcgaaaatccgccacgcggtaaaaatatttccttcaaggagcagaaatgaatttgttgaacttatttaatccgttgcaaaccgcaggtatggaagaagagtttgatgccatcaaaatcggtattgcctctcccgaaaccatccgctcatggtcttatggcgaagttaaaaaacctgaaaccatcaactaccgtacgttcaaacccgagcgcgacggcttgttctgcgccaaaatctttggcccggtcaaagactacgaatgcttgtgcggaaaatacaaacgattgaaatttaaaggcgtaacctgtgaaaaatgtggcgtagaagttaccctgtccaaagtgcgccgcgaacgcatgggccatatcgaattggctgcacccgttgcccatatttggttcttgaaatccctgccttcccgcttgggtatggtattgaacatgacgttgcgtgatatcgaacgcgtattgtactttgaagcattcgtggtgaccgatcccggcatgactccgttgcaacgtcgtcaattgctgactgaagacgattactacaacaaactggacgaatacggcgacgacttcgatgccaaaatgggtgcggaaggtatccgcgaattgttgcgaaccttggatgtagcaggcgaaatcgaaatcctgcgccaagagcttgaatcgaccggttctgacaccaaaatcaaaaaaatcgctaaacgcttgaaagtattggaagccttccatcgttccggtatgaagctggagtggatgattatggatgtgctgccggtattgccgcctgatttgcgtccgttggttccgttggacggcggccgttttgccacttccgatttgaacgatttgtaccgccgcgtcatcaaccgcaacaaccgtctgaaacgcctgctggaactgcatgcgcctgacatcatcgtccgcaacgaaaaacgtatgttgcaagaagcggttgattcgctgttggataacggccgtcgcggtaaagccatgaccggagccaacaaacgtccgctgaaatcgttggcagatatgattaaaggtaaaggcggccgcttccgtcaaaacctgttgggcaaacgtgtggactactccggccgttccgtgattaccgtaggcccatacctgcgtctgcaccaatgcggtttgccgaaaaaaatggcgttggaactgttcaaaccatttattttccacaaattggaaaaacaaggtttggcgtctaccgttaaagctgcgaaaaaattggtagaacaagaagtacctgaagtatgggatatcttggaagaagtcatccgcgaacatccgattatgttgaaccgtgcgccgaccctgcaccgtttgggtattcaagcgttcgagcctattctgatcgaaggtaaagcgattcagttgcacccattggtgtgtgccgcatttaatgccgactttgacggtgaccaaatggcagtacacgttccattgagcttggaagcgcaaatggaagcacgcacgctgatgctggcttcaaacaacgtattgtctcctgccaacggcgaaccgattatcgtaccttcccaagacatcgtattgggtctgtactacatgacccgcgaccgtatcaatgccaaaggcgagggcagcctgtttgccgatgtgaaagaagtgcatcgtgcataccataccaaacaggtcgagctgggtacaaaaatcaccgtacgtctgcgcgaatgggtgaaaaacgaagcaggtgagtttgagcctgtcgttaaccgttacgaaacaaccgtcggccgtgcattgttgagcgaaatcctgccgaaaggcctgccgtttgaatatgtcaacaaagcgttgaagaaaaaagaaatttccaagctgattaacgcatcgttccgcctgtgcggcttgcgcgatacggttatcttcgccgaccacctgatgtacaccggtttcggatttgcggcaaaaggcggtatttccattgccgttgacgatatggaaattccaaaagaaaaagcggccttgctggctgaagccaatgccgaagttaaagaaatcgaagaccaataccgtcaaggtttggttaccaacggcgaacgctacaacaaagtggtcgatatttggggtcgtgccggcgataagattgctaaagcgatgatggacaacctgtccaaacaaaaagttatcgaccgtgacggcaacgaagtcgatcaagagtcattcaactccatttatatgatggcggactccggtgcccgtggttctgcggctcagattaaacagttgtccggtatgcgcggtttgatggcgaaacctgacggatcgattattgaaacgccgattacctcaaacttccgcgaaggtctgaccgtattgcaatactttattgcgacccacggtgcgcgtaagggtttggcggataccgcgttgaaaaccgcgaactccggttacctgacccgtcgtctggtggatgtaactcaagacttggtcgttgttgaagacgattgcggtacttcagacggctttgtcatgaaggcagtggtacaaggcggtgatgtgattgaagcattgcgcgatcgtattttgggtcgtgttaccgcgtctgacgttgtcgatccgtcaagcggcgagactttggttgaagccggtacgttgttgactgaaaaactggtggatatgattgaccaatccggtgtcgatgaagtcaaagtccgtactccgattacttgtaaaacccgccacggtctgtgcgcgcactgttacggccgcgacttggcgcgcggcaaactggtcaatgccggcgaggcagtcggcgtgattgcggctcagtctattggtgaaccgggtacccagttgaccatgcgtacgttccacatcggtggtgcggcatcccgtgcggcagcagccagccaagtcgaagccaaatccaacggtacggcacgtttcagcagccaaatgcgttatgttgccaacaacaaaggcgagttggttgtcatcggccgttct

SEQ ID NO: 29218 - DNA, 1182 bp, Neisseria gonorrhoeae
atgagtttacacagcgacatcctcgtcgtcggcgcaggcccggcgggtttaagttttgcagccgaacttgccggcagcggtttgaaagttactctgatcgaacgcagcccactgactgttctgcaaaatcctccctatgacggacgcgaaatcgccctgacccatttttcccgcgaaatcatgcagcgtttgggtatgtgggacaaaattcccgaaaacgaaatctaccccttgcgcgatgccaaagtgctgaacggacgttccgactaccagctccactttccccaaccgactgaagcgcgcggcgagcctgccgactgtttgggctatctgatttccaaccacaatatccgccgcgccgcctatgaagtcgtatcacaactcgacaatgtcagcattctgaccgatacggccgttaaagaagtcaaaacatctgataatgaagcgcaagtctttttggaaaatggagacattctaaccgcgcgtctccttttggcagcagacagccgtttctcacaaacccgccgacaactcggtatttcttcagatatgcacgactacagccgaaccatgttcgtctgccgcatgaaacataccctttccaaccaacataccgcttacgaatgcttccattacggacgcaccatcgcactgctgccactggaaaagcgcctgaccaataccgtcattacagtcgataccgataaaatcaacagcgttcaaaacctttcgcccgaagaattggcggcaagcgtaaaagaacagctcaagggcaggctcggcgacatggaactggtcagcagcatccaccattacccccttgtcggcatgattgccaaacgtttctacggcaaacgcagcgcgctgatcggcgatgcggctgtcggtatgcaccccgtaacggcacacggcttcaacctcgggctttccagcgcggatattctggcaaaactgatactcgaagccgaacagcgcggtcaagacatcggcgcggcttccttgttggaaaaatacagcagcaaacatatgctgcacgcccatccgctttatcacggcaccaatatgatgctgaaactgtttaccaacgaaaccgcgccggcaaaactgttgcgcggtttggtattacgagccggcaacaacttcccgccgctgaaaaagctgattaccaaacaactgaccggt

SEQ ID NO: 29219 - DNA, 369 bp, Neisseria gonorrhoeae
atggctattactaaagaagacattttggaagcagttggttctttgaccgtaatggaattgaatgacctggttaaagcttttgaagaaaaattcggtgtttctgctgctgctgttgcagttgcaggtcctgctggtgccggtgctgccgatgctgaagaaaaaaccgaatttgatgtcgttttggcttctgccggcgatcaaaaagtcggcgtgattaaagttgtccgtgcaattactggtttgggtctgaaagaagctaaagacatcgttgacggcgcacctaaaaccattaaagagggtgtttctaaagctgaagccgaagacatccaaaaacaactggaagcagcaggcgctaaagtcgaaatcaaa

SEQ ID NO: 29220 - DNA, 153 bp, Neisseria gonorrhoeae
atgcgcgataaaatcaaactggaatccggtgcaggtactggccacttctacaccactaccaaaaataaacgcactatgcccggcaaactggaaatcaaaaaattcgatccggttgcccgcaaacacgtagtgtacaaagaaaccaaactgaaa

SEQ ID NO: 29221 - DNA, 261 bp, Neisseria gonorrhoeae
atggcaaacagcgcacaagcacgcaaacgtgcccgccagtccgtcaaacaacgcgcccacaacgctagcctgcgtaccgcattccgcaccgcagtgaaaaaagtattgaaagcagtcgaagcaggcgataaagctgccgcacaagcggtttaccaagagtccgtcaaagtcatcgaccgcatcgccgacaaaggcgtgtttcataaaaacaaagcggctcgccacaaaagccgcctgtctgcaaaagtaaaagcactggct

SEQ ID NO: 29222 - DNA, 231 bp, Neisseria gonorrhoeae
atggcacgagtttgcaaagtgaccggtaaacgcccgatgtccggcaacaacgtatcgcacgccaacaacaaaaccaaacgccgttttttgcccaacttgcaatcacgtcgtttttgggtagaaagtgaaaaccgctgggttcgcctgcgcgtttccaacgctgcattgcgtaccatcgacaaagtaggcattgatgtcgtattggctgatttgcgtgctcgcggcgaagct

SEQ ID NO: 29223 - DNA, 2415 bp, Neisseria gonorrhoeae
atggtaaattattattcagctatgattaaaaagattttaactacttgttttggtttgttttttggtttttgtgtatttggagtgggtctggttgccattgctattttggtaacgtatccgaaactgccgtctttggattctttgcagcattaccagcctaaaatgccgttgactatttattcggcggatggagaagtcatcggtatgtatggggagcagcggcgcgaatttacaaaaatcggcgatttccccgaggtgttgcggaatgcggttattgccgccgaggataaacgcttttaccggcattggggggtggatgtttggggtgttgcccgcgctgccgtcggcaatgtcgtgtccggcagcgtgcagtcgggtgcgagtacgattacacagcaggtggcgaaaaatttttatttgagcagtgaaaaaacgttcacacgcaaattcaatgaggtgttgcttgcctataaaatcgagcagtctttaagcaaagacaaaatccttgagttgtatttcaatcagatttacctcggtcagcgcgcctatggttttgcatctgccgcgcaaatctatttcaataagaatgtccgagatttgactttggcggaagccgccatgcttgcgggactgcccaaggctccgtctgcctataatccgattgttaatccggagcgtgccaagttgcgccagaagtatattttgaacaatatgctcgaggagaagatgattaccgtgcaacagcgcgatcaggcattgaatgaggaactgcattatgagcggtttgttcggaaaatcgatcagagtgctttatatgtggcggaaatggtgcgtcgggaactgtatgagaaatatggtgaagatgcctatacgcagggttttaaggtttataccacggtccgcaccgatcatcagaaggcggcaaccgaggcattgcgcaaggctctacggaatttcgatcgcggcagcagctaccgcggtgcggaaaactatatcgatttgagtaagagtgaagatgtcgaggagactgtcagccagtatctgtcgggactctataccgtcgataaaatggttcccgccgttgtgttggatgttactaaaaagaaaaatgtcgtcatacagctgcccggcggcaggcgggttgcgcttgacaggcgcgccttgggttttgcggcccgagcggtcgataatgagaaaatgggggaggaccgtatccgcaggggcgcggtcatccgtgtcaaaaacaacggcgggcgttgggcggtggttcaagagccgttgctgcagggggctttggtttcgctggatgcaaaaaccggagctgtgcgcgcgctggtcggcggttatgattttcacagcaaaacattcaatcgtgccgttcaggcaatgcggcagccgggttcgacctttaagccgtttgtctattcggcggcattatctaaggggatgaccgcgtccacagtggttaacgatgcgccgatttccctgccggggaaagggccgaacggttcggtttggacacctaaaaattcagacggcagatattccggctacattactttgagacaggctctgacggcttccaagaatatggtttccatccgtattttgatgtctatcggtgtcggttacgcgcaacagtatatccggcgtttcggcttcaggccgtccgagctgccggcaagcctgtctatggctttaggtacgggcgagacgacgccgttgaaagtggcggaggcatatagtgtatttgcgaacggcggatatagggtttcttcgcacgtgatcgataagatttatgacagagacggcaggttgcgcgcccaaatgcaacctttggtggcagggcaaaatgcgcctcaggcaatcgatccgcgcaatgcctatattatgtataagattatgcaggatgtggtccgtgtcggtacggcaaggggggcagctgcgttgggaagaacggatattgccggtaaaacgggtacgaccaacgacaataaagatgcgtggtttgtcggttttaaccctgatgtggttactgccgtatatatcggcttcgacaaacctaagagtatggggcgtgccggctacggcggtacgattgcggtgccggtttgggtggactatatgcgttttgcgttgaaaggaaagcagggcaaagggatgaaaatgcctgaaggtgtggtcagcagcaatggcgaatactatatgaaggaacgtatggtaaccgatccgggcttgatgctggacaacagcggtattgcgccgcaaccttcccgacgggcaaaagaagatgatgaagcggcagtagaaaacgaacagcagggaaggtctgacgaaacgcgtcaggacgtacaggaaacgccggtgcttccgagcaatacggattccaaacagcagcagttggattccctgttt

SEQ ID NO: 29224 - DNA, 621 bp, Neisseria gonorrhoeae
atgagacgattgactttattggcctttgttttggctgccggtgcggtttccgcatctcccaaagcagacgtggaaaaaggcaaacaggttgccgcaacggtttgtgcggcttgccatgcagcagacggtaacagcggcattgcgatgtatccgcgtttggcggcacagcatactgcttacatctatcatcaaactatcggcatccgcgacggcaaacgcacccacggttcggcagctgtgatgaaaccggtggtaatgaatttgagcgatcaggatattttgaatgtatccgcattctatgccaaacagcagcccaaatccggcgaagccaatcctaaggaaaatcccgaattgggcgcgaaaatctatcgcggcggtttgagcgataaaaaagtgccggcgtgtatgtcctgccacggtccgagcggtgcgggtatgccgggaggcggaagcgaaattcaggcttatccgcgtttgggcggccagcaccaggcatatattgttgaacagatgaatgcctacaagtccggtcagcgtaaaaataccatcatggaagatattgcaaaccgtatgtccgaagaagatttaaaagcagttgctaactttatccagggtttgcgt

SEQ ID NO: 29225 - DNA, 498 bp, Neisseria gonorrhoeae
ttgagtctcaatattgaaaccaagaaagtggcggtcgaggaaattagcgcggcaattgctaatgctcaaaccctcgtagtcgctgaatatcgcggtatcagtgtttccagtatgactgagcttcgtgcgaatgcacgtaaagaaggcgtttatttgcgcgttctgaaaaatactctggctcgtcgcgcagtgcaaggtacttcatttgtagaattggccgatcaaatggttggtccgttggtttacgctgcttctgaagatgctgttgctgctgctaaagtgttgcaccaattcgcgaaaaaagatgacaaaattgtcgttaaagccggttcttacaatggcgaagtaatgaatgctgctcaggttgctgagttggcttctattccgagccgcgaagagctgttgtccaaactgttgttcgttatgcaagctcctgtatcgggctttgcgcgcggtttggctgctttggcagagaaaaaagccggcgaagaagctgct

SEQ ID NO: 29226 - DNA, 693 bp, Neisseria gonorrhoeae
atggctaaagtatctaaacgcttgaaagttcttcgctcttctgttgaagctaacaaactgtacgcaatcgacgaagcaattgccttggttaaaaaagctgctaccgctaaatttgacgaatctgttgacgtatctttcaacttgggcgttgattctcgtaaatctgaccaagttatccgtggttcagtcgttctgcctaaaggtactggtaagacaacccgtgtggctgtatttactcaaggtgtaaatgcagaagctgctaaagaggctggtgcggatgtcgtcggtttcgaagatttggctgctgaaatcaaagcaggcaatctgaactttgatgttgttattgcttctcctgatgcaatgcgtatcgttggtcaattgggtaccatcttgggtcctcgtggtctgatgccaaaccctaaaataggtacggttacccctaatgttgccgaagcggtaaaaaatgcaaaagcaggtcaagtgcagtaccgtaccgacaaggcaggtattgttcatgcaacgattggtcgtgcttcattcgctgaagctgatttgaaagagaactttgatgcgttgctggacgctatcgttaaagccaaacctgctgctgctaaaggtcagtacctgaaaaaagttgctgtatccagcactatgggtttaggtgttcgcgttgatacatcaagcgtgaataac

SEQ ID NO: 29227 - DNA, 432 bp, Neisseria gonorrhoeae
gtggcaaagaaaattatcggctatattaaactgcaaattcctgcaggcaaagccaatccatcccccccagttggtcctgctttgggtcaacgtggtttgaatatcatggaattctgtaaagcatttaatgctgcaacccaaggtatggaatctggtttgccaattccggttgtgattactgcatttgcagataaatcattcacatttgtgatgaaaactcctccggcttctattctgttgaaaaaagccgccggtttgcaaaaaggtagttctaatcctctgacaaacaaggtaggtaaattgacccgtgcccagttggaagaaattgctaaaactaaagagcctgatttgactgctgctgacttggatgcggctgttcgtactatagcaggttctgctcgctcaatgggcttggacgtggagggtgttgta

SEQ ID NO: 29228 - DNA, 534 bp, Neisseria gonorrhoeae
atgtcgaaaaaatggtatgttgtacaggcgtattcggggtttgagaagaatgtccaacgaatattggaagagcgaattgcccgtgaggagatgggagattatttcggacaaattctggtgcctgtagagaaagttgttgatatccgcaatggtcgtaagactattagtgaaagaaagtcatatcctggttatgtgttagttgagatggaaatgacagatgactcttggcatcttgtaaaaagcactccccgtgtttctggttttattggagggagggctaatagacccacgccgattagtcagagagaggctgaaattattttacagcaggttcagaccggcatagagaagccgaaaccaaaagttgaatttgaggtcggtcaacaggttcgtgtaaatgaaggaccgtttgcggattttaacggggtggttgaggaggtcaattatgaacggaataagttacgcgtgtctgttcagatatttggtagagaaacacccgttgagctggagttcagccaggttgagaagattaac

SEQ ID NO: 29229 - DNA, 1131 bp, Neisseria gonorrhoeae
atgaacacccccgccctcctcgtcctcgctgacggcagcgtattccacggcacatcaatcggttacgaaggttcggcttccggcgaagtcgtgttcaatacttcgatgaccggctatcaggaaatcctgaccgacccgtcctactgcaaacaaatcgttaccctcacctacccccacatcggcaataccggcaccaacgccgaagatgaagaaagccgcagcgtttacgccgcaggcctgattatccgcgacctgccgctcttgcacagcagcttccgcgcctccgaaagcctgcacgactatttggtacgcaacgaaaccgtcgccatcgccgacatcgacacccgccgcctgaccatgctgttgcgcgaaaaaggcgcgcaaggcggcgcgattctgacaggtgcggatgccaccgttgaaaaagcgcaagaactcatcgccgcgttcggcagcatggtcggcaaagatttggcaaaagaagtttcctgcacggaaacttacgaatggacggaaggcgaatgggaattgggcaaaggtttcgttacccctgacaaacagccttaccacgtcgtcgcctacgatttcggcgtgaaaaccaacatcctgcgtatgctcgcctcgcgcggctgccgcctgaccgtcgtccccgcacaaacgagcgcggaagacgtgttggcactcaatcccgacggcgtgttcctgtccaacggccccggcgaccccgagccttgcacctacgccatcgaagccgtgcaaaaactgatggaaagcggcaaaccgattttcggcatctgcttgggacaccagctcatcagcctcgccatcggcgcgaaaaccctgaaaatgcgcttcagccaccacggtgcgaaccatcctgtgcaagatttggacagcggcaaagtcgtcattaccagccaaaaccacggtttcgccgtcgatgccgacaccctgcccgccaacgcacgcattacccacaaatccttgttcgacaataccttgcaaggcatcgagctgaccgacaaacccgtgttctgtttccaaggacaccccgaagccagcccgggtccgcaagatgtcggctatttgttcgacaaattcattggcaatatgaaggctgcaaaacaagca

SEQ ID NO: 29230 - DNA, 1182 bp, Neisseria gonorrhoeae
atggctaaggaaaaattcgaacgtagcaaaccgcacgtaaacgttggcaccatcggtcacgttgaccatggtaaaaccaccctgactgccgctttgactactattttagctaaaaaattcggcggcgctgcaaaagcttacgaccaaatcgacaacgcacccgaagaaaaagcacgcggtattaccattaacacctcgcacgtagaatacgaaaccgaaacccgccactacgcacacgtagactgtccgggtcacgccgactacgttaaaaacatgattaccggcgccgcacaaatggacggtgcaatcctggtatgttctgctgccgacggccctatgccgcaaacccgcgaacacatcctgctggcccgtcaagtaggcgtaccttacatcatcgtgttcatgaacaaatgcgacatggtcgacgatgccgagctgttggaactggttgaaatggaaatccgcgacctgctgtccagctacgacttccccggcgacgactgcccgatcgtacaaggttccgcactgaaagccttggaaggcgatgccgcttacgaagaaaaaatcttcgaactggctaccgcattggacagctacatcccgactcccgagcgtgccgtggacaaaccattcctgctgcctatcgaagacgtgttctccatttccggccgcggtaccgtagtcaccggccgtgtagagcgaggtatcatccacgttggtgacgagattgaaatcgtcggtctgaaagaaacccaaaaaaccacctgtaccggcgttgaaatgttccgcaaactgctggacgaaggtcaggcgggcgacaacgtaggcgtattgctgcgcggtaccaaacgtgaagacgtagaacgcggtcaggtattggccaaaccgggtactatcactcctcacaccaagttcaaagcagaagtgtacgtattgagcaaagaagagggcggccgccataccccgtttttcgccaactaccgtccccaattctacttccgtaccactgacgtaaccggcgcggttactttggaaaaaggtgtggaaatggtaatgccgggtgagaacgtaaccattactgtagaactgattgcgcctatcgctatggaagaaggtctgcgctttgcgattcgcgaaggcggccgtaccgtgggtgccggcgtggtttcttctgttatcgct

SEQ ID NO: 29231 - DNA, 684 bp, Neisseria gonorrhoeae
atgtacgcattgaccgccgcacagcaacagaaggcactcttccggctggtgcttttccatatcctcatcatcgccgccagcaactatctggtgcagttccccttccggattttcggcatccacaccacttggggcgcgttttcctttcccttcatcttcctcgccaccgacctgaccgtccgcattttcggttcgcacttggcgcggcggattatcttttgggtgatgttccccgcccttttgctttcatacgtcttttccgttttgttccacaacggcagttggacgggcttgggcgcgctgtcccaattcaacacctttgtcggacgcatcgcgctggcaagttttgccgcctacgcgctcggacaaatccttgatattttcgtattcgacaaattacgccgtctgaaagcgtggtggattgccccggccgcatcaaccgtcatcggcaatgcactggacacgttagtattttttgccgttgccttttacgcaagcagcgatgaatttatggcggcaaactggcagggcatcgcttttgtcgattacctgttcaaacttaccgtctgcaccctcttcttcctgcccgcctacggcgtgatactgaatctgctgacgaaaaaactgacggccctgcaaaccaaacaggcgcaagaccgccccgtgccctcgctgcaaaatccg

SEQ ID NO: 29232 - DNA, 810 bp, Neisseria gonorrhoeae
atggaaaatatcggcaggcagcggcccatcggcgtttttgactcgggaatcggcggtttgaccaatgtgcgcgcgctgatggaacggctgccgatggagaacatcatttatttcggcgacacggcgcgcgtgccttacgggacgaaatctaaggcgaccatcgaaaatttctcgatgcagattgtcgattttttattgggacacgatgtcaaggcgatggttatcgcgtgcaacacgattgcggcggttgcggggcggaaaatccgtcaaaagacgggcaatatgcccgttttggacgtgatttccgccggcgccaaagccgcgctggcaacgacgcgcaacaataaaatcggcatcatcgccaccaatacgacagtcaacagcaatgcttatgcgcgcgccatccacagggacaaccccgacacgctcgtccgcacgcaggccgcgccgctgctcgtccctttggtggaggaaggttggttggaacacgaagttacccgcctgaccgtatgcgaatacctcaaaccattgcttgcagacggcatcgatacgctggtgttgggctgcacgcactttcccttgctcaagcccttaatcggcagggaggcgcacaatgtcgcgctggtcgattccgcgattacgacggccgaagaaaccgcacgcgtccttgcacaggaaggattgctcgataccggcaacaacaatcccgactaccgtttttacgtcagcgatattcctttgaaattcagaaccatcggcgagcgttttctgggcaggacgatggagcagattgaaatggtgtctttgggt

SEQ ID NO: 29233 - DNA, 1248 bp, Neisseria gonorrhoeae
atgaccaaactgacacgaagacaaatcatccgccgcaccgccggcacactgttcgccctgagccccatcgcatccgccgttgccaaaacggtacgcgccccgcagtttaccgccgcacggatatggccgtcgcacacctacacccgcctgacgctggaaagcaccgccgcgctcaaataccagcacttcgcgctcgacaacccgggcaggttggtcgtcgatatacaaaacgcaaacatcaataccgtattgcacgggctttcccaaaaagttatggcggacgacccctttatccgcagcatacgcgcgggtcagaacacgccgaccaccgtccgcctcgtcatcgacctgaaacagcccacccacgcacaagtcttcgcgcttccgcccgtcggcggctttaaggaccgcctcgtcgtcgacctctatccgcacgggatggatgccgacgatccgatgatggcgctgctcaacggcagcctgaacaaaaccctgcgcggctctccggaagccgaccccgcccaaaacaccacgccccgacccgggcggggcaaaaacgggcgcagacccgtcatcatgctcgatccgggacacggcggtgaagaccccggcgccgtcagcccgggcggtttgcaggaaaaacacgtcgtcctctccatcgcccgcgaaaccaaaaaacaattggaagccttgggttacaacgtctttatgacgcgcaacgaagacgtgttcatcccattgggcgtgcgtgtcgccaaagggcgcgcacggcgggcggacgtattcgtctccatccacgccgacgctttcaccagcccctccgcgcgcggaacgggggtttatatgctgaacaccaaaggcgcgaccagctctgccgccaaattcttggaacaaacccaaaataatgccgacgcggtcggcggcgtaccgaccagcggcaaccgcaacgtcgataccgccctgctcgacatgacgcaaaccgccacactgcgcgacagccgcaaactcggcaaactggtgcttgaagaattgggcaggctcaaccatctgcacaaaggcagggtggacgaagccaatttcgccgtattgcgcgcacccgatatgccgtctatcctggtcgaaaccgccttcctgtccaatcctgccgaagagaaactgctgggcagcgaatccttccgtcggcagtgcgcccaatccattgcctcgggtgtccaacgctacatcaatacatccgtattgaagcggggt

SEQ ID NO: 29234 - DNA, 2304 bp, Neisseria gonorrhoeae
atggcgaaaaacctcttaatcgtcgaatccccgtccaaagccaaaaccctgaaaaaatatttgggcggcgattttgaaatcctcgcgtcctacggacacgtccgcgacctcgtccccaaaagcggcgcggtcgatcccgacaacggctttgcgatgaaataccaactcatcagccgcaacggcaaacatgtcgatgcgattgttgccgctgccaaagaagccgaaaacatctacctcgcaaccgacccggacagggaaggcgaagcgatttcttggcatcttttggaaatcctcaaatccaaacgcggtctgaaaaacatcaagccgcagcgcgtcgtgttccacgagattaccaaaaacgccgtgctcgatgccgtcgcccatcctcgcgaaatcgaaatggatttggtcgatgcgcaacaagcccgccgcgctttggactatctggtcggtttcaacctctcgccgttgctgtggaaaaaaatccgacgcggtttgagcgcgggccgtgtgcaaagtcccgccctgcggctgatttgcgagcgcgaaaacgaaatccgcgcgtttgaagcgcaggaatattggacggtgcatctcgacagccataaaggccgcagcaagttcaccgccaaactcgcccaatacaacggcgcgaaactcgaacaattcgacctgccgaacgaagccgctcaagccgatgtgttgaaagaactcgaaggcaaagaggccgtcgttaccgccatcgaaaagaaaaagcgcagccgcaaccccgccgcgccgtttaccacatccaccatgcagcaggatgccgtgcgtaaactgggcttcaccaccgaccgcaccatgcgtaccgcccagcagctttacgaaggtatagacgtagggcagggtgccatcggtctgattacctatatgcgtaccgacagcgtgaatttggctgacgaagcgttaaccgaaatccgccattacattgaaaacaaaatcggcaaagaatatctgccgagtgccgccaaacaatacaaaaccaaatccaaaaacgcccaagaagcccatgaagcgatccgcccgacttccgtgtaccgcacgcccgaaagcgtcaaacccttcctgagtgcagaccagttcaaactctatcaaatgatttggcagcgtaccgttgcctgtcagatgacgcccgccaaattcgaccaaaccaccgtcgatattaccgtcggcaaaggcgtgttccgagtaaccggacaagtgcaaaccttcgcaggcttcctcagcgtttacgaagaaagcagcgacgatgaagagagcgaagacagcaaaaaactgcccgaaatgagcgaaggcgacaaattgccggtcgacaaactctacggcgaacaacacttcaccaccccgccgccgcgctacaacgaagccacactggttaaagccctcgaagaatacggcatcggccgcccctcgacctacgccagcattatttctacgctcaaagaccgcgaatacgttacccttgagcaaaaacgcttcatgcccaccgacacaggcgacatcgtcaataaattcctgaccgaacacttcgcccaatacgtcgattaccacttcaccgccaaactcgaagaccagcttgacgaaatcgccgacggcaaacgccgctggattcccgtgatggacaaattctggaaaccgttcatcaaacaagtggaagaaaaagagggcatcgaacgcgccaaattcactacgcaggaacttgacgaaacctgcccgaaatgcggcgaacacaaactgcaaatcaagttcggcaaaatgggccgtttcgttgcgtgtgccggttatcccgagtgcagttacacccgcaacgtcaacgaaaccgccgaagaagctgccgaacgcatcgccaaagcggaagccgaacaggtcgaactcgacggtcgcgaatgccccaaatgcggcggacggctggtgtacaaatacagccgcaccggcagtaaattcatcggttgcgccaactaccccaaatgcaaacacgtcgagccgttggaaaaacccaaagataccggcgtccaatgcccgcaatgcaaaaaaggcaacctcgtcgagcgcaaatcccgctacggcaaactgttttacagttgcagcacctatcccgactgcaactacgccacttggaacccgcccgttgccgaagaatgcccgaactgccattggccggtactggccatcaaaactaccaaacgccggggcgtggaaaaagtctgcccgcaaaaagaatgcggctggaaagaacaaatcgaaccgcctgcaccgcaagag

SEQ ID NO: 29235 - DNA, 375 bp, Neisseria gonorrhoeae
atgatttacggcatcggtacagacatcgtttccctcaagcgcatcatccgcttaaacaaaaaattcggacaggcgtttgcagggcgcatactcactcccgaagagctgcttgaatttccgcaggcgggcaaacccgtcaactaccttgccaaacgctttgccgccaaagaagccttcgccaaagccgtcggcacgggcatacgaggcgcggtttccttctgcaacatcggcatcgggcacgacgcattgggcaagcccgaatttttctacggccccgccctgtccgaatggctggaagaacaaggcatcagccgcgtcagcctgagtatggcggacgaaggcgataccgtgttggcgtttgccgttgccgaaaaa

SEQ ID NO: 29236 - DNA, 1062 bp, Neisseria gonorrhoeae
atgttggtattaggaatcgaatcttcttgcgacgaaaccggcgttgcgctgtacgacaccgaacgaggattgcggtcgcactgcctgcacactcaaatggcaatgcacgcggaatacggcggggtcgtgccggaattggcgagccgcgaccatatccgccgccttgttccgttgactgaaggctgtttggcgcaggcaggcgcatcgtatggcgatattgacgcggttgcctttacgcaggggcccggtttgggcggtgcgctgctggcgggttcgagctacgccaacgcgctggctttagcgttggataagcccgtcatccccgtccatcatttggaaggacatctgctgtcgccgctgttggcggaggaaaaacccgactttccttttgtcgcgctgttggtttcgggcgggcatacgcagattatggcggtcaggggcataggcgattacgagcttttgggcgagagcgtcgatgatgcggcgggcgaggcattcgacaaaacggcgaaactgctgggtttgccgtatccgggcggtgcgaaactgtcggaacttgcggaatcgggcaggcccgaagcgtttgtttttccgcgcccgatgattcattccgacgatttgcagatgagtttttcgggattgaaaaccgctgttttgactgccgttgaaaaagtgcgtgaggcaaacggttcggaaaccatacccgagcaaacccgcaacaatatttgccgtgcgtttcaagatgcggtagtagaagtgttggaggcaaaagtgaaaaaagccctgttgcagacagggttcagaaccgtagtggtcgccggcggggtcggtgcaaaccgcaaactccgtgaaactttcggcaacatgacggtacaaatcccgacccccaaaggcaagccgaaacatccgtccgaaaaagtcagcgtgtttttcccgccgatggcatactgcacggacaacggtgccatgattgcctttgccggtgcgatgcacctgggcaagggcagggaggtcggtgcgttcaacgtccgtccgcgttggtcgttgtccgaaatcgtcaaa

SEQ ID NO: 29237 - DNA, 1167 bp, Neisseria gonorrhoeae
atgagcgaatatctgtttacttccgaatcggtttccgaaggccatccggacaaagtagccgaccaagtatccgatgcgattttggatgccatcttggcgcaagaccccaaagcgcgtgtcgcggcggaaactttggtcaacacaggcttgtgcgtattggcgggcgaaatcaccaccaccgcccaagtggactacatcaaagtcgcacgcgaaaccatcaaacgcatcggctacaactcctccgagctgggctttgacgccaacggctgcgcggtcggcgtgtactacgaccaacaatcccccgacatcgcccaaggcgtgaacgaaggcgaaggcatcgacctgaaccaaggcgcgggcgaccaaggcttgatgttcggctatgcctgcgacgaaaccccgaccctgatgccgtttgccatctattacagccaccgcctgatgcagcgtcaaagcgaattgcgcaaagacggccgcctgccttggctgcgccctgacgcaaaagcccaactgaccgtggtttacgacagcgaaaccggcaaggtgaaacgcattgataccgtcgtcctgtccacccagcacgatcctgccatcagccaggaagaactgagtaaagccgtgattgagcagattatcaagcccgttttgccgcccgaactgctgaccgacgaaacaaaatacctgatcaacccgaccggccgcttcgtcatcggcggcccgcaaggcgactgcggtttgaccggccgcaaaatcattgtcgatacctacggcggcgcggctccgcacggcggcggcgcattctccggcaaagacccgtccaaagtggaccgttccgccgcttacgcctgccgttatgtggcgaaaaacatcgtcgccgcaggcttggcaacccaatgccaaatccaagtttcctacgccatcggcgttgccgaaccgacttcgatttccatcgatactttcggtacgggtaaaatcagcgaggaaaaactgattgcgctggtttgcgaacatttcgacctgcgtcccaaaggcatcgtccaaatgctcgacctcttgcgcccgatttacggaaaatctgccgcctacgggcatttcggccgcgaagaacccgagtttacttgggaacgcaccgacaaagcggcctcattgaaagcggcagcggggctg

SEQ ID NO: 29238 - DNA, 1407 bp, Neisseria gonorrhoeae
atgaatttccccaaaacagcggcctccctgctgctgcttctcgcctccctcgccgcacacgcgctcgataccggccgcattccgcaaaacgaaatcgctgtatatgtccaagagcttgacagcggaaaagtcatcattgaccaccgtgccggcatacccgtcaatcccgcgtccacgatgaagctcgttaccgcgtttgccgccttcaaaaccttcggcagcaattaccgctgggcgaccgagtttaaaagcaacggtacggtaaacgacggcacgcttgacggaaacctgtattgggcgggcagcggcgaccccgttttcaatcaggaaaacctgcttgccgtccaacgccagttgcgcgacaaaggcatccgcaatatcacggggcgcctgatgctcgaccacagcctgtggggcgaagtcggcagtcccgaccattttgaagccgacagcggttcgccgtttatgacgcccccaaatccgactatgctgtctgccggtatggttatggtgcgcgccgaacgcaatgccgccggcagtaccgacatcctcaccgatccgcctttgccgcatatttttgcccaaaacaacttgaaaattaccgcctcccaagctgcctgcccttcggtcaaaaaactgatgcgcgcatctttttcgggcaatacgctgaaattgcgcggcaatattcccgaaagctgtttgggcaagcctgtcggtgtccggatgttcgcgcttgacgaactgatccgccaaagttttaccaaccgctggctgctcggcggcggacggatttcagacggcatcggcatagccgacacaccggaaggcgcgcagacgcttgccgttgcacactccaaaccgatgaaggaaattttgacggacatgaacaagcgttcggacaatctgattgcgcgttccgtcttcctcaaactcggcggcgacggcaaactgcccgccgtttccgaacaggcggcgtctgccgtccggcgagaacttgccgtatcgggcatcgatgttgcggatttggttttggaaaacggttcgggtctgtccagaaaagaaagggtaacggcgagaatgatggcgcaaatgttggaaacggcttatttcagcccgtttgcacaagatttcatcgacacgctgcccatcgccggcacagacgggactttacgcaaccgcttcaaacaaagcggcgggctgttgcgcttaaaaaccggcacgctcaacaatgtccgcgcccttgcaggttattggctgggcgacaaaccgatggcggtggtcgtcatcatcaacagcggccgcgccgtttccctgctgcccgacttggacaacttcgttgccaaaaacatcatctccggcggcgacggctggctggatgcgaaactgatgtgcaaagaacgccgcgcc

SEQ ID NO: 29239 - DNA, 2118 bp, Neisseria gonorrhoeae
atgcgccgcttcctaccgatcgcagccatatgcgccgtcgtcctgctgtacggattgacggcggcgaccggcagcaccagttcgctggcggattatttctggtggatagtctcgttcagcgcaatgctgctgctggtgttgtccgccgttttggcacgttatgtcatattgctgttgaaagacaggcgcaacggcgtgttcggttcgcagattgccaaacgcctttccgggatgttcacgctggtcgccgtactgcccggcttgttcctgttcggcatttccgcgcagtttatcaacggcacgattaattcgtggttcggcaacgacacccacgaagccctcgaacgcagccttaatttgagcaagtccgcactggatttggcggcagacaatgccgtcagcaacgccgttcccgtacagatagacctcatcggcaccgcctccctgtcgggcaatatgggcagtgtgctggaacactacgccggcagcggttttgcccagcttgccctgtacaatgccgcaagcgggaaaatcgaaaaaagcatcaatccgcaccaattcgaccagccgcttcccgacaaagaacattgggaacagattcagcagaccggttcggttcggagtttggaaagcataggcggcgtattgtacgcgcagggatggttgtcggcaggtacgcacaacgggcgcgattacgcgctgttcttccgccagccgattcccgaaaatgtggcacaggatgccgttctgattgaaaaggcgcgggcgaaatatgccgaattgagttacagcaaaaaaggtttgcagaccttttttctggtaaccctgctgattgcctcgctgctgtcgatttttcttgcgctggtaatggcactgtattttgcccgccgtttcgtcgaacccattctgtcgcttgccgagggcgcaaaggcggtggcgcagggtgatttcagccagacgcgccccgtattgcgcaacgacgagttcggacgtttgaccaagctgttcaaccatatgaccgagcagctttccatcgccaaagaagcagacgaacgcaaccgccggcgcgaggaagccgcccgtcactacctcgagtgcgtgttggatgggttgactaccggtgtggtggtgtttgacgaaaaaggccgtttgaaaaccttcaacaaggcggcggaacagattttggggatgccgctcgcccccctgtggggcagcagccggcacggttggcacggcgtttcggcgcagcagtccctgcttgccgaagtgtttgccgccatcggtgcggcggcaggtacggacaaaccggtccaggtggaatatgccgcgccggacgatgccaaaatcctgctgggcaaggcgacggtattgcccgaagacaacggcaacggcgtggtgatggtgattgacgacatcaccgtgctgatacgcgcgcaaaaagaagccgcgtggggtgaagtggcgaagcggctggcacacgaaatccgcaatccgctcacgcccatccagctttccgccgaacggctggcgtggaaattgggcgggaagctggacgatcaggacgcgcaaatcctgacgcgttcgaccgacaccatcatcaaacaggtggcggcgttaaaagaaatggtcgaggcattccgcaattacgcgcgcgccccttcgctcaaactggaaaatcaggatttgaacgccttaatcggcgatgttttggccctgtacgaagccggcccgtgccggtttgaggcggaacttgccggcgaaccgctgatgatggcggcggatacgaccgccatgcggcaggtgctgcacaatattttcaaaaatgccgccgaagcggcggaagaagccgatatgcccgaagtcagggtaaaatcggaaacggggcaggacggacggattgtcctgacggtttgcgacaacggcaagggattcggcaaggaaatgctgcacaatgctttcgagccgtatgtgacggataagccggcgggaacgggactgggtctgcctgtagtgaaaaaaatcattggagaacacggcggccgcatcagcctgagcaatcaggatgcgggtggggcgtgtgtcagaatcatcttgccaaaaacggtagaaacttatgcg

SEQ ID NO: 29240 - DNA, 1257 bp, Neisseria gonorrhoeae
atgagtatggcacttgcccaaaaacttgccgccgacagcattgcggcggttgccgaagggcgcaaccttcaggacgtgttggcgcacatccgcgcggcgcatccgcagctgacggcgcaggaaaacggcgcgttgcaggatatcgcctacggctgccagcgttatttgggcagtttgaaacatatgctcgcgcagatgctgaaaaagcccatcgacaatccgcagctcgaaagcctgcttttggcggcgttgtaccaactgcattacacgcgcaacgcgccccacgccgtggtcaacgaagctgttgaaagcatagccaaaatcgggcgcgggcagtaccgttcgtttgccaacgcggttttgcgccgctttttgcgcgaacgtgaaaaattggcggcttcctgcaaaaaagacgatgtggcgaaacacaacctgccgctgtggtgggtggcttacttgaaaaaccattatccgaaacactggcacaacatcgccgccgcgctgcaatcccatccgccgatgacgttgcgcgtcaaccgccggcacggcaatgccgaaagctatttggaaaaactggtggcggaaggtatcgcggctaaggcgttggacgaatatgcggttacgttggaagaagccgtgccggtaaaccgtctgcccggttttgccgaaggactggtgtcggtacaggacttcggcgcgcagcaggcggcgtatctccttaacccgaaagacggcgaacggattttggacgcgtgcgccgcgccgggcggcaagacggggcatattttggaactggcggactgccgcgttaccgccttggacatcgatgcaggccgtctgaagcgtgtggaggacaatatcgcccgtttgggctttcagacggcatcggcggcgtgtgccgatgcgcgggatttggcggcgtggtatgatggaaagcctttcgacgcaatccttgccgacgtgccgtgcaccgcttccggcgtggcgcggcgcaatcccgacgtgaaatggctgcgccgaccgaccgacgcgctcaaaaccgcccgccagcaggaagccctgctggacgcactttggcaggcgttgaaacagggcggcagaatgctgcttgccacctgttccgtgttcgtcgaagaaaacgacgggcaactgcaaaaattcctcaaccgccatgccgatgccgaaccgatcgaatcgcgggtgcttttaccgaacaaacaccaagatggcttttattacgcgcttattcaaaagcat

SEQ ID NO: 29241 - DNA, 486 bp, Neisseria gonorrhoeae
atgctcaaaataaccataattgcggcgtgtgcggaaaacctgtgcatcggggcgggcaatgctatgccttggcacatccccgaagatttcgcatttttcaaagcctataccttgggcaaacccgtcattatggggcggaaaacgtgggaatccctgcccgtcaaacccctgcccggacggaggaacatcgtcatcagccggcaggcggattattgcgcggcaggcgcggaaacggtggcaagtttggaggtggcattggcattgtgcgccggcgcggaagaagccgtcattatgggcggcgcgcagatatacggacaagcgatgccattagcgaccgatttgcggataaccgaagtggatttgtctgtggaaggagatgcatttttcccagaaatagaccggacgcattggagagaagcagagcggacggaacgccgtgtcagcagcaaaggcgttgcatatacattcgtgcattacctcaaggga

SEQ ID NO: 29242 - DNA, 1335 bp, Neisseria gonorrhoeae
atgttaaaatgcggaacatttgttatcacgcggcacatcccgaggggctgccgccgctttttccaacccaatcaagcaagacaaaccgaaatttatcagataaggggaacggttatgcaacgtcgtattataaccctgctctgcgcggcaggtatggcattctcaacacaaactttggcggcaaatctggaggtgcgcccggatgcgccgcaacgctacacggtcaaacagggcgacaccctgtggggtatttcgggcaaatacctgtacagcccgtggcaatggtgccgcctgtggggcgcgaaccgggatcaaatccacaatcccgacctgatttatccgggccaggtattggtgttgcgctacgttggcggcgaaccgcgcctcggcttggaacagacagacggcatccccgtcgtcaaaatcagtccggataaggaagtgtccggatacggtattcccgccatcgatgtcaacttctaccgcgtctttatgcagcacccgcaaatcgtttcccgcaaagaaaccgctgccgcgccgcgcctgctctcgggcccggaaggcaggctgctgtacaccaaaggcgccagggtttacaccaaaggcctgaaagaaccgggccgttatctgacctaccgaatcaataaaaacatcaccgatccggatacgggtaaattcctcggacaagaagtcgcattcagcggcatcgtgcgctccctcgactataccgactccgccctcgaacaacgctcgaaacaggctgaagaacggctgaaagacaacgaatactacacccgcacccatcctttgattaccccggtgcgcacccgttcgatacagccgctggtggtcgaaaccgccatttccgaaatacagcagggcgactacctgatgaaaatgccggaagacaccgaccgcttcaatatggtgccgcacgaaccgtcccgcccggttcaggcaaaaatcgtttccgtgtttgaaggcgtgggggtcggcggacagttcaaaaccattacgatagacaaaggcggggacgacggtttggacaaaggcgcagttttaagcctttacaaacgcaagaaaacgatgcaggtcaacctctccaacaatttgaccgaagaacctaaaagcagggataccgtcgagctgatttcgacacctgccgaagaagtgggcttggcaatggtttaccacactgcgccgaaactggcttacgccattattttggaaaacatctccgatatttccgaaggcgacaccgccgccaatccgggacgggatttggacaatatgccggatcagggccgcgcccgcgtcgattccgaccctttccaa

SEQ ID NO: 29243 - DNA, 648 bp, Neisseria gonorrhoeae; identical to SEQ ID NO: 28902

SEQ ID NO: 29244 - DNA, 618 bp, Neisseria gonorrhoeae; identical to SEQ ID NO: 28904

SEQ ID NO: 29245 - DNA, 255 bp, Neisseria gonorrhoeae
atgcagaccgttaccatgtacacaggtccgttttgcccctactgcgcgatggcgaaaaggctgctgcacgcggcaggtgtcggacatatcgacgaaatccgtgtcgatgcaagccccgaagcctttgccgaaatgcagcggctttcgggacagcgcagcgtgccgcagattttcatcggcgaaacgcacgtcggaggatttaccgacctctaccgccttcagcaggaaggcgggctggacggactgctgaaccct

SEQ ID NO: 29246 - DNA, 1089 bp, Neisseria gonorrhoeae
atgagtttgaaatgcggcatcgtcggtttgcccaacgtcggcaaatccaccctttttaacgcgctgacccaatcgggcatcgaagcggcaaactatcccttctgcaccatcgaacccaacgtcggcatcgtcgaagtgcccgacccgcgtatggcggagctggcgaaaatcgtcaatccgcaaaaaatgcagcccgccatcgtcgagtttgtcgatattgccggcttggttgcgggcgcgagcaaaggcgaaggcttgggcaaccggttccttgccaacatccgtgaaaccgatgccatcgtcaacgtcgtgcgctgctttgacgacgacaacatcgtccacgtttccggcaaagtcgatccgattgccgacatcgaaaccatcggcaccgaattggcgcttgccgacttggcaagtgtggaaaaagccatcgtccgcgaagaaaaacgcgcccgatcaggcgacaaagacgcgcaaaaactagtcgatttgtgcaaaaaactgctgccgcatctggacgaaggcaaacccgtgcgttccttcggtttggacgcggaagaacgcgcgctgctgaagccgctgttcctgctgaccgccaaacctgcgatgtatgtgggaaacgttgccgaagacggttttgaaaacaacccgcacctcgaccgcctgaaagaattggcggcaaaagaaaacgcccccgtcgttgccgtctgcgccgcgatggagagcgaaatcgccgaattggaagacggtgaaaaagccgaatttcttgccgaaatgggcttggaagaaccgggcttgaaccgcctcatccgcgcgggttacgaccttttgggactgcaaacctacttcaccgccggcgtgaaagaagtccgcgcgtggacgatacacaaaggcgacaccgcgccgcaagccgccggcgtgatccatacggattttgaacgcggcttcatccgcgcccaagtgattgcctacgatgattttgtctcgctcggcggcgaagccaaagccaaagaagccggcaaaatgcgcgtggaaggcaaggaatacgtcgtgcaggacggcgacgtgatgcactttttgtttaacgtg

SEQ ID NO: 29247 - DNA, 370 bp, Neisseria gonorrhoeae
ttctgcctcgccttaggggccgactcaccctacgccgatgaacgttgcgtaggaaaccttgggctttcggcgagcgggcttttcacccgctttatcgctactcatgtcaacattcgcacttctgatacctccagcacactttacaatgcaccttcatcagcctacagaacgctcccctaccatgccggtaaaccggcatccgcagcttcggttatagatttgagccccgttacatcttccgcgcaggacgactcgaccagtgagctattacgctttctttaaatgatggctgcttctaagccaacatcctggctgtctgtgccttcccacttcgtttaccacttaatctatcatttgggaccttagctgg

SEQ ID NO: 29248 - DNA, 1872 bp, Neisseria gonorrhoeae
atgagccaagccttaccctaccgcccggacatcgacacattgcgcgccgccgccgtcttgtccgtcatcgtgttccatatcgaaaaggattggctgccgggcgggtttctcggtgtcgatatattctttgtgatttcaggctttttgatgacggcgatcctccttcgcgaaatgtccggggggcgtttcttcctcaagacattttatatccgccgcatcaaacggattttgcccgcatttttcgccgtattggcggcaacgctggcaggcggcttctttttattcaccaaagatgatttctttcttttgtggaaatccgcgctgaccgccttgggtttcgcctccaacctgtattttgcaagggggaaggattatttcgatcccgcgcaggaagaaaagcccctgctgcacatctggtctttgtcggtcgaagaacaattttactttgtctttccgatattgctgttgcttgtcgcccgcaaaagcctgcgcgtacagttcggcttcctcgccgcattgtgcgccttaagccttgccgcttcctttatgccttccgcgctcgataaatattacctgccccacctgcgcgcctgcgaaatgctggtcggatcgctgaccgccgtgcggatgcggtaccggcaacagcggaatcccgccgtcgggaaacggtatgccgccgtcggcgcattgttttccgcgtgcatactgtccgcctgcctgtttgcctattcggaacaaaccgcctatttcccgggccccgccgctttgattccctgtctggctgttgccgcgctgatttatttcaaccattacgaacacccgcttaaaaaatttttccaatggaaaatcaccgttgccgccggtttgatttcctattcgctttatctgtggcattggccgatattggcctttatgcgctatatcggcccggacaacctgccgccttattcgccggcggcagcgatcgtcctgaccctggcgttttccctgatttcttatcactgcatcgaaaagccgtttaaaaaatggaaaggctcgttcgcacaatccgttttatggatttatgccttgcctatgctcgttttgggcgcgggctcgtttttcgcgatgaggctgccgtttatggcgcaatacgaccgcttggggctgacgcgttccaacacctcctgccacaacaataccggcaaacaatgcctgtggggggatacggaaaaacagccggaactgctggttttgggcgactcccacgccgaccattacaaaacattcttcgatgccgtgggcaaaaaagaaaaatggtccgccactatggtttccgccgacgcctgcgcctatgtggaaggctacgcgtcccgtgtgttccaaaactgggccgcctgccgcgccgtttaccgctatgccgaagaacacctgccccggtatccgaaagtggttttggcgatgcgctggggcagccagatgcccgaaaacagccgctcccttgcctacgatgccggttttttccaaaaattcgaccgtatgctgcacaaactctcatccgaaaaacaagccgtttacctgatggcggacaacttggcttcgtcttacaacgtccagcgcgcctatatcttgtcttcacgcataccgggttgccgccaaacactgcgcccggacgacgaaagcaccctgaaagccaatgcccgcatcagggaattggcagccaaataccccaacgtctatattattgatgccgccgcctatatccccgcagatttccaaatcggcggattgccggtttactcggacaaagaccacatcaacccttacggcggcacagaattggcgaagcgtttttccgaaaaacaaaggtttctcgatacgcgccataaccat

SEQ ID NO: 29249 - DNA, 165 bp, Neisseria gonorrhoeae; identical to SEQ ID NO: 28908

SEQ ID NO: 29250 - DNA, 1293 bp, Neisseria gonorrhoeae
atgagcgtcatccaagacctgcaatcgcgcggccttatcgcgcaaaccaccgacatcgaagccttagacgctttgctgaacgaacaaaaaatcgccctttactgcggtttcgacccgacagccgacagcctgcacatcggacacctgctgcccgtattggcattgcgccgcttccaacaggcggggcatacgccgattgcactggtgggcggcgcgaccggtatgatcggcgaccccagcttcaaagccgccgaacgcagcttgaattccgccgaaaccgttgccggctgggtaggaagcatacgcagccaattaacccctttcttgagctttgaaggcggaaacgccgccattatggcgaacaatgccgactggttcggcagcatgaactgcctcgacttcctgcgcgacatcggcaagcatttctccgtcaacgccatgctgaacaaagaatccgtcaaacagcgcatcgaccgcgacggcgcaggcatttccttcaccgagttcgcctattccctgctgcaaggctacgacttcgccgagttgaacaaacgccacggcgcggttttggaaatcggcggttccgaccagtggggcaacatcaccgccggtatcgacctgacccgccgcctgaaccaaaaacaagtgttcggtctgaccctgcctttggttaccaaatccgacggtaccaaattcggcaaaaccgaaggcggcgcggtgtggctgaacgcgaaaaaaacctcgccgtaccagttctaccagttctggctgaaagtcgccgatgccgatgtgtataaattcctgaaatactttaccttcctgtccatcgaagaaatcggtgtcgtcgaagccaaagacaaggcaagcggcagcaagcccgaagcgcaacgcatcctcgccgaagaaatgacccgcctgattcacggcgaagaagcccttgccgccgcgcaacgcatttccgaaagcctgtttgccgaagaccaaagccggcttaccgaaagcgacttcgagcagctcgccctcgacggcctgcctgcatttgaagtttcagacggcatcaacgccgtcgaagccttggtcaaaaccggcttggcagcgtccaacaaagaagcgcgcggctttgtcaatgccaaagcggttctgctcaacggcaaaccggctgaagccaacaaccccaaccacgccgccgaacgccccgacgatgcctatctgttgataggcgaatacaaacgtttcggcaaatacaccatcctccggcgcggcaaacgcaaccacgcgcttttggtttggaaa

SEQ ID NO: 29251 - DNA, 957 bp, Neisseria gonorrhoeae
atgtccgagtggcggggtttcaaccgaaaaggaaatacaatgaaaatcaggccggggcggcacaacgcgcccgactttccgcacggggccgccgtaaccataggcaatttcgacggcgtacacctcggacacaaacacatcctccaaaaactccgcctcgaagccgacgcacgcggattgcccgtcgtggccgtcgttttcgaaccccaacccaaagaatttttcgcactccgtaccggcaaaaccccgccctgccgtatcagccccctgcgtaccaaactggaattgctggaagggacgggttgcgtcgatgccgcctgggttttgcgtttcgatcggaatttttccgaaatatccgcgcaagcatttatcgaccgcctgctgcgtcaaaccttgaatacgcgctatttgctcgtcggcgatgatttccgtttcggggcggggcgggaaggctgttttgaacttttggcacaacagcccgatatgcagaccgagcgcacgccttctgtcattgtcgaagacatccgcaccagcagtaccgccgtccgccaagccctttcagacggcaaccttgcctatgcgaaaaaacttttggggcacgactacgttttggggggcagggtggtgcacggcagaaaactcgggcgcaccttaaacgccccgaccgccaacatccgactgcccggccaccgttatgcactcggcggcgtgttcgtcgtcgaggcggacggcgcattcggcacgcggcgcggcgtggcgagcttcggcttcaatcccaccgttgatggcggctgttctcaaaagctggaagtccatttgttcgactttcaaggcgatttgtacggacaacggttgaacgtccgcttcctgcacaaactgcgcgacgaggaaaagtttgacggtatggaagaactgaaaaggcggattgaagccgatatggaagccgcaaagtgttgg

SEQ ID NO: 29252 - DNA, 804 bp, Neisseria gonorrhoeae
atgccgacagttttcatctttttgacggcggtttacgcaggattgggtgcatttgcatggcactgccaacagcaggggcgcggccgggattacccgtggaagacggaattgccggttttgggcgcggcattgaccgtccacggcgcggcactgctgatgccggtcattcaagacaaaatcatcattatgggcttcgggtattccggcagcctgattgtttggatgatgctgtttatttattttgccggcagctttttttatccgctgcgcggagtgcagttgctgctgtatccttgcgccgcactgatgctgctgtcaggtttggttttcccgggaaaattctcgggatatgaaattaccgactttccctttatgctgcatatcggcacatcactgcttgcatacgggctgttcggcatcgcaacattattgtccgttttgagcttgctgctgcaccggagcctgcaccgcagaaacttctccaagctcgcaggattcctgccgtcgctgctcagtttggaaaaactcatgttccaggccatgtgggcaggtttcatcctgctgacctattccgtcgtcagcggcacattctttgccgaagccgtattcggcaaacccatgacatttacccataaaaccgtattcggcatattgtcatggctgatttacggaggactgctgctcaaacacagcatgaccgcatggcgcggcaaaaaagccgccgtgtggaccatcatcggatttgtcagccttatgattgcctatatgggcagcaagttcgtattggaaatcattctgaaaaga

SEQ ID NO: 29253 - DNA, 1368 bp, Neisseria gonorrhoeae
atgttagacaatttaaccggccgcttcagcaatgtcttcaaaaacatccgggggcaggccaaactgaccgaagacaatattaaagaagccttgcgcgaagtccgactcgccctgcttgaggcggatgtcgccctgcctgtcgtcaaagagttcgtcaacaacgtcaaagaaaaggccctcggtcaggaagtggcgggcagcctgacgcctgaccaagcctttatcggcgtggtcaaccaagccttagtcgaactgatgggcaaggaaaacaaaacactggatttatcggtttcaccgcctgccatcattttgatggccggtttgcagggtgccggtaagacaacaaccgtcggcaaactcgcccgcctgctgaaaaacgatcagaagaaaaaagttttggtggtatccgccgacgtttaccgccctgccgcgattgaacagctgcgcctgttggccgaacaggtcggcgtagattttttcccatccgataccaaccaaaaaccggttgagattgcaactgccgccgttgattacgccaaaaaacatttttacgatgtattgatggtcgataccgccggccgtttggcaatcgatgaagagatgatgaacgaaatcaaagcgcttcatgcggtggtcaacccggttgaaactttgttcgttatcgatgccatgctgggtcaggatgcggtaaataccgctcaggcatttaatgaagccctgccgctgaacggcgtcgtattgaccaagatggacggcgactcgcgcggcggtgcggcattgtccgtacgccatgtaaccggcaaaccgattaaatttatcggcgtcggcgagaaaatcaacggcctcgaacctttccaccccgaccgtcttgccagccgtatcctcggcatgggcgacgtattgaccctgattgaagacgttcaaaaaggtattgatgaagaagccgccgccaaaatggcgaaaaagctgcaaaaaggcaaaggctttgacctcaatgattttaaagaacaaatccagcaaatgcgcaatatgggcggtttggaaaacctgatgtcgaaaatgccgggcgaactgggtcaaatatcgaaacaaatccccgaaggtacggctgaaaaagcgatgggcaaagtagaagccatcatcaactcgatgacccctaaagaacgcgccaaccctgccctgctcaaagccggccgcaaacgccgtattgcgatgggcgcgggcacgaccgtgcaggaagtgaacaaattgctcaaacagtttgaacaaatgcagcagatgatgaagatgttcagcggcaacggtttgggcaaactgatgcgcttggccaaaggcatgaagggaataaagggaatgtttcccggtctt

SEQ ID NO: 29254 - DNA, 1470 bp, Neisseria gonorrhoeae
atgaaccagacaagccgcgatctgacccgcatcagccacaacaccaaaatcgtcgccacccttgggccgggcagcaacaacgtcgaactgttggaagacatgatccgcgtcggcggcctgaacgtcgtccgcttcaacttcagccacggcacgcccgaattccatcaggaaaacgcccgcatcgtgcgcgaggcggcaaaacgcgccggacaggaaatcgccatcattgccgatctgcagggcccgaaaatccgcgtgggcaaaatcgccggcggcggcatcgaattgaacaaaggcgaaacattggtactcgatgccgcgctcgaaggcgaaggcacgcgcgaggcggtcggtttggactaccgcgacctgcccgacgacgttgccgcaggcgatgtcttgtggctggacgacggcctgctgaccctgaccgtggaatccgtcgaaggcagcaggattatcacaagggtggaaaacagccacatcctgaaaagcaacaaaggcatcaacaaacgcggcggcggtttgtccgcaggcgcgttgaccgaaaaagacttccgcgacctgaaaaccgcgattgccatcggttgcgactacctcgccatcagctttgtgaaatccgccgaagacctgcacatcgcgcgcgccaaagtcgaagaggaaatgaagggcagcactgccgtccgccccggtttggtttccaaaatcgaacgcgtagaagcgattgaaaaccttgatgaaatcatccttgccggcgacggcattatggttgcgcgcggcgacttggcggtcgaagtcggacacgccgccgtccccgccctgcaaaaacggatgatccgccgcgcccgcgagttgcgccgcttcagcattacggcgacgcaaatgatggaatcgatgattaccaaccccgtgccgacccgcgcggaagtcagcgatgtggcaaacgcggtattggacggcaccgatgcggtgatgtgttccgccgaaaccgccgtcggcgcgtatccgtttgaaaccgtcagccaaatggcgattatctgcgcggctgcggaaaaagagcaggattcgctcaacggcgttgccgaacagacggagtatcccgaagccgtcagcaccaacttagcgattgccggcggcgcggtcagcgtggcgcgcgcggttcacgccaaagccatcgtcgccctgaccgaaagcggttcgaccgcctttgaaatcagccgccacaatattaccctgccgattttcgcgctgaccccgagcgtttccgcccaacgccgtatggcgatgtaccggggcgtgcgcccgctgattttggcaaccagcaccgaccacgacacggcgttgaacgaagtcgaaacgatgctggtggaacacaacatcctgcattccggcgaccagtacatcatcaccagcggctcgcaaatgcgcgaatccggttcgaccaatacgctggaagtgctgcgcgtcaaa

SEQ ID NO: 29255 - DNA, 804 bp, Neisseria gonorrhoeae
atgctgcaagcaacaccttctaatcctactgccgctgctcaaatcaaggccgacggacacgccgatgtcaaaggcagcgattggggcgtcggctaccaactggcgtggatgtgggacatcaacgaccgcgcgcgcgtgggcgtgaactaccgttccaaagtttcacacacgctcaaaggcgatgccgaatgggcggcagacggcgcggcggcgaaacaacagtggaatgacaatatgctcacaccgctcggttacacggcgaatgaaaaagccagtgtcaaaatcgtaacgcctgagtctttgtccgtacacggcatgtacaaagtgtccgacaaagccgacctgttcggcgacgtaacttggacgcgccacagccgcttcaataaggcggaactgttttttgaaaaagaaaaaaatattgctaatggcaaaaaatccgaccgcaccaccatcacccccaactggcgcaacacctacaaagtcggcttgggcggttcttatcaaatcagcgaaccgctgcaactgcgcgtcggcatcgcttttgacaaaccgcctgtccgcaacgccgactaccgcatgaacagcctgcccgacggcaaccgcatctggttctccgccggcatgaaataccatatcggcaaaaaccacgtcgtcgatgccgcctacacccacatccacatcaacgacaccagctaccgcacggcgaaggcaagcggcaacgatgtggacagcaaaggtgcgtcttgcgcacgtttcaaaaaccacgccgacatcatcggcctgcaatacacctacaaattcaaa

SEQ ID NO: 29256 - DNA, 882 bp, Neisseria gonorrhoeae
atgagcagcggaaatatccgcatccacagcatgaccggctttgccaacgcggcggcagagtgcggcagcaaacgcatcaacctcgacatccgcgccgtcaaccaccgctttttggacattcaaatcaggatgcccgacgatttgcgccatttggaaaacggcatccgcgagcagatttcatcccatctggcgcgcggcaaagtcgaatgcaaaatccaaattcaagatgcggaaaacggcaatcagtctttggaactgaatcgcgttctggtcggacagcttgccgaaatcaacaaaaacctccgcaaacattatgatttggcaaaactgggcgttgctgatattttgcgctttccgggcgtattggcaagccaaaaggaaaatacggaagcattggcgaaaaccattgtcgaactggccgacaaagcactaaaagactttaccgccgcacgtcggcgtgaagggaaaaaattgggcgaacacctgttacaacgcattaaaaacatggaagaaatcatcgatgctttgagcgaaatcttccccgcgctggtggaagcgcataaagaaaaaatccgcacccgccttgccgaagccgtcggcagcatcgacaacgacaggctgcaacaggaatttgccctctttatccaaaaatccgacatcgacgaagaattcagccgcctgcgcacccacattgccgaagtgcgccgtatcgttaccgaacacaaaggcagcagcggcaaacggttggacttcctgatgcaggaactgaaccgcgaagccaacactttgggcagcaaatccatcgctaccgaatgcacccaagcctcggtcgagctgaaagtcctgatcgaacagatgcgcgaacaggtgcagaatatcgaa

SEQ ID NO: 29257 - DNA, 2780 bp, Neisseria gonorrhoeae
atgaccgattacagtaaaaccgtcaacctgctcgaaagcccgtttccgatgcgcggcaatcttgccaagcgcgagcctgcgtggctgaaaagctggtacgagcaaaaacgttaccaaaaactgcgcgaaatcgccaaaggccgtccgaaattcattctgcacgacggcccgccgtatgccaacggcgacatccatatcggtcatgccgtcaataaaattcttaaagacattattatccgcagcaaaacccaagccggttttgacgcgccttatgtaccgggttgggactgccacggcctgcccatcgaagtgatggtggaaaaactgcacggcaaagatatgcctaaagcccgtttccgcgaattgtgccgcgaatatgccgccgaacagattgcccgtcagaaaaaagactttatccgcttgggcgtgttgggcgactgggacaatccttacttgaccatggatttcaaaaccgaagccgataccgtgcgtatgctcggcgaaatctacaaatccggctatctctaccggggcgcgaaaccggttcaattctgcttggattgcggctcttcgctggcggaagcggaagtggaatacaaagacaaagtatcgcctgcgattgacgttgcctatccgtttaaaaacaccgtcgcgcttgccgccgcattcggcttggcaggtatcgaaggcaaagcgtttgccgtcatttggacgaccacgccttggactctgcctgcgagccaggccgtgtctgccggcgcggacgtggtgtatcaattaatcgatacgcccaaaggcaaattggtgctggcgaaagatttggcggaaggcgctttgaaacgctacggcttttcagacggcatcgccatccttgccgaaaccaccggcgacaagctggaaaactgcacatgaatcatccgttcctcgaacgcgatattcccatgctcaacggcgaacacgttaccaccgatgccggtaccggcttggtgcatactgcgcctgcgcacggtttggaagactacgccgtctgcaataaatacggcatcgagctttacaaccctgtcaacgccgaaggcaaatacataagcgaaacgcctcgtgtcgcaggcatgagcgtttgggaggcgaatcccgtcatcctgcaatggccggaagaaaccggcaacctcttggcaagcagcaaaatcgaacacagctacgcccactgctggcgccacaaaaccccgctgatttaccgagcgacaggtcagtggtttgtcggcatggacaaagccggcagcgacggtaaaaccctgcgcgacaaagccatcaaagccgtggacgacaccgaattcttcccgccatggggtcgtgcgcgtttggaatccatgattgaaggccgtcctgactgggtggtttcacgccaacgctattggggcacgccgatgactttctttgttcacaaagaaacgggcgagctgcatccgaactctgccgaacttttggaaaaagtcgcgcaacgcatcgaagaaaaaggcatcgaggcttggttctccctcgataaaagcgaattattaagcgcggaagattgcgaacattacgacaaactccccgataccatggacgtatggttcgactcaggctcgacgcattattccgttgtaaaacaacgcgaagaattggaatggccggctgacttgtacctcgaaggcagcgaccaacaccgcggctggttccaatcctctatgctgaccggttgcgcctcatccatgggacgcgcaccgtataaacagctgctgacccacggtttcgtggttgaccaaaacggccgcaaaatgtcgaaatccatcggcaacgtcgtcgcgccgcaggaagtctataacgaattcggcgcggacatcctgcgcctgtgggcggcatccaccgattacagcggcgaattggcgatttccaaagaaatcctcaaacgcgttaccgaaagctaccgccgcatccgcaataccttgagcttcctgtttgccaatttgagcgactttaatccgattgaagatgccgtgcaacaggcggatatggtggaaatcgaccgctacgccttggtattggcgcggcggctgcaagagcgtttggcaggcggttactatccgcgctatgccttccacttcgccgtgaaagacattgtttctttctgctcggaagacttgggcgcgttctacctcgacatcctgaaagaccgcctctacaccaccaaagccgacagccgcgcccgccgcagcgcgcaaaccgccctgtaccacatcacgcgcagcctggttctcttgattgcaccgattttgtgcttcaccggcgaagaagcgtgggacatcatcggcggcggcgaagaagacagcgtcctcttccatacttggcacgagttcccggccatcaacgaaaaagccgaagccgaactggtgaaaaaatggacggcaatccgcgaagcgcgcgaagcagtaaccgccgccatcgagcctttgcgcgccgacaaaaccgtcggttcgtccttgcaggcggaagccgaaattaccgcgccggaagaaatggccggctatctgaatgctttgggcgaagaattgcgctttgccctgctggtgtctaaagcagaagtgaaagtcggtgatgaacttgccgttgccgccaaagccagcgacggcgaaaaatgcgaacgctgctggcattacacccgcgatgtgggcgcggttgcaggttatgaaaccgtctgcaaacgctgtgcggagaatgtcggcggagaaggcgaaacgcgccat

SEQ ID NO: 29258 - DNA, 447 bp, Neisseria gonorrhoeae
atgagcaccttcttccggcaaaccgcacaagccatgactgccaaacacatcggccgcttcccgctatcggagttggaccaggtgattgattggcagccgatcgaacaatacctgatccgtcaaaaaacccgttacctccgagaccgccgcggccgtcccgcccatcccctgtcgtccatgttcaaagccgtcctgcccggacaatggcacagcctctccgatcccgaactcgaacacagcctcatcacccgcatcggtttcaacctgttttgccgttttgacgaaccgggcatccccggttgcagcaccttatgccgctaccgtaaattccgctatgcgcgggcagcctatttcgggctgctcaaagtgggtgcgcaaagccacctgaaggcgatgtgtttgaacctgttgaaagccgccaacaggctaagtgcgcccgctgccgcc

SEQ ID NO: 29259 - DNA, 435 bp, Neisseria gonorrhoeae
atgatagggcttttaatcatcacacacgaaaccataggcgaagcctaccgcaagctggcgcatcatttttttccgggcgggctgcctgaaaacgtccgcatactcggcgtgcagccgacggaagaccaagacgacattatcaacaacgccatttccgcgctgcaagagtttcctgaaaaccacggtgtattgattatgaccgacatcttcggcgcgaccccctgcaatgccgcccgccggctcgtgcgcgaaaacaaatcggcgattttgaccgggctgaacgcgccgatgatgattaaggccgtccaatattcgccggcggcggaagaccttgccgcctttaccgaatgcgtcagagaggcggcggtaaaaggcattttcgccatcacgtccgcgcccgaagatttggtgtgccggcgcagcggcgatgccgtc

SEQ ID NO: 29260 - DNA, 1773 bp, Neisseria gonorrhoeae
atgagtatcgtgctgcacggcgtggcggcgggcaaaggcattgccgtcggttgcgcccacctgattgcgcgcggtacggaggaagtgccgcagtatgatgttgctcaggcggacaccgatgccgaagccgaacgtttcgatgccgccgtcaaagccacgcgcaaagagttggaacagctccgcagcgcgattcccgaaaacgccccgaccgagttgggcgcgttcatctcgctgcacctgatgctcttgaccgatgttaccttgtcgcgcgaacccgtcgatattttaagggaacaaaaaatcaacgccgagtgggcattgaagcagcagagcgacaaactcgccgcccaattcgacaatatggacgatgcctatttgcgcgaacgcaagcaggatatgctgcaagtcgtccgccgcatccacaacaacctgatcgggcagggcaacgagttggaggttgccgacaacctgtttgacgaaaccgttctgattgcaaacgacctttcacccgccgacacggttttgtttaaagagcagcgcattgccgccttcgttaccgatgccggcggccccaccgggcatacggcgattttgggcaggagcttggacatcccgtccgtcgtcgggctgcacaacgcgcgcaaactgattaccgaaggcgaaacggtcatcgtggacggcatcaacggcgtgttgattatttcgccggatgagtcggtgttgaacgaataccgccgccgcgcccgcgaataccgcagccacaaacgcgatttgaacaagctcaaaaaaaccgccgccgccaccgccgacggggtctgcatcgagcttgtgggcaatatagaatccgccgaagacgtgaaaccgctgcacaacctcggcgcagacggcatcgggctgttccgcagcgagtttctttacctgaaccgcgatacgatgccgtctgaagacgagcagtacgaagtgtacagcgcgattgtcaaaaaaatgaagggcaaaagcgtaacgatacggacagtcgatttgggtgtggacaaaaatccgcgctggttcgggaaaaacagcacgcccaacggcagcctcaaccccgcgctgggcatgaccggcatccgcctgtgccttgccgaaccggtcatgttccgcacgcagatgcgcgccatcctccgtgcggcggtacacggccccgtccgcatgatgtggccgatgattacctccgtatccgaagtgcgccagtgcctcatccacctcgacaccgcgcaacgccagcttgccgaacgcggcgatgccttcggcgaagtcggcatcggctgcatgattgaaattccgtctgccgcgctgaccgtcggcagtattttgaaactggtcgatttcatctccgtcggtaccaacgatttgatccaatatattctgtccgtcgatcgcggcgacgacagcgtcagccatctctaccaacccggacatccttccgtgctgaaaatgctgcaacacgtcatccgtaccgccaaccgcatggacaaagacgtgtccgtatgcggcgagatggcgggcgataccgcgtttacccgcgttttattgggtatggggctgcgccgtttttccatgaatccgaacaacatcctgcccgtcaaaaacatcattctgcacagcaatgccggacagctcgaaggcgatattgcgaaagtcatccgctgcgaagacgaagagaagtcggaaaagctgatcaaacagatcaacagcgtgtctgtcgcggaagaagccgaagtcaagggacggaaa

SEQ ID NO: 29261 - DNA, 1869 bp, Neisseria gonorrhoeae
ttgatgcaagctgtccgatacaggcctgaaattgacggattgcgggccgtcgccgtgctatccgtcattattttccacctgaataaccgctggctgcccggaggattcctgggggtggacattttctttgtcatctcgggattcctcattaccaacatcattctttctgaaatacagaacggttctttttctttccgggatttttatacccgcaggattaagcggatttatcctgcttttattgcggccgtgtccctggcttcggtgattgcttctcaaatcttcctttacgaagatttcaaccaaatgaggaaaaccatagagctttctacggtttttttgtccaatatttatttggggttccgattggggtatttcgatttgagtgccgacgagaaccccgtactgcatatctggtctttggcggtagaggaacagtattacctcctgtatcctcttttgctgatattctgttacaaaaaaaccaaatcactacgggtgctgcgtaatatcagcatcatcctgtttctgattttgaccgcatcatcgtttttgccggccgggttttataccgacatcctcaaccaacccaatacttattacctttcgacactgaggtttcccgagctgttggtgggttcgctgttggcggtttacgggcaaacgcaaaacggcagacggcaaacagaaaatggaaaacggcagttgctttcattactctgtttcggcgcattgcttgtctgcctgttcgtgatcgacaaacacgatccgtttatcccgggaataaccctgctccttccctgcctgctgacggcgctgcttatccggagtatgcaatacgggacacttccgacccgcatcctgtcggcaagccccatcgtatttgtcggcaaaatctcttattccctatacctgtaccattggatttttattgccttcgcccattacattacaggcgacaaacagctcggactgcctgccgtatcggcggttgccgcgttgacggccggattttccctgttgagctattatttgattgaacagccgcttagaaaacggaagatgaccttcaaaaaggcatttttctgcctttatctcgccccgtccctgatgcttgtcggttacaacctgtattcaagagggatattgaaacaggaacacctccgcccgctgcccggcacgcccgttgctgcggaaaataattttccggaaaccgtcttgaccctcggcgactcgcacgccggacacctgcgggggtttctggattatgtcggcggcagggaagggtggaaagctaaaatcctgtccctcgattcggagtgtttggtttgggtggatgagaagctggcagacaacccgttgtgccgaaaataccgggatgaagttgaaaaagccgaagctgttttcattgcccaattctatgatttgaggatgggcggccagcccgtgccgagatttgaagcgcaatccttcctgatacccgggttcaaagcccgattcagggaaaccgtcaagaggatagccgccgtcaaacctgtatatgtttttgcaaacaatacatcaatcagccgttctcccttgagggaggaaaaattgaaaagatttgctataaaccaatacctccggcctattcgggctatgggcgacatcggcaagagcaatcaggcggtctttgatttggttaaagatattcccaatgtgcattgggtggacgcacaaaaatacctgcccaaaaacacggtcgaaatacacggacgctatctttacggcgaccaagaccacctgacctatttcggttcttattatatggggcgggaatttcacaaacacgaacgcctgctcaagcattcccgaggcggcgcattgcag

SEQ ID NO: 29262 - DNA, 1368 bp, Neisseria gonorrhoeae
atgatcaaccccatcgcctcgctttcccccctagacggccgttatgcccaatccgttgaagcattgcgcccgattttttcagagtacggactgatgaaggcgcgcgtcaaagtcgaattaaactggctcaaagccctggccgccgagccggagattgccgaagtgccgcccttcagtgccgaaacgcttgccgaaatcgacaaagtcatcgaaaacttttcattagaagacgcggccgccgtcaaagccatcgaagccacgaccaatcatgatgtcaaagccatcgaatattggctgaaaaaacgttttgccgaagtgccggaagtcgccgccgtgagcgagttcatccacttcgcctgcaccagcgaagacatcaacaacctgtcccacgccctgatgctgcaagaggcgcgcgaaaccgtcatcctgcccaaacttgccgaaatcatcggcaaactcaccgctatggcgcacgaccttgccgccgtcccgatgatgagccgcacccacggccagcccgccacaccgaccactttgggcaaagaaaccgccaatgtcgtgtaccgcctgcaacgccagttcaaaatccttcaggcgcaagaattcctcggcaaaatcaacggcgcggtcggcaactacaacgcccacatggccgcctatcccgatgtggattgggaaacacactgccgcaacttcgtcgaaatcagcctcggtctgaccttcaacccctacaccatccaaatcgagccgcacgactatatggcggagtttttccaaaccctcagccgcatcaacacgattctcatcgacttcagccgcgacgtttggggttatatttcattgggttatttcaaacaaaaagtcaaagcgggcgaagtcggctcttccaccatgccgcacaaagtcaaccccatcgactttgaaaactccgagggcaacctcggcatggcaaacgccgtattgggctttttggcggaaaaactgcccgtctcacgctggcagcgcgatttgaccgacagcaccgtattgcgcaatatgggcgtgggcgtgggctatgccgtgttgggtttcgccgcccacttgcgcggtctgaacaagctcgagccgaaccctgccgcgcttgccgccgatttggatgtcacttgggagctgctcgccgagccgattcaaaccgtaatgcgccgttacggtgtcgccaatccttacgaaaaactgaaagacctgacgcgcggtaaaggcggcatcacacccgaagtgctgaaaggctttatcggatcgctggaaattcccgccgaagccaaagccaaattgcttgagctgacccccgcgctgtatgtgggcaaggctgaagcgttggcgaaacggatt

SEQ ID NO: 29263 - DNA, 630 bp, Neisseria gonorrhoeae
atggagaatgtaaaccgcgtgccggagcaggcacgttatgatgccgaatgcaggcaggcagacgaagcattggcggacgtgtttccggcagtcagtattttcggcagcgcgcgcacgccgcaggatcatgcggattatgcgtttgcctgccgtctggcgcggcggctgtcggattcgggtattgccgtcatttcgggcggcgggccggggattatggaggcggcaaacaagggcgcgtttgccgggaagtcggtttcggtagggctgaacattgccctgccgcacgagcagaaaccgaatccgtatcaggacatcgccttgcggttttcccgttttgccgaacgcaaggcagtgtttttccgctattcccaagcatatgtcgtgatgccgggcggcttcgggacgctggacgaattgtttgaaatcctgaccttggtgcagacgggcaaagtgccgccgcgtccggtcgttttggttggaaaggcgttttggtcgggcttggcggagtggataaacgcgcagcttttggcgcgcggtatgatttccgaaggggccgcttctttgttctccatatcggacgacgaagacgaaatcattgcgtatctgtcggaacacgggcttcagacggca

SEQ ID NO: 29264 - DNA, 1536 bp, Neisseria gonorrhoeae
atgttttccaaactggacaaatactggcagcaccccgccctctactggcctttgctcatcctttttgccgccgccacccccttcgccttcgcaccctactaccacttttggctgatgcccttgattttcggcgccttcgtccgcctcatcgaactgcgtccgcgttttgccgcctcttccgcctacctgttcggtctgaccgcatacacggcacagttctactggatacacactgccctgcacgacgtttccggcctgcccgacctctatgccgtaccgctgaccttcctgctgcccgcctaccttgccctttatccggcactgtgtttctggctgtggaaaaaatttaccctgccccagggcataaagaccggtctggtactgcccatcctgtggacgctgaccgagtttgcccgcgagcgtttcctgaccggattcggctggggcgcaatcggctactcccaaatcaccccggacagcccgctggcgggtttcgcccccttgggcggcatccacatggttacactggcaaccgcctttctcggtgtctggctggttttggcgatcgacaacaccgcacgttcgggcaaacgcctgcttccggccattctgattgccgccctgcttgccgcaggctacaccgcccaacaaaccgacttcacccgccccgacggcagccgcagcaccgtcgccctgcttcagggcaacatcgcccaaaccctcaaatggcgtgaagaccaagtcatcccgaccatacagaaatattacgaacaggtcggcaaaaccactgccgacatcgtcatcctgcccgaaaccgccattcccatcatgcgccaaaacctgccggaaaacatactggcgcaattcgccgaacaggcgcaaaacaacggcagcgcgctcgccgtcggcatcagccaatacacttcggacggcaacggttacgaaaacgccgtcatcaacctgaccggctatcaggaaaacaatcaggacggcatcccttactacgccaaaaaccacctcgtccccttcggcgaatacaaaccgctgcccctcctgaccacaccgctttacaaaatgatggacatgcccctttccgacttccgcaaaggcggcggcaagcaatccgccatgatgatgaaaaaccaaaaaatcgccttcaacatctgctacgaagacggattcggcgacgaactgattgccgccgccaaagacgccacactgcttgccaatgtcagcaatatggcgtggtatggaaaatccaacgccatgtaccagcacctccaacaatcgcaggcgcgggctatggaactcggacgctatatggtccgcgccaccaacaccggcgcaaccgccatcatctcccccaaaggcaacatcatcgcccaagcccaacccgatacggaaaccgtattagaaggacacatcaaaggctacatcggcgaaacgccctatatgaaaaccggcagttcatggtggttgatgggcatattgaccctagccgcactgattcttttcatcttccgaaacaaagaacac

SEQ ID NO: 29265 - DNA, 1728 bp, Neisseria gonorrhoeae
gtggattggatgaacagcctgtttctgctgggtggcgcactgttgttcctgagcgtggtttcgaccactttgtccgcacgtttgggaatgcctttgctgctggtgtttcttgccgtcggcatgctggcgggcgaggaaggcgttggcggcattgccttcaataatgtcgtgatggcgaatttcatcagccagcttgctttggcggttattctgctcgacggcggtttgcggacgcagctttccagttttcggattgcgttgaagcccgcgtcggtactcgcttcgtggggcgtgtttgccactgtgcttccgctgggactgtttgcaactttttatctcggtttggattggaagttcggcgtgctgatggcggcgattgtcggttcgaccgatgccggcgcggtattcagccttttgcgcaacagcggcgtgcgtttgaacgaacgggtgcaggcgactttggaaatcgaatcgggtgcgaacgacccgatggcggtttttttggttacggcactgattaccatgattatgcagccggcggaatcgggtgcggcagcgtttgtccggatgcttgcgctgcaaatcggtttcggtctgctgacgggttgggcgggcggaaagatattggcaaagctggtacgccgtctgaatcttgcggaaggtctgtacgcgctgatgattgtgtcgggcgggctgcttgtgtttgcgtttaccaataccataggcggcagcggctttttggcggtttaccttgccggcatcattgtcggtaaccagcgcaaccgtgcgacggaacacgttttgcgtgtgatggacggtttggcttggctggcgcaggcaactttgttcgtcatgctcggtctgctggtttctcccgccggcgtgttggacagggcggcggaagccttggcgattgcggcgttcctgatgctggtcgcgcgtccgctggcagtgttcggcggtttgtggaaattcaattacagcctgcgtgaaaaggcgtatatcagttggttgggcttgcgaggagccgtaccgatttcgctggcgatgatgccgctggtgatgggcgttcccaattcgcacctgctgtttgatgtggcgtttgccgtggtggtgctgtcgctgctgattcagggaacgacgattcctgtgatggcgcggctgttgaaggttgccatgcccaacaagcccgaaccgaaagatacgcatgatatttggctggcggaaaaggaaattgtcagaatgtcggcgtttaaagtggttgccgaatctgaagcggagggacaccatcccgatacggtcgaaccgatttccgattcgtttgacgcacgctgtttcgcattgatacgcaacggcagccgaatcgaaatgcagtccgacaccgtgcttcaggcggaggatttggcgtggtacatcctggccgacggcaaggtcgataaaatggcgaaatactttaccgagacgggtatcggcgtccgtgaaaattttgatttcttcggtgagtttgtcgtttcgccggcagcacgttcgggcgatttggcacttgcttacggtttgaagctggaagcgggcgaagagggtttgagccttgccgagcttttcgataagcgttccgacagtcaggagccggtcgagggcgaccgtattgacatcggcggctttatgctgaccgcgaaggaggttgacggtggcggcaatatcgggtctatggggctgaaagtaccgcgt

SEQ ID NO: 29266 - DNA, 420 bp, Neisseria gonorrhoeae
atgaaaattaccaagatatttaccttcgactcctcgcatatgctcgacgggcatgacggcaaatgccaaaacctgcacggacatacctacaaactcgaaatcaccgtttcagacggcatcgtcaggggcgggccgaaagacggaatggtgatggatttcaccgacctcaaagccattgtaaaacaacacattaccgatcccttcgatcacgccttcatctaccacggcggcaatggccgcgaatctcaaatcgccgcgctcttggagggctggaacatgaaaaccctgcgcctgccctgccgcacaactgccgaaaatatggcggtcgaaatgtactgccgtctgaaaaacgcggggctgaacgtgtgccgcgtcaaattgtgggaaacgccgacatcgtgcgcggagtatgaaggggag

SEQ ID NO: 29267 - DNA, 1113 bp, Neisseria gonorrhoeae
atgcttaaatttactttacacaaaaaagacggtctcgcccgacgcggcacgctggagttgaaccacggaaaaatcgaaacgccggttttcatgccggtcggtacttacggttcggtcaaagcgatgaacccgcaaaacctgcacgacatcaaggcgcaaattattttgggcaacacttatcatttgtggctgcgtccgggtttggaggtcgtcgaacagtttggagggcttcacggttttatcggctgggacaaaccgattctgaccgactcgggcggttttcaggttttttctttgtcggatatgcgcaagctgaccgaagaaggctgtacgtttaaaagcccgattaacggcgacaagctgtttttatcacctgaaatttccatgaaaatccaaacggttttgaactcggatatcgcgatgcagttggacgaatgcacgccgggcgaaacaacgcgcgaacaggcgcgaaaatccctgcaaatgagcttgcgctgggcggaacggagcaaaaaagcctttgaagatttgaaaaacccgaacgcgctgttcggcatcgtgcaaggcgcgatgtatgaggatttgcgcgaagaatctttgcgcggtttggaggaatttgattttcccggccttgccgtcggcggtttgtccgtcggcgaacccaagcccgaaatgtaccgtatgctgcacgccgtcggcccgatgctgcccgaacgcaaaccgcattacctgatgggcgtaggcacgccggaagacctcgtgtacggcgtggcgcacggcatcgatatgttcgactgcgtgatgcccacccgcaatgcacgcaacggctggctgtttacccgtttcggcgatttgaaaatcaaaaacgccaaacacaagcccgacaagcgtccgatagacgaaagctgcacctgctacgcctgccaaaatttcagccgcgcctacctgcaccatctgcaccgcgccggcgaaatcttgggcgcgcaattgaacaccatccacaacctgcatttctaccaagtcatcatggcggaaatgcgcgatgccgtcgaacaaggcaaatttgccgactggcaggcgcaattccacgaaaaccgcgcgcgcggcgtggac

SEQ ID NO: 29268 - DNA, 1944 bp, Neisseria gonorrhoeae
atgccgttattttttaatctttcggagcgtttgatgttgaatattaccttgccggactgttcagtccgccaatacgaatcccccgttaccgtggctcaaattgctgcgtctatcggtgccggtttggcgaaggcggcggtggcaggcaaggtaaacggcaaattggtcgatgcgtgcgacccgattgttgaggattctgctgttcaaatcattactccgaaagatcaggaaggcatcgaaatcatccgccattcctgcgcacatcttgtcgggcatgccgtcaagcaactctatcctaatgcaaaaatggttatcggccccgtcattgaagagggcttttattacgacatcgccacggaaaaaccgtttacaccggaagatgttgccgccattgaagcgcgtatgaaagaattgattgcccaagattatgatgtggtcaaaatcatgactccgcgtgcggaggcgattaaaatttttcaagagcgcggcgaagaatacaaactgcgcctgattgacgatatgcccgaagtggaagcgatggggatatatcatcaccaggaatatgtcgatatgtgccgcggtccgcacgttccgaacacccgcttcctgaaaaacttcaagctgaccaagctggcaggcgcatattggcgcggcgacagcaataatgaaatgctgcaacgtatttatggcactgcttgggcgacgaaagacgaattaaaagactatatccaacgcattgaagaagcagaaaaacgtgaccaccgcaaattgggcaagcaactggatttgttccacttgcaggacgaagcgccgggtatggtgttttggcatcccaaaggttgggctttgtggcagactatcgagcagcatatgcgtaaagagctgaacgccgccggttataaagaggtcaaaacgcctcaaattatggataaaaccttttgggaaaaatccggccactgggacaactacaaagacaatatgttcgtaaccagttcggaaaaacgcgaatatgcggttaaaccgatgaactgtccgggtcatgttcaaattttcaacaacggtttgcgttcatatcgagatttgccgatgcgtttggcggaattcggttcttgccaccgcaacgagccgagcggcgcactgcacggtctgatgagggttcgcggttttgtgcaggatgatgcgcatattttttgtaccgaagatcaaatcgtcagcgaggctcgtgcgttcaatgaattgttggttcgcatctacaaacagttcggtttccatgatgtatccgtcaggctttcccttcgccctgaaaaacgcgcaggttcagacgacgtgtgggataaggcagagcagggtttgcgcgaggcattgactgcctgcggcgtggaatggggcgaattgccgggcgagggtgcgttttacgggcctaaaatcgaatatcacgtcaaagatgccttgggtcgttcttggcaatgcggtacattacaactggattttgtcttgccggaacgcttggatgcagaatatgtaacagaaaacaacgaccgagcgcggcctgttatgttgcatcgcgccattttaggttctttggagcggtttatcggcattctgattgagaaccatgcaggctctttcccgttatggcttgcaccggttcaaatggtgattatgaacatcaccgaaaatcaggcagattattgtcgggaagttgctgccaaattgcaggcggcaggcttccgcgccgagttggatttgcgtaatgaaaaaatcggttacaaaatccgcgacaacagccaataccgtttcccttatcaaatcgttatcggtgataaagagaaacaagaaaacaaagttgcggtacgccgcaaagcggaagacttgggttctttggatttggatgatttcattgcgcaattgcagcaagaaatcactgatgccctcgtcaatcat

SEQ ID NO: 29269 - DNA, 1083 bp, Neisseria gonorrhoeae
atgaccgtcccccatattccgcgcggccccgtcatggcagacattgccgccttccgcctgaccgaagaagaaaaacaacgcctgctcgatcccgcaatcggcggcatcatcctcttccgccgcaacttccaaaacatcgaacaactcaaaacactcaccgccgaaatcaaagccctgcgcacacccgaactcattatcgccgtcgatcacgaaggcggcagggtgcaacgtttcatcgaaggttttacccgcctgcccgcaatgaacgttttagggcaaatttgggacaaagacggcgcgtccgccgccgaaaccgctgccggacaagtcggccgggttttggcaaccgagctttccgcctgcggcatcgatttgtccttcacgcccgtcttagatttggactggggaaactgcgccgtcatcggcaaccgcagcttccaccgcaatcccgaagcggtcgcccgcctcgccctcgcccttcaaaaaggtttggcaaaaggcggtatgaaatcatgcggcaaacattttcccggacacggatttgtcgaaggggacagccatttggtgctacccgaagacgggcgcagcctcgacgaactcgaagccgccgacctcgcccccttccgcattatgagccgcgaaggtatggcggcggtcatgcccgcccacgtcgtttatccgcaagtggacacaaagcccgcagggttttccgaaatctggctcaaacaaattttgcgccgcgatatcggattcaaaggcgtgattttttctgacgatttgaccatggagggcgcgtgcggggcaggcggcatcaaagaacgcgcccgcatttcctttgaggcaggttgcgacatcgtcctcgtctgcaaccgtcccgacttggtcgatgaattgcgcgacggtttcaccattcccgacaaccaggatttggccggacgttggcaatacatggaaaactcgctcggtcatgaggcggtacaagccgttatgcagacaatgggtttccaagcggcgcaagcctttgttgccggccttgcctcgccgcaggacacggcgggcggcgtaaaagtcggagaggccttt

SEQ ID NO: 29270 - DNA, 465 bp, Neisseria gonorrhoeae
gtgcgtttaatcagtgagtcaggcgaacagcttggtgtcgtttcagttcgtgaagctttggctatggccgaagggcaggatgtcgatttggtagagatttccccaactgctaaacctcctgtgtgcaaactgatggattacggtaaatacaaataccaacaagccaagaagcgcgacgaagccaagaaaaaccaaaagcaggtgcaaattaaggaaattaaattccgtccgggtacagatgagggcgattatcaaatcaagatgcgcaacatcaaccgcttccttgccgacggcgataaagtcaaagtgacattgcgtttccgcggccgtgaaatggctcaccagcaactcggcgcgcaacttttggaacgtgtaaaagaagatttggctgaagtggcgcaaatcgagtcctttcccaaaatggaaggccgtcaaatggtgatgatgattgcaccgaagaaaaaa

SEQ ID NO: 29271 - DNA, 195 bp, Neisseria gonorrhoeae
atgcctaaaatgaaaaccaagtctagcgcgaaaaaacgctttaaagtactgggtaacggcggtgtgaaacgcgctcatgcgttcaaacgccacatcttgactaaaaagaccaccaaaaacaaacgccaactgcgcggtacctctatggtaaatgatcgcgatttggcttctgttgctaaaatgttaccctacgct

SEQ ID NO: 29272 - DNA, 1497 bp, Neisseria gonorrhoeae
  misc_feature (1359)..(1382): n=g, a, t or c
gtgttcaaaaaataccaatacttcgctttggcggcactgtgtgccgccttgctggcaggctgcgaaaaggcaggcagctttttcggtgcggacaaaaaagaagcatccttcgtagaacgcatcgaacacaccaaagacgacggcagtgtcagtatgctgctgcccgactttgcccaactggttcaaagcgaaggcccggcagtcgtcaatattcaggcagcccccgccccgcgcacccaaaacggcagcggcaatgccgaaaccgattccgacccgcttgccgacagcgacccgttctacgaatttttcaaacgcctcgtcccgaacatgcccgaaatcccccaagaagaagcagatgacggcggattgaacttcggttcgggcttcatcatcagcaaaaacggctacatcctgaccaatacccacgtcgttgccggtatgggcagtatcaaagtcctgctcaacgacaagcgcgaatataccgccaaactcatcggttcggatgtccaatccgatgtcgcccttctgaaaatcgacgcaacggaagagctacccgtcgtcaaaatcggcaatcccaaaaatttgaaaccgggcgaatgggtcgctgccatcggcgcgcccttcggctttgacaacagcgtgaccgccggcatcgtgtccgccaaaggcagaagcctgcccaacgaaagctacacacccttcatccaaaccgacgttgccatcaatccgggcaattccggcggcccgctgttcaacttaaaaggacaggtcgtcggcatcaattcgcaaatatacagccgcagcggcggattcatgggcatctcctttgccatcccgattgacgttgccatgaatgtcgccgaacagctgaaaaacaccggcaaagtccaacgcggacaactgggcgtgattattcaggaagtatcctacggtttggcacagtcgttcggtctggataaagccagcggcgcattgattgccaaaatccttcccggcagccccgcagaacgtgccggcctgcaggcgggcgacatcgtcctcagcctcgacggcggagaaatacgttcttccggcgaccttcccgtcatggtcggcgccattacgccgggaaaagaagtcagcctcggcgtatggcgcaaaggcgaagaaatcacaatcaaagccaagctgggcaacgccgccgagcataccggcgcatcatccaaaacagatgaagccccctacaccgaacagcaatccggtacgttctcggtcgaatccgcaggcattacccttcagacacataccgacagcagcggcaaacacctcgtcgtcgtacgggtttccgacgcggcagaacgcgcaggcttaaggcgcggnnnnnnnnnnnnnnnnnnnnnnnnagtccccgtcaatgacgaagccggtttccgcaaagctatggacaaggcaggcaaaaacgtccccctgctggtcatgcgccgtggcaacacgctgttcatcgcattaaacctgcaa

SEQ ID NO: 29273 - DNA, 357 bp, Neisseria gonorrhoeae
atgccacgcgtaaaacgcggtgttaccgcccgtgcccgtcaccaaaaaatcttcgcgttagccaaaggctatcgtggtcgtcgtaaaaacgtttaccgcgttgccaagcaggcggtaatgaaagctggtcaatacgcataccgtgaccgccgccaacgcaaacgccaattccgtcaattgtggattgttcgtatcaatgcaggtgcgcgtgaaaacgggttgtcttacagcaaatttatgaacggtctgaaacgcgcctctatcgaaatcgaccgcaaagtattggctgatttggccgtgttcgataaagccgcttttgcacaattggttgaaaaagccaaagctgctttggctgct

SEQ ID NO: 29274 - DNA, 1278 bp, Neisseria gonorrhoeae
atgtcaatttctattttcttgaaacgggcaatattccgacaccacgaaaggcaaatcatgtctgcgcaatcacaaaacaaccatacgtccccattggtcgtcttgaccacgctgttcttcatgatgggttttattacctgcatgaacgacatccttatccctcatttgaaagaaattttcgacctctcttacgttcaggcgatgctgattcaattttgcttttttaccgcctatgcggtaatgtccatcccgatgggggcttttgtcggcaaagtcggctacaaaaacggcgttatcggcggctttctgctgacggcggtcgggtgcctgctgttttatcctgctgcgggcagccattcttacgcggtatttttgggcgcgttgtttattttggcttccggcgtaacgctgcttcaggtcgccggtaatccttatgttaccctgctggcgaaacccggcaaggaatcggcaacgctgacgctggttcaggcgtttaacgctttgggtacgaccattgcgcctcaaatcggcgcgttcctgattttggcggacgcaacccaaaccgtcagcaaggcggaacagatttcttccgtacagattccctatttgggactggcggggctgctgattatccttgccgttttcgtgaaaatgatccggctgcccgacgcgcgcaaaattgccgccgaggaaagcgcgcacaaccacgacggcaaaaccggcgtatggcaatacaaacatctcgtgttcggtacggcaggcattttctgctacgtcggtgcggaggtgtctatcggttcgctgatggtcaatgtgttgggttatctgaaagggctggatcatgcttctgccgcgcattacctgtcgttttattggggcggagcgatggtcggacgtttcctcggttcggcggtaatggcgaaattcgcgcccaaccgttatttggcgtttaacgcatcggctgcggtcgtgctgcttgccgtcgcgatggcgacgggcagcggcaatgcggatgtggcgatgtggtcgctgcttgccatcggttttttcaactcgattatgttcccgacgattttctctttggcaaccaaagggttgggcaaattcaccaacgcggcttccggtgtgctgtgtaccgcgattgtcggcggtgcggtcgtgccggtaattcaaggttgggcggcggatacttacaccctgatgtcttcgtttgtcgtttccgttatctgttacctgtatatcgtgttttttgcggtgtacggatatagggcggacaaa

SEQ ID NO: 29275 - DNA, 3432 bp, Neisseria gonorrhoeae
atgaccgagccgacctacatccccctgcgcctgcataccgaattctccattaccgacggtatggtgcggattaaaaaactgattgccaaagcgcaagaatacggtttgcctgctttgggcatcagcgatttgatgaacgaattcggtttggtgaaattctataaagcctgccgcggcgcagggattaagcccgtcggcgcggcggacgtgtggataggcaatccgaatgcgcccgacaagccgttccgcgccatgctggttatccgcaacgatgcgggttatctgcgcttgagcgagcttttgacggaggcttatgtcggccaagaccgcaatatccatcatgcggaactcaatcccgaatggctggaaaacggcgacaacagcggcttgatttgtttgagcggcgcgcattacggcgaagtgggcgtgaatctgttgaacggcaatgaagacgcggcgcgtgcggcggcgttgaaatatgcggcatggtttcccgatacgttttatttagagctgcaacgcctgcccgaacgccccgaatgggaggcttgcgtttccggcagcgtgaagctggcggaggaactgggtttgccggtggtagcaacgcatccgacacagtttatgaaccgcgacgatttcaacgcgcacgaggcgcgggtgtgcatcgcgggcggctgggtgctgacggacaagaaacgtccgcgcgatttcacgccgagccagtttttcattccgccggaaacgatgctggagcgtttcgccgacttgcccgaagccttggaaaacacggtggaaatcgccaaacgctgcaacttgcacatcacattgggcaaaaacttcctaccccttttccccacgcccgacggtttatcactcgatgactgtctcatcaaactctccaacgagggtttgcaggaacgcatggttcagctttatcccgacgaggcggaacgggcggcaaaaatgccggaatatcaggagcggctggactttgagctgaacatcatcatccaaatgaaattccccggctatttccttatcgtacaagactttatcaactgggcgaaaacgcacggctgtccggtcgggccgggacgcggttcgggcgcgggttcgctggtggcgtattcgctgaagattaccgacctcgacccgctgaaatacgcgctgctgttcgagcgtttcctaaaccccgaacgcgtttccatgcccgactttgacgtggacttctgtcaggcaaaccgcggccgcgtgattgaatacgtgcgcgaaaaatacggcgctcaggcggtcagccagattgtgactttcggcacgatgtcgtccaaagcggtcatccgcgacgtggggcgtgtgctggaactgccgtttatgctgtgcgacaaactgtccaagctgattccgttggaagccaacaaacccctgagtttggacgacgcgatgaaggcgcagccgcagattcaggaattgcttgaagcggaagaagcggacgaactgattacgctggcgaaaaaactggaagacctgacgcgcggtttgggtatgcacgcaggcggcgtgttgattgcgccgggcaagatttccgattacagccccgtgtatcaggcggacgaatccgcctcgcccgtatccatgtacgacaagggcgacgtggaagacgtgggtttggtgaagttcgactttttgggcctgcgcaacctgaccattatcgaaatggcgcagaacaacatcaaaaacaccgccggcgatatcgtcgatgtcggcaagattccgcttgacgaccagactgcctaccaaatcttccgcgatgcgaacaccaccgccgtcttccagttcgagtcgaccggcatgaaaaaaatgctgaaaacggcgcatacgaccaagtttgaagaactcatcgccttcgtatcgctctaccgacccggcccgatggacaacattcccgacttcgtcgcacgcatgaagggacaggaattccaatacatccacccgctgctggaaggcatcctcgcgccgacctacggcattatggtgtatcaggaacaagtgatgcaggcggcgcagattatcggcggctactcgctcggcggcgcggacctgctgcgccgcgccatgggtaagaaaaagcccgaagagatggtgaaacaccgcgaaatcttcgccgaaggtgcggcaaaacaaggcatttcgcgcgaaaaatccgacgaaatcttcaactacatggaaaaattcgccggctacggtttcaacaaatcccacgccgccgcctacgccctgatttcctaccagaccgcatggctcaaagcccactatcccgccgaatttatggcggcgacgatgtcgtccgaattggacaacaccgaccagctcaaacatttctacgacgactgccgcgccaacggcatcgagttcctgccgcccgacattaacgaatccgactaccgcttcacgccgtatccggacatgaaaatccgctacgcactcggcgcgattaaaggcacgggcgaagccgccgtcgaatccatcatcgccgcgcggcaaagcggcggcaaatttaccggcctgttggacttctgcgagcgcgtcggcaaagaacacatgaaccgccgcaccctcgaagccctgatacgcggcggcgcgttcgacagcatcgaacccaaccgcgccatgctcttggcgaacatcgaccttgccatggacaacgccgaccaaaaagccgccaacgccaatcagggcgggctgtttgacatgatggaagacgccatcgaaccggtgcggctcatcgacgcacccatgtggagcgaatcggaaaaactcgccgaagaaaaaaccgtcatcggcttttacctgtccggccacccgttcggcccgtatgcccaagaagtccgccaaatcgccccgaccaaattaggccgtctgaaaccgcaagacagcgtgcgcctcgccggattcgttaccgccgtgcgcaccatgatgggcaaacgcggcaaaatcgccttcgtcagcctcgaagattcgagcgggcaggctgaaatcatggtcggcggacaaacgctggaaaactgcgccgactgcctcaaagccgaccaagtgctgattatcgaatccaaagtcagccgcgacgattacggcggcggcgacgggctgcgcatcatggcaaaccaagtcatgaccctgcaaacggcgcgcgaacgctacgcccgcagcctcagcctcgcccttgccccgcatcacgacatcggcggactggtacggctgctcgccgcccaccaactgcccgacacgccgcgcatcccgcttcaattgtcgtatgccaacgaaaaagcgtcgggcaggcttcaagtgcctccgaaatggacggttacaccgagttccgcattgttcggcgaactggaaacattgctcggcagccggtcggtgcgcgtgaattgg

SEQ ID NO: 29276 - DNA, 423 bp, Neisseria gonorrhoeae
gtgccgacagacccggattcccgcctgcgcgggaatgacgaagccatccttttggccgaaggtcaaaaatcagccgttaccgggtattacctgaataacggcaaatggcccgccgacaacggcgctgccggcgtggcatcccccgccaccgacatcaaaggcaaatatgttaaggaagttaaagtcgaaaacggcgtcgtcaccgcccaaatggcttcaaccggcgtaaacaatgaaatcaaaggcaaaaaactctccctgtgggccaagcgtcaagacggttcggtaaaatggttctgcggacagccggttaagcgcgacgccggcgccaaaaccggcgccgacgacgtcaaagccgacggcaacaacggcatcaacaccaagcacctgccgtcaacctgccgcgataaacatgatgccaaa

SEQ ID NO: 29277 - DNA, 834 bp, Neisseria gonorrhoeae
atgatagacctgcactgccattccaccgtttccgacggtatgctcccccccgccgaagtcgtccgcctcgcacatcaaaacggctgcacgctgctggcgttgaccgaccacgaccacacgggcggcatctccgaagcgcgtgccgaagccgacaggctcggtttgcgcctgattaacggcgtggaaatttcggtaacgtggcgcgggcgtaccatacacgttgtcggtttggatttcgacgagcaggacgaaaacctgcaaaacctgttggcagatgtccgcaaaggccgtctgaaacgtcttgaagccatcgccgccaagctcgaaaagaaaggcatcggcggcgcatacgacggcgcgctggcgctggcggcaaacaaagaaatggtcagccgcacccacgtcgccgagttcctcatcaaaaacggacacgtcaaaaacaagcagcaggcgttcaccaaatacttgggcgacggcaaatcctgcgcggtacgccacgaatgggcgacgctggcagactgcgtctccgccgtcaacggcgcgggcggcatggcggtgattgcccatccgatgcgttatgatttgtcggcaaccgccaagcgcaacctgtttgaagaatttaaaaacctcggcggcgcgggcatcgaagtccacagcggcaactgctgcaaaaacgaccgcctcaactacgcgcttttggcagaccgcttcggattgttggcaagcgcgggcagcgacttccaccgtttagacgacttcagcggcggcatcctcggcgcgtgtcccgatcttccggaaaactgcaaaccggtgcgggcgcatttttcccgacat

SEQ ID NO: 29278 - DNA, 2271 bp, Neisseria gonorrhoeae
atgaacatcacccgaatcctctcccaagaactctccgccactaccgtgcaaatcaatgccgctatcgagcttttggacgacggcgcgaccgtcccctttatcgcgcgttaccgtaaagaagccacgggcgggctggacgatacgcagctgcgccagcttgccgagcggctgcaatacctgcgcgagttggaagagcgcaaggccgttgtgttaaaaagcattgaagagcaaggcaagctttcagacgacctcagggcgcaaatcgaagccgccgacaacaaaaccgcgttggaagacctgtacctgccctacaaacccaaacgccgcaccaaagcgcaaatcgcgcacgaacacggtttgcagccgctggcggacgtgttgcttgccgaacagccgcaggacgtggaagccgccgcgcaaggctacctgaacgaaaacatccccgacgccaaagccgcgctggatggcgcgcgcgcgattctgatggagcagtttgccgaagacgcggaactcatcggcacgctgcgcgacaagctgtggaacgaagccgaaatccacacgcaagtcgttgaaggcaaagaaaccgaaggcgaaaaattcagcgattatttcgaccgccgcgaacccgtgcgcgccatgcccagccaccgcgcgctggcggttttgcgcggtcgcaacgaaggcgtgttgaacatcgcgctcaaataccagcccgacgacacgccgattacgcagcaaagcgaatacgagcaaatcatcgcccgccgcttcaaggtttcagacggccacaaatggctgcgcgacaccgtgcgcctgacttggcgcgcgaaaatctttttgtcgctggaactcgaagctctcaatcgtttgaaagaagctgccgacactgacgcgattaccgtgttcgcccgcaatctcaaagacttgctgctcgccgcgcccgccgggcggctgaccactttgggactcgaccccggctaccgcaacggcgtgaaatgcgccgtggtggacgacacgggcaaactgctggatacggtcattgtctatttgcatcaagaaaacaatatgttggcaacgttgtcgcgcctgattaaacaacacggtgtgaagctcatcgccatcggcaacggcaccgccagccgcgaaaccgacaaaatcgcgggcgaactggtgcgcggaatgcccgaaagcagcctgcacaaaatcgtcgtttccgaagccggcgcgtcgatttattctgcgtccgaactggcggcgcgcgagtttcccgacttagatgtttccctgcgcggcgcagtgtccatcgcccgcaggctgcaagacccgcttgccgagttggtcaaaatcgaccccaaatccatcggcgtggggcagtatcagcacgacgtgaaccaaagccggctcgccaaatcgctggacgcggtggtcgaagactgcgtgaacgccgtcggcgtggacgcgaacaccgcctccgccccgctcttggcgcggatttccggtttaaatcaaacccttgcccaaaacatcgtcgcctaccgtgatgaaaacggcgcgttcgacagccgaaaaaaattgctaaaagtaccgcgcttgggcgaaaaaaccttcgagcaagcagcaggctttttgcggattaacggcggcaaagagccgctggacgcgagcgccgtccaccccgaagcctatcccgtcgtcgccaaaatgctggcgcaacaaggcattaccgccgccgaactcatcggcaaccgcgagcgtgtgaagcaaatcaaagcatccgacttcaccgacgaacgcttcggtctgccgactattttggacatcctgtccgagctggaaaaacccggccgcgacccgcgcggtgcgtttcagacggcatcgtttgccgaaggcatccacgaaatcagcgacttgcaagtcggcatgatactcgagggcgtggtctccaacgtcgccaacttcggcgcgttcgtggacatcggcgtccatcaggacggcttggtgcacatctccgccctgtctaataagttcgtccaagacccgcgcgaagtggtgaaagccggcgacgtggtgaaagtgaaagtgctggaagtcgatgccgcacgcaaacgcatcgcgctgaccatgcgcttggatgacgaaccgggcggcgcaaaacataaaatgccgtctgaaaaccgcagccgcgaacggacagccggccgcaaaccccaacgcaacgaccgcgccccgaccaattcggcgatggcggatgcgtttgcgaagctgaagcgg

SEQ ID NO: 29279 - DNA, 1290 bp, Neisseria gonorrhoeae
atgcagttctcggcattcggcgaaaaattcacgcaacacagcggcatcctgcaactgatggacgacctcggcgacgcgctcaaaagcgacaagcccgtcaatatgctcggcggcggcaacccggcgcgcattcccgaaatcgatcgggcgttcgccgacatattttccaagctggcggcggaacacgccgtcgagaacatcggcaactactccaatccccaaggcgatgccgcgctgattgacgcgctgaccgccttccccaaccgcgaatacggctggaacctgaccgtcggcaatatcgcgctgaccaacggttcgcaaaacgcgtttttctatttattcaacctcttcggcggcaaattcaagctttcagacggcacatccgcagaaaaagccattttgttgccgctcgcgcccgaatacatcggctatgccgacgtgcatgtcgaagggcggcacttcgtttccgtcaaacccaaaatcgaaaacgtcgaacacgaaggcgaagcaggcttcttcaaataccgcgtggactttgacgcactggaaaacctgcccgaactcaaagcgggcaaaatcggcgcgatttgctgttcgcgcccgaccaacccgaccggcaacgtgttgaccgacggcgaaatggcgcgtttggacgctttggcgcgtgaacacggcattccgccgattatcgacaacgcctacggaatgccgttccccaacattattgacagcggcgtaacgctgaattggcacgaaaacatcatcctctgcttcagcctttccaaagtcggcctgccgggcgttcgcaccggcatcatcgtcgccgcgcccgaagccgtcaaagccgtcagcagcctaaacgcgattgtgaaccttgcccccacgcgcttcggcgcggccatcgccgccccgctgctggaaagcggcgagatgaaacggcttgccgaccaagtcatccggccgttttaccgcaatcaggcgcaaaccgccgtttcgctgctcaagcgcgagctgggcgcgtacccgatgaaaatccacaaacccgaaggcgcgattttcctgtggctctggtttgaaaacctgcccgtttcgtcgcaaaccctgtacgaaatgctcaaagccgaaggtacgctgattattccgggcgaacatttcttcgtcggcatcgacacgcaagactacccgcacgcgggcgagtgcatccgtatgagtatcgcacaggacgctcaaacgctggaaaaaggcatcgccgccatcggcaaaaccgtccgaaaaccgtacgacaacgtt

SEQ ID NO: 29280 - DNA, 1908 bp, Neisseria gonorrhoeae
atgaatctggaaaccctgatcgccctgccgcgcaacatcaagaaaatctgtttcctcatacacgattttctgatgattttcaccgccttttggttcacccaaagcctgaaggccgactactcggacgaatggttcgattttgccaactggcagtcttttttgctgactgccttgctgaccatcacattatttatccgaatggggctttaccgcgccgttacacgctttgtcagtttccacgtcctgaccaccgcctttgccggcagcctcgcctccgccgtattgttcttcctcaacacattgatttttgaagaaaggctgcgcctcgccctgccgattgtctatttcttactgctgtttgtttccgtgaccggctcgcgtatggttttgcgcggactcctgtccgaccaccagaaaaaaacacatgaccccgtcatcatttacggcgcggggcgttcgggtcggcagctccttgaagccgtcaaacagatgcgcgaatattccgccgccgcctttgtggacgacaaccccaagctttggcacaccgtcatctacgaccttgccgtttaccagcccgatgccatcgccttcctcatcgaacgctacggcgtggaaaaaatcctgctcgccattcccagcgcgactcaggaacaacgccgccgaatcatcagcaaactgaaagcctatccgtgcgaagtgttgaccattcccggaatgaaagacctgatggacgggaaaatcagcatcggcacgctcaaaaaaatctctgtgtccgacctgctcgggcgcgattccgtcgcacccgacgaccgcctcatgaatgccgacaccgaaggcaaaaccgtcatggtaaccggcgcgggcggctccatcggttcggaactctgccgccagattatccgccgccgccccgaaaggctgctgctgttcgagctgtccgaattcgccctgtacaccgttgaaaaagaattgtgcgaatactgcgcccgaaacggcatcgccgccgaaatccttccctttttgggttcggtgcaaaaccgcacgctgctcacgcacattatgaccgccttttccgttgcgaccgtctatcacgccgccgcctacaaacacgtccctatggtcgagttcaacaccgtcgagggcatacgcaacaacatcttcggcacactcgaatgcgcgcttgccgccacggcttcgggcgtggaaaccttcgtcctcatctccaccgacaaagccgtccgccccgccaacacgatgggtgcgggcaaacgcatggcggaactctgccttcaggcactcgccgccgaacccggacaaaaaacccgcttcagcatggtacgtttcggcaatgttttaggctcgtccggctccgtcgtcccgctgtttgaaaaacagattgccgaaggcggccccatcaccctgacccaccccgacatcacgcgctatttcatgaccatacccgaagcggcgcaactggttatccaagccggcgcgatgggcagaggcggcgacgtgttcgtcctcgatatgggcgaatccgtcaaaatcaccgaccttgcccgccaaatgattaccttaagcggactcaaacccaaaacgcccgaacagcccgacggcgacatcgaaatcctcattaccgggctgcgccccggcgaaaaactctacgaagagttgctcatcggcgacaacgtccgcaaaaccggccatccgcgcatcatgaccgccgacgagaccatgctgccgtggcacgaactctccgccctgctcgaccgcatccgcaccgcctgcgaccgttacgaccagcaggcaatccgcgacctgctcgtcaacgccccgaccggctttaccccgaccggcggcatctgcgacctgctttgggtatgcgaaacacacagaaaaaatgccgtc

SEQ ID NO: 29281 - DNA, 1536 bp, Neisseria gonorrhoeae
atgaatatgcttggagctttggcaaaagtcggcagcctgacgatggtgtcgcgcgttttgggatttgtgcgcgatacggtcattgcgcgggcattcggcgcgggtatggcgacggatgcgttttttgtcgcgttcaaactgcccaacctgcttcgccgcgtgtttgcggagggggcgtttgcccaagcgtttgtgccgattttggcggaatataaggaaacgcgttctaaagaggcgacggaggcttttatccgccacgttgcgggaatgctgtcgtttgtgctgatcgtcgttaccgcgctgggcatacttgccgcgccttgggtgatttatgtttccgcgcccggctttaccaaagacgcggacaagttccaactttccatcagcctgctgcggattacgtttccttatatattattgatttctttgtcttcttttgtcggctcgatactcaattcctaccataagttcggcattcccgcgtttacgcccacgtttttaaacatctcttttatcgtattcgcactgtttttcgtgccgtatttcgatccgcccgttaccgcgctggcgtgggcggtttttgtcggcggtattttgcagctcggtttccaactgccgtggctggcgaaactgggctttttgaaactgcccaaactgaatttcaaagatgcggcggtcaaccgcgtcatgaaacagatggcgcctgcgattttgggcgtgagcgtggcgcaaatttctttggttatcaacacgattttcgcgtcttatctgcaatcgggcagcgtttcatggatgtattacgccgaccgcatgatggagctgcccggcggcgtgctgggggctgcactcggtacaattttgctgccgactttgtccaaacactcggcaaaccaagatacggaacagttttccgccctgctcgactggggtttgcgcctgtgcatgctgctgacgctgccggcggcggccggactggcggtattgtcgttcccgctggtggcgacgctgtttatgtaccgagaattcacgctgtttgacgcacaaatgacgcaacacgcgctgattgcctattctttcggtttaatcggtttaattatgattaaagtgttggcatccggcttttatgcgcggcaaaacatcaaaacgcccgtcaaaatcgccatcttcacgctcatctgcacgcagttgatgaacctcgcctttatcggtccgttgaaacacgccgggctttcgctcgccatcggcctgggcgcgtgcatcaacgccggattgttgttcttcctgttgcgcaaacacggtatttaccggcccggcaggggttgggcggcgttcttggcgaaaatgctgctcgcgctcgccgtgatgtgcggcggactgtgggcggcgcaggcttgcctgccgttcgaatgggcgcacgccggcggaatgcggaaagcggggcagctctgcatcctgattgccgtcggcggcggactgtatttcgcatctctggcggctttgggcttccgtccgcgccatttcaaacgcgtggaaagc

SEQ ID NO: 29282 - DNA, 2052 bp, Neisseria gonorrhoeae
atgacacgcaaaatcttagttacctccgccctgccctatgccaacggcagcatccacctcggccacatggtcgaacacatccaaaccgacgtttgggtgcgctttcaaaaactgcgcggccacgaatgctactactgctgcgccgacgacacccacggcacgcccgttatgcttgccgcgcaaaaacaaggcatcgcgcccgaagacatgattgccaaagtgcgcaaagagcaccttgccgactttaccggctttttcatcggctacgacaattattacagcacccattccactgaaaacaaacagttttcccaagacatttaccgcgcgctgaaagccaacggcaaaatcgaaagccgcgtcatcgagcagcttttcgaccccgaaaaacaaatgttcctgcccgaccgcttcgtcaaaggcgaatgcccgaaatgccacgcccaagaccaatacggcgacaactgcgaagtctgcggcacgacctattccccgaccgaactgatcaacccgtattccgccgtttccggcgcgaaacccgaattgcgcgaatccgaacacttcttcttcaaactgggcgaatgcgccgacttcctcaaagcatggacttccggcaacaacccgcacgacggcaagccccatctgcaacccgaagccctcaacaaaatgaaggaatggctgggcgaaggcgaagaaaccaccctgtccgactgggacatttcccgcgacgcgccgtatttcggttttgaaatccccgacgcgccgggcaaatacttctacgtttggctggacgcgcccgtcggctatatggcgtcgtttaaaaacctgtgcgaccgcatcggcatcgatttcgacgaatacttcaaagccgacagccaaaccgagatgtaccacttcatcggcaaagacatcctctatttccacgccctgttctggcccgccatgctgcatttctccggccaccgcgccccgaccggcgtgtacgcacacggctttttgaccgtggacggacaaaaaatgtccaaatcgcgcggcaccttcatcaccgccaaatcttatctggaacaaggcctgaaccccgagtggatgcgctactacatcgccgccaagctcaacggcaaaatcgaagacaccgatttgaacctgcaagactttatttcccgcgtcaacagcgaccttgtcggcaaatacgtcaacatcgccgcccgcgcttcgggtttcatcgccaaacgctttgaaggtcgtccgaaagacgtttcaggcagcgcattgctggcaaaactcgccgccgaaagcgacaccatcgccgagcaatacgaaaaccgcgaatacgcccgcgccctgcgcgacatcatggcattggcagacattgtcaacgaatacgtcgatgccaacaagccgtgggagctcgccaaacaagaaggtcaagacgaacgcctgcacgaagtatgcagcgaactcatcaacgccttcaccatgctgaccgcctacctcgcccccgtgttgccgcaaaccgccgccaacgccgcgcgtttcctcaatctggacgcgattacctggaagaacacgcgcgaaaccctaggcgaacacgccatcaacaaatacgaacatttaatgcaacgagtggagcaaaaacaagtggacgatttgatcgaagccaacaaacaaagcattcagacggcatccgcgcccgttgaagagggtaaatacgaaaaagtcgccgaacaggcgggcttcgacgactttatgaaaatcgatatgcgcgtcgccaaagtattgaactgcgaagccgtcgaaggcagcaccaaacttttgaaattcgacctcgatttcggttttgaaaaacgcatcatcttctccggcatcgccgcgtcttacccaaatcctgccgaattgaacggtcgcatggtcatcgcagtcgccaacttcgccccacgcaaaatggcaaaattcggcgtatccgaaggtatgatcctctccgccgccacggcagacggcaaactgaagctgcttgacgtggatgcgggcgctcagccgggcgacaaagtcggt

SEQ ID NO: 29283 - DNA, 1836 bp, Neisseria gonorrhoeae
atgtgcggtatcgtcggcgccatccgcgcccatcacaacgtcgtcgattttctgaccgacggcctcaaacgcctcgaataccggggttatgactcatcaggcattgctgtgtattcagacggcaaaatcaaacgcgtgcgccgcgtcggacgcgtgcagcttatggaggacgcggcacgcgaaaaaggcatcagcggcggcatcggcatcgggcatacgcgctgggcgacacacggcggcgttaccgagccgaacgcccacccgcacatcagcggcggtatgattgccgtcgtccacaacggcatcatcgaaaactttgaaagcgaacgcaaacgcttggaaggtttgggataccggtttgaatcgcaaacggataccgaagtcatcgcacacagcatcaaccacgaatacgcgcaaaacggcggcaggctgtttgaagccgtgcaggaagcggtcaaacgtttccacggcgcatacgccatcgcggttattgcccaagacaagcctgatgaattagttgtggcgcgtatgggctgcccgcttttggtcgctttgggcgacgatgaaacctttatcgcttcggacgtatccgccgtcatcgcctttacgcgccgcgtggcgtacctcgaagacggcgacatcgcgctgctggcttcagacggcatcaaacggctgaccgataaaaacggcctgcctgccgaacgcaaagtcaaggtatccgaactctcgcccgcctctttggaaccgggtccgcacagccactttatgcaaaaagaaatccacgagcagccgcgcgcgattgcggacacggcggaagttttcctcgacggcggattcatccccgaaaacttcggcaaaaatgccaaaagcgtgtttgaaagcatccgcagcgtcaaaatccttgcctgcggcacgtcctattacgccgcgctgaccgccaaatattggttggaatccatcgccaaaatcccggccgacgtcgaaatcgcaagcgaataccggtaccgcagcgtgattgccgaccccgaccaactggtcattaccatttcccaatccggcgaaacgctggacacgatggaggctttgaaatacgccaaatctttgggacaccgccacagcctctccgtctgcaacgtgatggaatccgccctgccgcgcgaaagcagccttgtgctttatacccgtgccggtgcggaaatcggcgtcgcctcgactaaagcatttaccacgcaactggtcgtgctgttcggtttggcggtaacgctggcgaaagtgcgcggcgtggtatccggcgaagatgaagcacgttacaccgaagaactccgccagcttcccggcagcgtgcagcacgctttgaacctcgaaccgcaaattgccgcttgggcgcaacagtttgccaagaaaaccagcgcgctgtttttggggcgcggcatccattacccgattgcccttgaaggtgcgttgaagctaaaggaaatcacctacatccacgccgaagcctatcctgccggcgaactgaaacacgggccgcttgccttggtggacgaaaacatgcccgtcgtcgtcatcgcgcccaacgacagcctgttggacaaagtcaaagccaatatgcaggaagtcggcgcgcgcggcggcgaacttttcgtctttgccgacctcgacagcaattttaatgccaccgaaggcgtacacgttatccgcgcacctcgccacgtcggcgaactgtcccccgtcgtgcataccgtccccgtgcagctcctcgcctaccacaccgccctcgcgcgcggcacggatgtggacaagccgcgcaacctggcgaaatccgtaaccgtcgaa

SEQ ID NO: 29284 - DNA, 780 bp, Neisseria gonorrhoeae
atgaccgacatcctcaataaaatccttgccaccaaggcacaggaagttgccgcccaaaaagccgccgtcaacgccgaacacatccgcgcacttgccgcagaagccgcgcccgtccgcagcttcatcgattcgatacgcggcaaacaccgcctaaacctgcccgccgtcattgccgaaatcaaaaaggcaagcccgagcaaagggttaatccgccccgacttccgccctgccgagattgcccgcgcctatgaaaacgccggggcggcgtgtttgtcggtactgaccgacgaaccctatttccaaggttcgcccgaatacctcaaacaggcgcgcgaagccgtattgctgcccgtgctgcgcaaagacttcatcatcgacgaataccaggtttatcaggcgcgcgcatggggggcggatgccgtcctgctgattgccgccgcactggaacagggacaattggaacgctttgaggcgctggcgcacgaattgggcatgaccgtcctgctcgagctgcacgacgaaaccgaattggaaaaatgccgcaacctgaccacgccgttgtggggcgtaaacaaccgcaacctgcggacttttgaagtctccctcgaccaaaccctgtcgctgctgcccgcgctggaaggcaaaaccgtcgttaccgaaagcggcattacaggcaaggcggatgtggaatttatgcgggcgcgcggcgtgcataccttcctgatcggcgaaacgtttatgcgtgccgacgatattggggcggaagtgggcaaactcttc

SEQ ID NO: 29285 - DNA, 1882 bp, Neisseria gonorrhoeae
cgacccaccgccagacagattttgcacgaagtattcggctatcccgaatttcgcggcaggcaggaggatgtcatcaatactttggcaggcggcggcagtttgacggtgctgatgccgacgggcgggggcaagtctttgtgttaccagattccggcgctgatgcgcgaaggcgtggcggttgtcgtatcgccgctgattgcgctgatgaacgaccaagtggccagcctgcatgtggccgggattgaagcggcggcagtcaacagcggcacatcggcagatgaggcgcgcgagattgccgacaagcttgcccaaggccgtctgaagctgctttatgtcgcgccggaacgcttggttaccgaccgctttttacgttttctcgaccaacaaaccgtcagcctgttcgccattgacgaagcgcactgcgtcagccggtggggacacgatttccgccccgaatatcaacagctcggtatgcttgccgaacgctatccgaacatcccgcgcatcgccctgaccgccaccgccgatgccgccacgcgcgccgacatcaagcattatctgcacttggacgacgcgtccgaatttgtctccagctttgaccgcacgaatatttattatcaggttatcgaaaaaaacaacggcaaaaaacaattgctggatttcatccgcaaagaaatgacggggcaaagcggcattgtgtattgcctaagccgcaaaaaggttgaagatgcggcgcagtttttgcgtgaaaacggattaaacgcgattccgtatcatgccggtttgagcatggacgtgcgcgaggaaaaccaacgccgctttacgcatgaagacaatattatcgtggtggcgaccgtggcgttcggcatgggcatagacaaacccgacgtgcgctttgtcgcccatctcgatatgccccagagtgtcgaacatttctatcaggaatcagggcgcgccggccgggacgggctgcctgccgtgagttggctgtgttacggcttgaacgattgggtgttgctgcgcgaacggattgccgaaggcaacagcgacgaggtgcaaaagcaaatcgaaatgcaaaaactcgatgccatgctttccgtctgcgaaaccgccgcctgccgccgcgtactgctgctcaaacatttcggcgaagcatccgaaccctgcggacattgtgacaactgcctgcatccgcccgtacggtttgacggcacggtgttggtgcaaaaattactcagctgcgtgtaccgcgccggacaacgctttgccgccggttacatcaccaaccttttgcgcggcaaaagcgacgattggatacgcggcaaccggcacgagcaactgtccacattcggcatcggcgcggaattgtccgacaaagaatggcgcagcgtcatccgccagtgcatcagcctcggctacctcaccgtcaacattgcccgatatcaggcattgcaactgaccgaagccgccaaaaaagtcctcaaaggcgaaaccgaagtgatgctgcgcccgctcaagcgcgacaagcccgccacccgcaccctcaaagacaactggctgcgtaccgaacgcgaagaacgcctgtggcaggcattgcgcgtttggcgcatgaaacaggctgaagccgaaggcatccccgcctatatgattttcggcgacaaaaccctgcgcgaccttgtcgaaaaaatgccgcaaaacctcaacgggctgcacgacatctacggcttgggcgaagccaaaaccgaacgtttcggacacggcatactcaaagtctgccaaaacgctgccgactttagccacgatgccgtcatccgtccgcaaaccgaacgcgaacaacaactgcgtcaaaaactcgaagcctggcggtatgaacaggcaaggg

SEQ ID NO: 29286 - DNA, 987 bp, Neisseria gonorrhoeae
atggaaaatgtaaaccgtatcgttgcagaaggcattgccgcagtagaagctgcgcaagacttcaacgctctagaacaaatcaaagcccgttatcttggcaaaaccggcgagttgaccggacttctgaaaactttggggcaaatgtcgcctgaagagcgcaaaaccataggtgcgcatatcaatgaatgcaaaaaccggtttcagacggcttttaatgccaaacgcgatgccctcaacgaagccaagctgcaagcccgacttgccgccgaagccctcgacattaccctgcccggacgcgctcaggaaggcggcagcctgcatcccgtaaccctgaccttgcaacgtgtggtcgaactctttcacggaatgggtttcgaagtggcggacgggcctgaaatcgaagacgattttcacaatttccaagccctgaacatccctgcaaaccatcctgcccgtgcgatgcaggatacgttttacgttgaaaacggcgatgttttgcgtacgcacacttccccgattcaaatccgctatatgctcgataaaaaagagccgcccatccgcattatcgcccccggccgcgtttaccgtgtggacagcgatgccacgcactcgcctatgttccatcaggccgagggtttgtgggtagaagagggcgtaacttttgccgacttaaaagcagtgttcactgactttatccgtcgcttctttgaacgcgatgacctacaagtgcgtttccgtccgtctttcttcccgtttaccgagccttctgccgaaatcgacatcatgggagaaaacggcaaatggttggaagtaggcggttgcggtatggtacatcctaatgtgttgaaaaatgtcaatatcgaccctgaaaaatataccggtttcgctttcggtattggtctcgaccgctttgccatgttgcgctacaacgtcaatgacctgcgcttgttcttcgataacgatttgaacttcttgaagcagtttgaa

SEQ ID NO: 29287 - DNA, 447 bp, Neisseria gonorrhoeae
atgagcaccttcttccggcaaaccgcccaagccatgactgccaaacacatcggccgcttcccgctattggagttggaccaggtgattgattggcagccgatcgaacaatacctgaaccgtcaaaaaacccgttacctcagagaccgccgcggccgccccgcctatcccctgtcgtccatgttcaaagccgtcctgcccggacaatggcacagcctctccgatcccgaactcgaacacagcctcatcacccgcatcggtttcaacctgttttgccgttttgacggaccgggcatccccggttgcagcaccttatgccgctaccgtaaattccgctatgcgcgggcagcctatttcgggctgctcaaagtgggtgcgcaaagccacctgaaggcgatgtgtttgaacctgttgaaagccgccaacaggctaagtgcgcccgctgccgcc

SEQ ID NO: 29288 - DNA, 747 bp, Neisseria gonorrhoeae
atgcctgatgctgccaaaaaagtttacctgatacacggttggggggcgaaccgccacgcgttcgacgatttgatgccgcgcctgcccgcaacgtggccggtgtccgccgtcgatttgcccggacacggggacgcgcccttcgcgcaacccttcgatattgaggcagctgccgacggcattgccgctcaaatcgatacgtcggccgacattctcggctggtcactcggcggattggtcgcgctgtatctggcggcgcgccatcccgacaaagtccgttcgctctgcctgacggcgagtttcgcacggctgacggctgccgaagactatcccgaagggcttgccgcgcctgcactgggcaaaatggtcggcgcgttccgaacggattatgccaaacatatcaaacagtttctacaactccagcttctgcacacgcctgatgccgccgaaatcatcggcagaatcctgcccgatttggcgcgctgcggcacgcctcaagccttacaggaagctttggacgcggcggaaagggcggatgcgcggcatttgttggacaagatagatgttccggtactgctggtgttcggcggcaaagacgcgattacaccgctgcgtatgggcgagtatctgcatcggcatttgaaaggaagcaggctggttgtgatggaaaaggcggcacacgcgccgtttttgagccatgcggaagcgtttgccgcgctgtgccgcgactttgtcgaagggggtttgaca

SEQ ID NO: 29289 - DNA, 2361 bp, Neisseria gonorrhoeae
atgcaattctcctactcatggctgaaaacccaagccaatcctgatctttctgccgataaactggaacatcttttgaccatggccggtttggaagtggaagaaatcgatactgccgcccctgctttcagtggcgtggttgttgccgaagtaaaatctgttgaaaaacatcctgatgcagaccgtttgaacgttactcaagttgatgccggtacgggcgagttggttcagattgtttgtggtgcgccgaatgtcaagccgggcattaaagtgccgtgttcgttgccggttgccgttttgccgggcaattttaaaattaagccgactaaaatgcgcggcgtaccatcaaacggtatgctgtgttcgaccaatgaactgggtttgcctgatgatggtgtagacggcctgcacattctgcctgaagatgcgcctgtcggtaccaacatccgcgaatacttggatttggacgatatgctgtttacgttgaaaattacgcctaaccgcgctgattgcttgagtgttaagggcattgcgcgtgaggtttctgcgttgactcaatgtgcgtttacgcctgttgaaattcagacggcccctatcggcagtgagaaaaaacaggctgtccgtattgatgcaccggctgactgcggccgttttatcagccgcgttattgaaaatgtcaacgcgaaagcggctactcctgattggatgaaacaacgtttggaacgcagcggtatccgcagcatttccgcattggtggacattggcaactatgtgatgctggaaatcggtcagcctatgcatgttttcgatgctgataagctgtcgggcagtttgattgtccgccgtgctcaaaatggcgagactttggcgtgtctgaatgagaagacggttactttggctgacaatacactggtggtcgctgatgaaaaaggtgcgttgagcttggccggcttgatgggtggcgcggcgagcgcggtttcagacggcacgcaaaatatcgtgctggaagcggcttggtttgagcccgaaatcatcgtcggcaaatcgcgccaatacggtttcggttcggattcgtcgttccgcttcgagcgcggcgtggattaccgtttgcaggcggatgccattgaacgcgccaccgaattggttttgcagatttgcggcggtgcggcaggcgagatggtggaagcacaaggtaaattgcccgaagccaagcaggtcggattgcgtttgggtcgtctgaaaaccgtgttgggcgtggacattcctgccgaacaggtggaaaccattttgcaacacttgggtctgcagcctgagaaaacggcggaaggcttccgcattaccgcgccgagcttccgtttcgacatcgaaattgaggctgatttgattgaagaaatcggacgcgtttacggctatgaaaacatccccgacgattacacgtcaggccgtctgaaaatgtcggaactgcccgaaacacgccgtccgcgttttgccgtttacaacgaaatggcggcgcgcggctaccgcgaagtgatcagctatgccttcgttgacgagcagtgggaactcgattttgccgccaacgccgcccccatccgcctgcaaaacccgctggcggcgcaatatgccgtgatgcgttctacgttgattggcggcttagtggaaattttgcaaaacaacctgaaccgcaagcaaaaccgcgtgcgcgtgtttgaaatcgcctgcgtgttcggcaaaggttcagacggccggtttgtccaaaacgaacgcatcggcggtctgtggtacggcgcggcgatgcccgaacaatggggtgagaaaacgcgcaatgcggatttttacgacatcaaggcggacgtggaaaatctgttgaaaaacaaagcggtcgagttcgttaaaaccggacatcccgccctgcatcccggacgtgccgccaatatcgtttcagacggcaaagtcatcggctttgtcggcgaactgcatccgaaatggctgcaaaaatacgacctgccgcaagcgccgctggtatttgaaatcgatatggcggctgtgttggaatgcgggaaaacgcgctatcgggccgtatcgaaattccagccggtgcgccgcgatttggcgtttgtgatgccggaagttatgaatcatgatgatttactgcttgtcttgaaaggcgcagcaaacaagttggtacaggaaatcagcgtgtttgacgtgtatcgcggcacgggtctgcccgaagggatgaagagcgtggcggttaaagtgattttgcaggatatggaaaacacgctgacggatgaggcggtcgagccgcttattggaaaactgattggcgtggcaacggaggcaggggcgcggcttcgcagt

SEQ ID NO: 29290 - DNA, 822 bp, Neisseria gonorrhoeae
atggacggcgcacaaccgaaaacaaatttttttgaacgcctgattgcccgactcgcccgcgaacccgattccgccgaagacgtattaaacctgcttcggcaggcgcacgaacaggaagtttttgatgccgacacactgacccggctggaaaaagtattggactttgccgagctggaagtgcgcgatgcgatgattacgcgcagccgcatgaacgtattgaaagaaaacgacagcatcgaacgcatcaccgcctacgtcatcgataccgcccattcgcgcttccccgtcatcggcgaagacaaagacgaagttttgggcattttgcacgccaaagacctgctcaaatatatgttcaaccccgagcagttccacctgaaatccgtcttgcgccctgccgttttcgtgcccgaaggcaaatctttgaccgcccttttaaaagagttccgcgaacagcgcaaccatatggcaatcgtcatcgacgaatacggcggcacgtcgggtttggtcacctttgaagacatcatcgagcaaatcgtcggtgacatcgaagacgagtttgacgaagacgaaagcgccgacaacatccactccgtttccgccgaacgctggcgcatccacgcggctaccgaaatcgaagacatcaacgcctttttcggtacggaatacggcagcgaagaagccgacaccatcggcggcttggtcattcaggaattgggacacctgcccgtgcgcggcgaaaaagtccttatcggcggtttgcagttcaccgtcgcccgcgccgacaaccgccgcctgcacacgctgatggcgacccgcgtgaag

SEQ ID NO: 29291 - DNA, 933 bp, Neisseria gonorrhoeae
atgaacccgaaaaaacttgttatcgccagccgcgaaagcctgcttgccatgtggcaggcgaaacatatccaaggccgtctgaaggcgctgtatcccgattgcgaagtcgaaattttgggcatgaccacgcgcggcgaccggattttggacagaactttgtcaaaagtcggcgggaaaggcttgtttgtcaaagagttggaacaatcccttcaagacgggcgcgccgatttggcggtgcattcgattaaggacgtgccgatggatttgcccgaaggcttcgcccttgccgccatcagcgaacgcgccaatccgtttgacgcgtttgtgtccaaccgatacgcgcgtttggaagaaatgcccgaaggcgcggttgtcggcacatccagcctgcgccgcgaagcccagttgcgcgcgcgctatccgcatttggtaattaaacccctgcgcggcaatgtacaaacccgtttgtccaaactcgacaacggcgaatacgatgcaattatcttggctgccgccgggttgcagcgtctggaattggatgaacgcatccgcatgattttgtcggaatccgacagcctgcctgccgccggacaaggcgcattgggtattgaaattgccacgcatcgcgaagatttgtacgaagtcttgaagccgttaaaccacgataccacacacgcctgcgttaccgccgaacgcgctttggcgcgcgctttgggcggaagctgccaagtgccgctggccgcgtattgcactgaagaaaacgggctgctgatcttgcgcggattggtcgggcatcccgacggatcgattgtgttgcaggcggacgcgcaagcccctgccggatatgccgatgcgcttggacgtgcggttgccaaaaaactggcggacgacggtgcgcaggaattgattggagcagtattgaatacggaaaat

SEQ ID NO: 29292 - DNA, 1224 bp, Neisseria gonorrhoeae
atgaccgatccgcttcccgtttatcctgtcaaacgtgcagaaggggtgtttatcgaattggcggacggcacgcggctgattgacgggatgtcgtcttggtggtgtgcgatacacggttacaatcatcccgttttgaatcaggcggttgagaatcagatgaaacaaatggcgcacgtgatgttcggcggcctgacgcacgagccggcggtggagctgggcaagttgttggtcgggattttgccgcaggggctggaccgtattttttatgcggattcgggttcggtttcggtagaagtcgcgttgaaaatggcggtgcaataccagcaggcgcggggtctgacggcgaagcagaatattgcgacggtacggcgcgggtatcacggcgatacttggaacgcgatgtccgtttgtgatccggaaacggggatgcaccatattttcggcagcgcgttgccgcagcgttattttgtcgataatccgaaaaaccgtttcgacgatgaatgggacggggcggatttgcagcctgtccgcgccttgtttgaagcgcatcatgtggatattgccgcctttattttagaaccggtcgtgcaaggcgcgggcggcatgtatttttatcatccgcagtatcttcgcggcttgcgcgatttgtgcgacgaatttgatatcgtgttgatttttgacgaaatcgccaccggattcgggcgcacgggcaagatgtttgcctgcgaacacgcggaggtcgtgccggatattatgtgtatcggcaagggtttgagcggcggctatatgacgctggcggcggcaatcacttcgcaaaaagttaccgaaacgatttcacgcggcgaagcgggcgtgtttatgcacggcccgacatttatggcgaacccgctggcgtgtgccgttgcctgtgcttcggtcaagctgcttttatcccaagactggcaggcaaatatccgccgtatcgaaagcatcttaaaaggccgtctgaaagccgcgtgggacattcgcggcgtgaaagacgtgcgcgttttgggtgctatcggcgtgatagagttggaaaaaggcgtggatatggcgcgttttcaagcggattgtgtggcgcagggcatttgggtacgcccgttcggcaggctggtgtatctgatgccgccctatatcatttcagacggcattttgaccaaacttgccgataaaaccgtgcaaatcttgaaggaacacagcaaa

SEQ ID NO: 29293 - DNA, 1265 bp, Neisseria gonorrhoeae
ttttcctctttaggtttgggtacggaactggtttccgcactgaccgcgcaaggttacgaaaacccgacgcccatccaagccgcggccattcccaaagcactggccggacacgacctgcttgccgccgcgcaaaccggcacaggcaaaaccgctgcctttatgctgcccagtctggaacgcctcaaacgttacgccaccgccagcacctcgcctgcaatgcaccccgtgcgtatgctcgtgttgaccccgacgcgcgaacttgccgaccaaatcgaccaaaacgtgcagggctacattaaaaacctgccgctgcggcataccgtcctcttcggcggtgtcaacatggacaaacaaaccgccgacctgcgtgccggctgcgaaatagtcgtcgccaccgtcggacggctgctcgaccatgtgaaacagaaaaacatcagtttaaacaaagccgaaatcgtcgttctggacgaagcagaccgcatgttggatatggggtttatcgacgacatccgcaaaatcatgcagatgctgccccgccaacgccaaaccctgctcttttccgccaccttctccgcaccgatacgcaaactggcgcaagacttcatgaacgcgcccgaaaccgtcgaggttgccgcccaaaacaccaccaacgccaacgtcgaacaacacatcatcgccgtcgataccttccaaaagcgcaacctgctcgaacggctgattgtcgatctgcatatgaaccaagttatcgtcttttgcaaaaccaaacaaagcgtcgaccgcgtaacgcgcgaactggtgcgccgcaacctgtccgcacaggcgatacacggcgaccgttcccaacaaagcaggctcgaaacactcaacgccttcaaagacggcagcctgcgcgtcctcgtcgccaccgatatcgccgcgcgtgggctggacatcgccgaactgcccttcgtcatcaattacgaaatgcccgcccagcccgaagactacatccaccgcatcggacgcacggggcgcgccggtgcggacggcgtggcgatttccctgatggacgaatccgaacagaaaatgtttgaggccatcaaagaactgaccggcaacaagctgctcatcgaacgcatcgaaggcttcgagccccgatggtgggaacaggaaggctcaaaaccggaaaaaaccgaaacaagcgaaccgagacaacgcaaccgctacgaatccgccagggctcagcgcgaaaaaaatacccggccggaaaccacggcaaacgatgc

SEQ ID NO: 29294 - DNA, 1002 bp, Neisseria gonorrhoeae
atgcacatcggcggttattttatcgacaaccccatcgcacttgcgccgatggcgggcattgccgacaaacccttccgccgcctctgtcgggcgtttggcgcaggttgggcggtgtgcgaaatgctggccagcgatccgacgctcaggaataccggaaaaaccctgcaccgcagtgattttgccgatgaaggcggcatcgttgccgtgcagattgccggcagcgaccccgaacagatggcggatgcggcgcgttacaacgtcggactcggggcgcaggtcatcgacatcaatatgggctgccccgccaagaaagtgtgcaacgtccaagccggtagcgcgctgatgcaggacgagccgctggttgccgccattttggaggcggtggtcaaggcggcgggcgtacccgttaccctcaaaacccgtttgggttggcacgacgaccatcaaaacctgcccgccatcgccaaaatcgccgaagattgcggcattgccgcccttgccgtccacgggcgcgcgcgcacgcaaatgtacaaaggcgaggcgcgttacgaactcatcgccgagaccaaaagccgtctgaacatcccggcctgggtcaacggcgacatcacttcgccgcaaaaagccgccgccgtcctcaaacaaaccgccgccgacggcatcatgatagggcgcggcgcgcaaggcaggccgtggtttttccgcgatttgaagcattatgccgaacacggcgttttaccgcctgccttgagtttggcagaatgcagagccgccattttgaaccacatccgcgccatgcacgcgttttatggtgagaccgtcggtgtgcgcatcgcacgcaaacacataggctggtacatcggcgaaatgcccgacggcgaacaggcgcggcgtgaaatcaaccgcttggacaatgcggcggcgcaatacgacacacttgccggttatcttgaaaggcttgccggaaaaaccgaccgttgggcgtgcggctatcgggaaggg

SEQ ID NO: 29295 - DNA, 842 bp, Neisseria gonorrhoeae
ctggtcgcttttttaattatgttgcgcgagggtatcgaagccgcgctcatcgtcggcatcgttgccggttttttgaaacagtccggacattcaaaaactgatgcctaaggtctggttcggggtcgtccttgcttctttgatgtgtttgggcatcggatacggcatccattcggcaacgggcgagattccccggaagcagcaggagttcgtcgtcggcattatcggtttggttgccgtcgcgatgctgacttgtgtggttttatggatgaaaaaggcggcgcgttcgatgaagcggcagcttcgggattctgtacaggcggctttgaaccgtggcagcggtcaaggatgggccttggtcggtatggcgtttcttgccgtggcgcgcgaaggtttggagagcgttttttttcctgcttgccgtattcaaacagagcccgacgtggcagatgccggccggcgcggtagcgggggttttggctgccgccgtgattggcgcgttgatttatcagggcgggatgcgcctgaatctggcgaagtttttccgttggacgggggcgtttctgattatcgttgccgccggtctgcttgccggctcgctgcgtgcgctgcatgaggcaggcatttggaacgcgcttcaggacattgtgttcgacccatcaaaatatttgcacgaagacagtccgttgggtgtgctgctcggcggatttttcggctataccgaccatccggcgcagggcggggccttggtttggctgctgtaccttattcccgtcatgatttggtttttgcgcggcagcaggccgtctgaaactttaacccgtaaagaggaattgaaatgagaa

SEQ ID NO: 29296 - DNA, 1263 bp, Neisseria gonorrhoeae
atgagtcaaaaccaacccgcacaaccgaccaaacgcaatctgttcaaaaccgcccttgccgtcggcgcaatcggcgcaatcggaggttatttcggcggcaaaaaacagggcgaaaccgccgaacgcaccgccgaaagccaacactcgccccaagcctatccctgctacggcgaacatcaggcaggtatcgttacgccgcggcaggcgttttccattatgtgcgccttcgacgtaaccgcgcaaagtgccaagcagctggaaaacctgttccgcacactgaccgcccgcatcgagtttctcacccaaggcggagaataccaagacggcgacgacaaactcccgtcagccggcagcggcattttgggtaaagccttcaaccccgacggattgaccgttaccgtgggggtgggcagcagcctgtttgacggccggttcggactcaaagacaaaaaaacggttcatttgcaggaaatgcgcgacttccccaacgataagctgcaaaaaagctggtgcgacggcgatttgagcctgcaaatctgcgccttcacccccgaaacctgccaaaccgccctgcgcgacatcatcaaacacaccgcccaaaccgccgtcatccgctggagtatcgacgggtggcagcctaaatccgaacccggcgcgatggcggcgcgcaacctgttgggcttccgagacggcacgggcaaccccaaggtttccgatcccaaaaccgccgacgaggttttatggacgggcgtggccgccaacagcctcgacgaaccggagtgggcgaaaaacggcagctatcaggcagtccgccttatccgccgctttgtcgagttttgggacaggacgccgcttcaagagcaaaccgacattttcgggcggcgaaaatacagcggggcgccgatggacggcaaaaaagaagccgaccaaccggatttcgccaaagaccccgagggtgatatcacgcccaaagacagccatatgcgcctggcgaatccgcgcgatcccgaattcctcaaaaaacactgcctcttccgccgcgcctacagctattctcgcggacccgcctcaagcggacagcttgatgtcgggctggtgttcgtctgctatcaggcaaatcttgccgacggtttcatcttcgtgcaaaacctcctcaacggcgaaccgctggaagaatacatcagccccttcggcggcggctatttcttcgtcttgcccggcgtgggaaaaggcggattcttgggacaagggctgccgggcgta

SEQ ID NO: 29297 - DNA, 648 bp, Neisseria gonorrhoeae; identical to SEQ ID NO: 28902

SEQ ID NO: 29298 - DNA, 1413 bp, Neisseria gonorrhoeae
atgccgtctgaaaccgcttcagacggcatggcacaggaaaacgctatgccgcaaaacactttaaacaccgtcatcctcgccgccggcaaaggcacgcgcatgtattcccaaatgcccaaagtgctgcactgcatcggcggcaagcccatggtcgagcgcgttatcgacaccgccgccgcgctgaatccgcaaaacatctgcgtcgtcgtcggacacggcaaagagcaagttttagacactgtcaaacgcgatgccgtctgggtcgaacaaaccgaacagctcggcaccggccacgccgtcaaaaccgccctgccccaccttgcctccgaaggccgcacgctggtgttgtacggcgacgttcctttaattgacgttgaaaccctcgaaaccctgctcgaagccgcaggcaacgaagtcgggctgttgaccgacgtgcccgccgacccggcaggcttggggcgcatcatccgcgacggcagcggcagcgtaaccgccattgtcgaagaaaaagacgcaagtgccacccaaaaaaccatccgcgaaatcaacacaggcatcctcgtcctgcccaacgccaaactggaaaactggctgaacagcctttccagcaacaatgcccaaggcgaatattatttaaccgacctcatcgccaaagccgttgccgacggcatcaaagtccgccccgtccgggtgcgcgcctcccacctcgccgccggcgtgaacaacaaacgccagctcgccgaactcgaacgcatcttccaaaccgaacaggcgcaagaattgctcaaagcaggcgtgaccctgcgcgatccggcgcgtttcgatttgcggggccgtctgaaacacggacaggatgtcgtgattgacgtcaacgtcgtcatcgaaggtgaagtcgaactcggcgacaacgtcgaaatcggcgcaaactgcgtcatcaaaaacgccaaaatcggcgcaaacagcaaaattgcccccttctcccacctcgaaggctgcgaagtcggcgaaaacaaccgaatcggcccgtacgcccgcctgcgtccgcaagccaaactggctgacaatgtacacgtcggcaacttcgtcgaaatcaaaaacgccgccatcggcaaaggcaccaaagccaaccacctcacctacataggcgacgccgaagtcggcagcaaaaccaacttcggcgcgggcacgattattgccaactacgacggcgtgcacaaacacaaaaccgtcatcggcgacgaagtgcgcatcggttcgaactgcgtactggttgcccctgtaacactgggcaacaaagtaaccacaggcgcaggcagcacgattacccgcaatatcgaagacaacaaactcgccctcgcccgcgcccgccaaaccgtcatcgaaggctggatgaggccggaaaaagacaaacaa

SEQ ID NO: 29299 - DNA, 618 bp, Neisseria gonorrhoeae; identical to SEQ ID NO: 28904

SEQ ID NO: 29300 - DNA, 370 bp, Neisseria gonorrhoeae; identical to SEQ ID NO: 28922

SEQ ID NO: 29301 - DNA, 165 bp, Neisseria gonorrhoeae; identical to SEQ ID NO: 28908

SEQ ID NO: 29302 - DNA, 999 bp, Neisseria gonorrhoeae
atgaaacggaaaatttggctgctgccgctgctggcggtttcggcatacctgcaggcgcagacggaagtcaggctggcggtgcataagtcgttcagcctgcccaaagggttgattgcgcgcttcgagcgggcaaacgatgcgaaagtgtcgattattcaggcgggcggcgcgaacgaaatgctcaacaaactgattttgagccgagccaacccgattgccgacgcggtgtacggtttggacaacgccaatatcggcaaggcgcgggaaatgggcattttggcggcggcgcaacccgaatccgcccccgtcgcggtcgggctgccttcggctttggcggtcgattacggctatgtgtccgtcaattacgacaaaaaatggtttgaaggcaaaaagctgcccctgccgcaaaccctgcaggatttgacccgccccgaatataaaaacctattggtcgtgccgtcccccgccacatcttcccccggcttgggcttcctgatggcgaacatcggcggtctgggcgaagaaggcgcgtttaaatggtgggcacagatgcggcagaacggcgtgaaggtcgccaaaggttggagcgaggcgtattacaccgacttttcgcacaacggcggcgcgtatccgctggtggtcggttatgccgccagccctgcggcggaagtatatttttccaaaggcaaatacagcgagccgccgacgggcaacctgtttttaaaaggcggcgtattccgtcaggtcgaaggcgcggcggtcttgaagggcgcgaaacagccgaagctggcggcaaaactggtgcaatggctgcaaagtctggaagtgcagcaggcggttccgtctgaaatgtgggtttaccccgccgtcaaaaacacgcgcctgcccgacgtgttccgcttcgcccaagccccggcgcacactaccgcccccgcgcagcgcgatattgatgcgaaccagcgcggatgggtttcccgttggatcaggacggttttgaaa

SEQ ID NO: 29303 - DNA, 846 bp, Neisseria gonorrhoeae
atggacttcaaacaatttgattttttacacctgatcagtgtttccggttgggggcatctggctgaaaaggcgtgggcgttcgggctgaaccttgccgccgcgctgcttattttcttggtcgggaaatgggcggcgaaacgcattgtcgccgtaatgagggcggcgatgacgcgcgcgcaggtcgatgccacgctgattagttttttgtgtaatgttgccaatatcggcttattgattttggtgattattgccgcattgggacggttgggcgtttccacaacatccgtaaccgccttaatcggcggcgcgggtttggcggtggcgttgtccttaaaagaccagctgtccaattttgccgccggcgcgctgattatcctgttccgcccgttcaaagtcggcgactttatccgtgtcggcggttttgaaggatatgtccgggaaatcaaaatggtgcagacttctttgcggacgaccgacaacgaagaagtcgtgctgcccaacagcgtggtgatgggcaacagcatcgtcaaccgttccagcctgccgctttgccgcgcccaagtgatagtcggcgtcgattacaactgcgatttgaaagtggcgaaagaggcggtgttgaaagccgccgccgaacaccccttgagcgttcaaaacgaagagcggcagcccgccgcctacatcaccgccttgggcgacaatgccatcgaaatcacattatgggcttgggcaaacgaagcagaccgctggacgctgcaatgcgacttgaacgaacaagtggtcgaaaacctccgcaaagtcaatatcaacatcccgttcccgcaacgcgacatacacatcatcaattct

SEQ ID NO: 29304 - DNA, 414 bp, Neisseria gonorrhoeae
atggtaaagctgacagaacaagatattttgaattggattgggccggaagacgattatatgaatgacgaccatttggcttttttccgcgaattgctggtaaaaatgcaagacgaactcatcgaaaacgcctccgttacaacagggcatctccaagaacacgaatcagcccccgatcctgccgaccgtgccacacaggaagaagagtacgcattggaactccgtacccgggatcgggaacgaaaacttctcagtaaaatacaggcgaccatccgcaatattgatgaaggggactatggattctgtgccgatacgggagaacctatcggcctgaagcggctgctggcacgcccgacagccactttatccgttgaggcccaagaacgccgagagaggatgaagaaacagtttgccgac

SEQ ID NO: 29305 - DNA, 447 bp, Neisseria gonorrhoeae
atgagccttatcggcgaaattttgcctttgtcccatattgttttggatatggaggtgggcagtaaaaaaaggctgtttgaggaagcgggcctgcttttggaacgcgaatcctcattgtcccatgctgatgttttcgaatgtctttttgcccgtgaaaaactgggttcgaccggtttggggcagggtgtcgccatcccccacggccgccacgcgagcgtgaagcaggcgacgggcgcgttcatccgtacgcgcgaacccgtcggattcgacgcgcctgacggcaaaccggtttcactggtttttatcttgctggtgccggaaaacgcaacgggcgagcatttggaagtcttatccaaactggccggcaagttttcccaaaaaagcatcagagaatcgctgatgacggttgcttctgcggaagaagcccgcgccatcctgaccgaagaa

SEQ ID NO: 29306 - DNA, 960 bp, Neisseria gonorrhoeae
atgcccagtatctccgtccgccgcctgtttgacgacaaccaatacaagttgcaacttgcctgggccgccggcaattcgggtgcggacaaccgtatcggcgtagaggcggacaagcccgtcctcgccctggtcggacacctgaatttcatccatcccaaccaaatccaagtggtcggtttggcggagtcggaatatctgaaccgcctcgaatcgggggagacgggttatcagttcggagacctgttcgatatttccatgtctttggtcattgtggcaaacgatttgccggtttccccggggctgcgcgactactgccacaaaaacgacatccccctgttgacttccaaactcgaaagcccttatctgatggatgtgttgcggatttacctgcaacgcaccttggcagcatcgtccgtcaaacacggcgtatttctcgatgtgtttgaaatcggcgtgctgattaccggacattctggtttgggtaagagcgaattggcattggaactgatttcgcgcggccatagcctgattgccgacgatgcggtcgagctgttccgcatcggtccggaaacattggaagggcgttgttcgcctatgctgcgcgattttttggaagtgcgcggcttggggatactcaatatccgccatattttcggcgaaacttccatccgccccaaaaaaatcctgcaactcattatcaatttggtcgaggcggacgacgagtatatgaagcagctcgaccggttgagcatccgcaccgaaaccgaatccatcctcaacgtcaacgtccgttcggttacgctgcccgtcgccgtcggacgcaaccttgccgttttggttgaggcggcggtacgcaattacattttgcagttgcgcggcaaagacagtacgcgcgaatttttggaacgccatcagacgcaacttaaagaaaacgaacagaatcatgaaaatcgtcctgat

SEQ ID NO: 29307 - DNA, 852 bp, Neisseria gonorrhoeae
atgaaaatcgtcctgattagcgggctttccggctcgggcaaatccgttgcactgcgccaaatggaagatttgggctatttttgcgtggacaacctgcccttggaaatgctgccgtcgctggtgtcgtaccatatcgaacgtgcggacgaaaccgaattggcggtcagcgtcgatgtgcgttccggcatagacattgcccaagcgcgcgagcagattgcctatctgcgcggactcggacacagggtggaagttttgtttgtcgaggcggaagaggccgtgctggtccgccgcttttccgaaacccggcgcggacatcctttgagcaatcaggatatgacgctgttggaaagcctgaaaaaagagcgcgaatggctgttcccgcttaaggaaatcgcctactgtatcgacacttccaagatgaatgcccaacagctccgccatgcagtccggcagtggctgaaggttgagcgtaccggactgctggtggttttggagtccttcgggttcaaatacggtgtgccgaacaacgccgattttatgttcgatatgcgcagtctgcccaacccgtattacgatcccgagttgaggccttacaccggtatggacaagcccgtttgggattatttggacggacagccgttggcgcaggaaatggttgacggcatcgaaaggtttgttacgcgttggttgccgcgtttggaggatgaaagcaggagctacgttaccgtcgccatcggctgtaccggcgggcagcatcgttcggtctatattgtcgaaaaactcgcccgaaggttgaaagggcgttatgaattgctgatacggcacaggcaggcgcaaaacctgtcgggccgc

SEQ ID NO: 29308 - DNA, 939 bp, Neisseria gonorrhoeae
atggcaatccaatggtttcccggccatatgaacaaggcaagaaaagccatcgccgagcgtgccaaaagcgttgatatggtgattgaaatgctggacgcgcgtatgcccgcctccagcgaaaatccactgttggcgcagctttccaaaggtaagcccaaactcaaaattttaaacaagcaagaccttgccgaccctgaacgcacaaaggtctggcttgaccactacaacagccgccccgacacccgggccatcgccctcgattcctccgaaaccggcgcacacggcaaaatcacccaagcctgccgcgcgatgattccccaccggcaaggcatagacaaacccctgcgcgttttgatttgcggcattcccaacgtcggcaaatccaccctcatcaatggaatgataggcaaaaaatccgccaaaaccggcaacgaacccggcattaccaaagccgaacaacgccttttccttgccgacgacttctggctgtacgacaccccgggaatgctgtggccgaaaatcatcgtcgaagaaagcggctacaacctcgccgccggcggcgcagtcggacgcaacgcattggacgaagaagaagtcgccctcgaacttttagactacctccgccgccactacctccctatgctgcaagaacgctaccaagccgacaaagaccccagcagccactgggacgacaactcgtggctcgaatggatagccaaaaaacgcggcgcagtcctcagcggcggacgggtcaactaccaaaaagccgccgaaaacatcctcacggacttccgcgaaggcaaaatcggcagaatcacccttgaaacaccgaaccaatgggaaacttggcttaaaaaagcacgtcagaaagaagccgaactcaaagccattcgcgaagccagaaaagcagagcgcaaagggcagaagccttcggaagca

SEQ ID NO: 29309 - DNA, 2626 bp, Neisseria gonorrhoeae
tcaaaccaaacaatattgaaagaaaaaaatgagcaaaaccgtccgttatctgaaagattaccaaacgcctgcctaccgcattcttgaaaccgaactgcatttcgacattgccgaaccgcaaaccgtcgtgaagtcgcgtttgacggtcgagccgcagagggcgggcgagccgctggtgttggacggttcggcaaaactcttgtccgtcaaaatcaacggcgcggcggcggattatgtgttggaaggcgagacgctgacgattgcagacgtaccgtccgaacgcttcaccgtcgaagtggaaaccgaaatcctgccggcggaaaacaaatcgctgatggggctgtatgcttccggcggcaatctgtttacccagtgcgagccggagggcttccgcaaaatcacgttctacatcgaccgtccggatgtgatgtccaagttcacgaccaccatcgtcgcggacaaaaaacgctatcccgttttgctttccaacggcaacaaaatcgacggcggcgagttttcagacggccgccattgggtgaaatgggaagacccgtttgccaaaccgagttatctgtttgctttggtcgcgggcgatttggcggtaacggaagaccgtttcaccaccatgagcggcagaaacgtcaaaatcgagttttacaccaccgaagcggacaaacccaaggtcggctttgccgtggaatcgttgaaaaacgcgatgaagtgggacgaaacgcgcttcgggttggaatatgacttggatattttcatggtcgtcgccgtaggcgatttcaatatgggcgcgatggaaaacaagggtttgaacatttttaacaccaagttcgtcctcgccgacagccgcaccgccaccgataccgatttcgaaggcattgaatccgtggtcggacacgaatatttccacaactggacgggcaaccgcgtaacctgccgcgactggttccagctttcgctgaaggaagggctgaccgtgttccgcgaccaagagttttccggcgaccgcgccggccgcgccgtgcgccgcatcgagaacatccgcctgctgcgccagaaccagttccccgaagacgcaggcccgaccgcccatccggtgcgccccgtcagctatgaggagatgaacaatttctacaccatgaccgtttatgaaaaaggcgcggaagtggtgcggatgtatcataccctgctcggcgaagagggcttccaaaaaggcatgaagctatatttccaacgccacgacggacaggcagtgacctgcgacgatttccgcgcggcgatggcggatgcgaacggcatcaatctcgaccagttcgccttgtggtacagccaggcgggcacgcccgttttggaagccgaaggccgtctgaaaaacaatgttttcgagttaaccattaaacaaaccgtgccgcccacgcccgatatggcggacaaacagccgatgatgattcccgtcaaagtcgggcttctgaaccgcaacggcgaagcggtggcattcgattatcagggcaaacgcgcaaccgaagccgtgttgctgatgaccgaagccgaacaggccttcccgctcgaaggtgtaaccgaagccgtcgttccctcgctgctgcgcgggttcagcgcgccagtgtatctgaactatccgtacagcgacgacgacctgctgctcctgctcgcccacgacagcgacgctttcacgtgctgggaagccgcccaaacgctctaccgtcgcgccgtcgccgccaaccttgccgcgctttcagacggcatcgggttgccgaaacacgaaaaactgcttgccgccgtcgaaaaagtcatttcagacgacctcttggacaacgccttcaaagccctgcttttgggcgtgccgtccgaagccgaactgtgggacggcacggaaaacatcgacccgctgcgctaccatcaggcgcgcgaagccttgttggatacgcttgccgtccgcttcctgccgaaatggcacgaattggaccgtcaggcggcgaagcaggaaaaccaaagttacgaatacagccccgaaaccgccgactggcgcacgctgcgcaacgtctgccgcgccttcgtcctgcgcgccgaccccgcgcacatcgaaactgttgccgaaaaatacggcgaaatggcgcaaaacatgacccacgaatggggcatcctgtccgccgtcaacggcaacgaaagcgatacgcgcaactgcctgctggcgcagtttgccgacaagttttcagacgacgcgctggtgatggacaaatatttcgcccttatcggctcaagccgccgcagcgacaccctgcaacaggttcaaaccgccttgcagcatccgaaattcagtctcgaaaaccccaacaaagcccgttcgctcatcggcagcttcagccgcaacgtcccgcattttcacgcacaagacggcagcggctaccgcttcatcgccgacaaagtcatcgaaatcgaccgcttcaacccgcaggtcgccgcccgcctggtgcaggcgttcaacctctgcaacaagctcgagccgcaccgcaaaaacttggtgaaacaagaattgcagtgcattcgggcgcaggaaggattgtcgaaagacgtgggcgaaatcgtcggcaagattttg

SEQ ID NO: 29310 - DNA, 1088 bp, Neisseria gonorrhoeae
atgttcagcttcttccgtcgcaagaaaaaacaggaaacgccggctctcgaggaggcccaagttcaggaaaccgcagcaaaagtagaatctgaagttgctcaaatagttggaaatattaaagaagatgtcgaatctttagcagaaagcgtcaaagggcgggccgaatctgccgttgaaaccgtcagcggtgcggttgaacaggtaaaggaaaccgttgccgagatgccgtctgaagcaggggaagcggctgaaaaagcggtggaacgcgttgaatccgcaaaagaagctgttgccgaaaccgtcggcgaggctgtcgggcaagttcaagaagccgttgcgacaactgaagaacacaagctcggttgggctgcgcgtttgaaacaaggcttggccaaatcacgcgacaaaatggcgaaatcgctggccggcgtgttcggcggcggacaaatcggcgaggatttgtacgaagagctggaaaccgtgctgattaccggcgatatgggcatggaggccaccgaatacctgatgaaagacgtgcgcggccgcgtcagcctcaaagggctgaaagacggcaacgaattgcgcggcgcgttgaaagaagccttgtacgacctgattaagccgttggaaaaaccgctggtcttgcccgaaactaaagagcctttcgtgattatgcttgccggtatcaacggcgcgggcaaaaccacgtctatcggcaaactcgccaaatatttccaagcgcagggcaaatccgtattgctggcggcaggcgatactttccgcgccgccgcgcgcgagcagcttcaggcttggggcgggcgcaacaatgtaaccgtcatttcacaaaccacgggcgattccgccgccgtgtgcttcgatgccgtccaagccgcgaaagcgcgcgggatcgacatcgtgcttgccgacaccgccggccgcctgcccacgcagcttcatttgatggaagaaatcaaaaaagtgaagcgcgtgctgcaaaaagccattcccggcgcgccgcacgaaatcatcgtcgtactcgatgccaatatcgggcaaaacgccgtcaaccaagtcaaagcctttgacga

SEQ ID NO: 29311 - DNA, 684 bp, Neisseria gonorrhoeae
atgacggtgttgcaagaacgttatcgtgaggtgtccgaccgtatcggaaaattggttctgcaggcgggcagggagccgcattccgtcagcctgattgccgtcagcaagaccttcccttcagacggcatccgcgaagtttacgctgccggacagcgtgatttcggcgagaactatattcaggagtggtacggcaaaacggaggaattggcggatttgaccgacatcgtgtggcacgtcatcggcgatgtgcagtccaacaaaaccaaatttgtcgccgaacgcgcgcattgggtgcataccgtatgccgtctgaagaccgccgtccggctgagcaggcagcgtcgctccttaatgccgcccttgcaggtgtgtgtcgaggtgaacattgcgggcgaggcggcaaaacacggtgtcgcgcccgaagaagcggtcgcgcttgccgtggaagtggcgaagctgcccaaccttgtcgtgcgcggactgatgtgcgttgccaaagccaacagcagtgaaacggagttgaaaactcagtttcagaccatgcaaaagctgcttgccgacctcaatgcggctggcgttaaggcggacgtgctgtctatggggatgtcggacgatatgcctgccgccattgagtgcggtgcgacacacgtccgtatcggcagcgcgattttcgggaaaaggggc

SEQ ID NO: 29312 - DNA, 1041 bp, Neisseria gonorrhoeae
atgcagattaccgacttactcgccttcggcgctaaaaacaaagcatccgaccttcacctgagttcgggcatatcccctatgattcgggttcacggcgacatgcggcgcatcaaccttcccgaaatgagcgcggaagaggtcggcaatatggtaacttcggtgatgaacgaccaccagcggaaaatctaccagcaaaacttggaagtcgacttctcgttcgaactgcccaacgtcgcccgattccgcgtcaacgccttcaacaccggccgcggccccgccgccgtattccgcaccattcccagcaccgtcttatcgctggaagaattgaaagccccgagcattttccaaaaaatcgcagaatcgccgcgcggcatggtattggttaccggccctaccggttcgggcaaatcgaccacgcttgccgcgatgatcaactacatcaacgaaacccagccggcacacatcctgaccatcgaagacccgatcgaattcgtccaccaaagcaaaaaatccctgattaaccaacgcgagctgcaccagcacaccctcagcttcgccaacgcgctgagttccgcattgcgcgaagaccccgacgttatccttgtcggcgagatgcgcgaccccgaaaccatcggcttggcactgaccgccgccgaaaccggacacttggttttcggcacgctgcacacgaccggcgcggcaaaaaccgtcgaccgtatcgtggacgtattccccgccggagagaaagaaatggtgcgttccatgctgtccgaatcgctgaccgccgtcatctcccaaaacctgctgaaaacgcacgacggcgacggccgtgtcgcctcgcacgaaatcctgattgccaaccccgccgtccgcaacctcatccgcgaaaacaaaatcacgcagattaactccgtcctgcaaaccgggcgggcgagcggtatgcagacgatggaccaatcgctgcaatcgctggtgcgccaagggctgatcgcaccggaagccacacgcagacgcgcgcaaaacagcgaaagtatgagtttc

SEQ ID NO: 29313 - DNA, 2148 bp, Neisseria gonorrhoeae
atgaaaaccccactcctcaagcctctgctcattacctcgcttcccgttttcgccagtgtctttaccgccgcctccatcgtctggcagctaggcgaacccaagctcgccatgcccttcgtactcggcatcatcgccggcggcctggtcgatttggacaaccgcctgaccggacggctgaaaaacatcatcgccaccgtcgccctgtttaccctctcctcgctcacggcgcaaagcaccctcggcacagggctgcccttcatcctcgccatgaccctgatgaccttcggctttaccattttaggcgcggtcgggctgaaataccgcaccttcgccttcggcgcactcgccgtcgccacctacaccacgcttacctacacccccgaaacctactggctgaccaaccccttcatgattttatgcggcaccgtactgtacagcaccgccatcatcctgttccaaatcatcctgccccaccgccccgtccaagaaagcgtcgccaatgcctacgaagcactcggcggctacctcgaagccaaagccgacttcttcgaccccgatgaggcagcctggataggcaaccgccacatcgacctcgccatgagcaacaccggcgtcatcaccgccttcaaccaatgccgttccgccctgttttaccgtttgcgcggcaaacaccgccacccgcgcaccgccaaaatgctgcgctactacttcgccgcccaagacatccacgaacgcatcagctccgcccacgtcgactaccaagagatgtccgaaaaattcaaaaacaccgacatcatcttccgcatccgccgcctgctcgaaatgcaggggcaggcgtgccgcaacaccgcccaagccatccggtcgggcaaagactacgtttacagcaaacgcctcggacgcgccatcgaaggctgccgccagtcgctgcgcctcctttcagacggcaacgacagtcccgacatccgccacctgagccgccttctcgacaacctcggcagcgtcgaccagcagttccgccaactccgacacagcgactcccccgccgaaaacgaccgcatgggcgacacccgcatcgccgccctcgaaaccggcagcttcaaaaacacctggcaggcaatccgtccgcagctgaacctcgaatcatgcgtattccgccatgccgtccgcctgtccctcgtcgttgccgccgcctgcaccatcgtcgaagccctcaacctcaacctcggctactggatactgctgaccgcccttttcgtctgccaacccaactacaccgccaccaaaagccgcgtgtaccaacgcatcgccggcaccgtactcggcgtaatcgtcggctcgctcgtcccctacttcaccccctccgtcgaaaccaaactctggattgtcatcgccggtaccaccctgttcttcatgacccgcacctacaaatacagtttctccaccttcttcatcaccattcaggcactgaccagcctctccctcgcaggtttggacgtatacgccgccatgcccgtgcgcatcatcgacaccattatcggcgcatcccttgcctgggcggcggtcagctacctgtggccagactggaaatacctcacgctcgaacgcaccgccgcccttgccgtatgcagcagcggcacatacctccaaaaaattgccgaacgcctcaaaaccggcgaaaccggcgacgacatagaataccgcatcacccgccgccgcgcccacgaacacaccgccgccctcagcagcaccctttccgacatgagcagcgaacccgcaaaattcgccgacagcctgcaacccggctttaccctgctcaaaaccggctacgccctgaccggctacatctccgccctcggcgcataccgcagcgaaatgcacgaagaatgcagccccgactttaccgcacagttccaccttgccgccgaacacaccgcccacatcttccaacacctgcccgacatgggacccgacgactttcagacggcattggatacactgcgcggcgaactcggcaccctccgcacccgcagcagcggaacacaaagccacatcctcctccaacagctccaactcatcgcccggcaactcgaaccctactaccgcgcctaccgacaaattccgcacaggcagccccaaaacgcagcc

SEQ ID NO: 29314 - DNA, 345 bp, Neisseria gonorrhoeae
atgtatattcccgagcgaggcgacattttccatcttgccttcgaccccgccgccggtacggaaatgaaaggcggccattacgccatagccctgtcgcccagagcttacaaccgcgcaaccggcttggtttacgcctgcccgatttcacaaggcagggcggcggcggcaagaagcggcggtatgatttccacactgctcggcacgggaacggcaacacaaggcaatgtccactgccaccggatgaaggcattggattggaaaatccgccgcgccgccttccgcgaaaccgtccccgattacgtgattgaagacgtattggcacgcatcggcgcagtactgttcgac

SEQ ID NO: 29315 - DNA, 921 bp, Neisseria gonorrhoeae
atgctgcaaagaactttggcgaaatccatcggcgttaccggagtcgggctgcattcgggcgaacgcgtcgcgctgaccctgcaccccgcgcctgaaaacagcgggatttccttccgccgcaccgatttggacggcgagatgggcgaacaaatcaagctgaacccttatttgatcaacgatacccgcctttcatccaccatcgttaccgacaaaggcctgcgcgtcggcaccatcgaacacatcatgtccgcactgtccgcctacggcatcgacaatgcgctgattgagttgaacgcgcccgaaatcccgattatggacggctccagcctgccgtttatttacctcctgcaagatgcgggcgttgtagaccaaaaggcgcaaaagcgttttttgaaaatcctcaaacccgtcgaaatcaaagaagcgggcaaatgggtccgatttacgccgtatgacggttttaaggtaacgctgaccatcgaattcgaccatcctgttttcaaccgcagcccgcctacgtttgaaattgatttcgccggcaaatcctacatcggcgaaatcgcgcgcgcgcgcactttcggctttatgcacgaagtggaaatgatgcgcgcccacaatctcggcttaggcggcaatttgaacaacgccatcgtgattggcgacacggatgtcctgaatcctgaaggcttgcgctatcccgatgagtttgtgcgccacaaaatcctcgacgccatcggcgatttgtatatcgtcggacatccgattgtcggcgcgtttgaaggctacaaatcgggacacgccgtcaacaacgcccttttgcgcgcagttttggcagacgaaacggcttacgaatgggtggaatttgccgacagcgatgatttgcccgacgcatttcacgagctgaacatcagaaattgcgga

SEQ ID NO: 29316 - DNA, 735 bp, Neisseria gonorrhoeae
atgggcggacaaaaaacgcatttcgggttcagcacggtcaacgaagatgagaaagccggaaaagtggcggaagtgtttcactccgtcgccaaaaactacgacattatgaatgatgtgatgtcggcagggctgcaccgcgtatggaagcattttaccatccatacggcgcacctgaaaaaaggcgataaagtgttggacattgcgggcggtacgggcgatttgtcgcgcggttgggcgaaacgggtcggcaaggaaggcgaggtttggctgaccgatattaattcttctatgctgaccgtcgggcgcgaccgtctgttgaacgaaggcatgattttacccgtgtcgcttgccgatgcggaaaaactgcctttccccgacaattatttcaacttggtctccgtggcgttcggcttgcggaacatgacgtataaagatgccgcgcttaaggaaatgtaccgtgttttgaaaccgggcggtacgttgctggtgttggagttttccaaaatctacaagccgctcgaaggcgcatacgatttttattctttcaagctgttgccggtaatgggcaggctgattgccaaagatgcggacagctaccagtatctcgccgaatccatccgtatgcaccccgatcaggaaactttgaaacagatgatgctggatgcaggcttcgacagcgtggattatcacaatatgagtgcgggcatcgtcgcgctgcataagggcgtgaaattt

SEQ ID NO: 29317 - DNA, 492 bp, Neisseria gonorrhoeae
atgaacaacagacattttgccgtcatcgccttgggcagcaaccttgacaaccccgcacaacaaatacgcggcgcattagacgcgctctcgtcccatcctgacatccggcttgaacaggcttcctcactgtatatgaccgcacccgtcggttacgacaatcagcccgatttcatcaatgccgtctgcaccgtttccaccaccttggacggcattgccctgcttgccgaactcaaccgtatcgaagccgatttcggacgcgaacgcagtttccgcaatgcaccgcgcacattggatttggacattatcgactttgacggcatctccagcgacgacccccgccttaccctgccgcatccgcgcgcgcacgaacgcagtttcgtcatacgccctttggcagaaatcctccctgattttattttgggaaaatacggaaaggttgtcgaattgtcaaaacggctgggcaatcaaggcatccgtcttttaccggacagg

SEQ ID NO: 29318 - DNA, 372 bp, Neisseria gonorrhoeae
atgcagtatctgattgtcaaatacagccatcaaatcttcgttaccatcaccattttggtattcaacatccgttttttcctactttggaaaaatccagaaaagcccttggtcggcttttggaaagcactgccccacctcaacgacacgatgctgctgtttacgggattgtggctgatgaagattacccatttctccccgttcaacgcgccttggctcggcacaaaaatcctgctcctgttcgcctacatcgcactgggcatggtaatgatgcgcgcccgtccgcgttcgaccaagttctacaccgtttacctgctcgctatgtgttgcatcgcctgcatcgtttaccttgccaaaaccaaagtcctgccattc

SEQ ID NO: 29319 - DNA, 864 bp, Neisseria gonorrhoeae
atgaaaaatattctcttagtatttgttagctttgtgccattatgtgtccgcactgatctgccgctgaatatcgaagacataatgaccgacaagggaaaatggaaactggaaacttcccttacctacctgaacagcgaaaacagccgcgccgcacttgcctcaccggtttacattcagaccggctccgcttcctttatccccgtcccgaccgaaattcaggaaaacggcagcaataccgatatgctcgccggcacgctcggtttgcgctacggactgaccggcaataccgacatttacggcagcggcagctatctgtggcacgaagaacgcaaactcgacggcaacggcaaaacccgcaacaaacggatgtccgacatatccgccggcatcagccacaccttccttaaagacggcaaaaatcccgcactcatcgctttcctcgaaagcacggtttacgaaaaatcgcgcaacaaagcctcgtcgggaaaatcgtggctcatcggcgccaccacctacaaagccatagatccgattgtcctttccctcaccgccgcctaccgcatcaacggcagcaaaaccctttcagacgacgtcaaatacaaagcaggcaattactggatgctgaatcccaacatctcatttgccgccaacgacagaatcagcctgaccggaggcatccaatggctgggcaaacagcccgaccgcatagacggcaaaaaagaatccgcaagaaacacatccacctacgcccatttcggcgcaggtttcggtttcaccaaaaccgcggctttaaacgcatccgcacgtttcaacgtttcagggcaaagcagttccgaactgaaattgggcgtacagcatacattt

SEQ ID NO: 29320 - DNA, 873 bp, Neisseria gonorrhoeae
atggaaaacggtttgattgacaggctgctggaaactttgtggttggatcggcggctcagtcggaatactttggacagctaccggcgggatttggaaaagatcgcccgccggctgtctttgtgcggcagaacgctgaaggatgcggacgaagcagatttggcggcggcggtttatgttgacggggagcaacggagttcgcaggcacgcgcactgtcggcgtgcaaacgcctgtatgtgtggatggaacgggaagggatgagggcggacaatcccacccgcctgctgaaaccgccaaaaatcgacagaaacatcccgacactgattacagaacagcagatttcccgactgcttgccgcaccggataccgacacgccgcacggtttgcgggataaggccctgctcgaattgatgtacgcgaccggcttgcgcgtcagcgaggcggtcgggctgaatttcggcaatgtggatttggacaggggttgtattaccacgctgggcaagggcgacaagcagaggatggtcccgatgggacaggagtcagcgtattgggtggaacgctattatacggaggcacgcccgcttctgctgaaaggcaggagttgcgacgcattgtttgtcagtcagaaaaaaacgggcatttcccggcagttggcgtggatgattgtcaaagaatatgccggcagggcaggcatcgggcacatcagcccgcacagcctgcgccacgcctttgccacgcatctggtgcggcacggattggatttgcgcgtagttcaggatatgttgggacacgccgatttgaacacgactcagatttatacccatgttgccaatgtgcggctgcatagcgtggttaaggaacaccattcccgaaac

SEQ ID NO: 29321 - DNA, 363 bp, Neisseria gonorrhoeae
atgaacctgattcaacagctcgagcaagaagaaattgcccgcctgaacaaagaaatccccgaattcgcaccgggcgacaccgtagtcgtatccgtacgcgtcgtggaaggtacccgcagccgtctgcaagcctacgaaggcgtggttatcgcccgtcgcaaccgtggtttgaacagcaacttcatcgtccgcaaaatctccagcggcgaaggtgttgaacgtactttccaactgtattcccctactgttgagaaaatcgaagtcaaacgccgtggcgacgtacgccgtgccaaactgtactacctgcgcggtctgaccggcaaagctgcacgcatcaaagaaaaactgcctgcacgcaaaggt

SEQ ID NO: 29322 - DNA, 747 bp, Neisseria gonorrhoeae
atgcttatccaggcagttaccattttccccgaaatgttcgacagcattacccgctacggcgtaacgggacgcgcgaacagacagggaatctggcagtttgaagcagtcaatccccgaaagtttgccgacaacagattgggctatatcgacgaccgcccgttcggcggcggtccgggaatgattatgatggctccgccgcttcatgcggcgatagaacacgccaaagcacaatcttcccaaaccgcaaaagtcatctacctcagcccccaaggaaaaccgctgacacaccaaaaagcggcagaactggcagaacttacgcatctgattctgctgtgcggacgctatgagggaatagacgaaagactgctgcaaagcagcgtcgatgaagaaatcagcatcggagacttcgtcgtttccggcggagagcttcccgccatgatgctgatggatgcggtattgaggctcgtacccggcatattgggcgacattcagtctgccgaacaggattcgttctcaagcggtattttggactgcccccactacaccaaacccttagaatttcaaggcatggctgttccggaagtattgcgctccggaaatcatggcttgatagcggaatggcggttggaacaatcgctgcgccgcaccttggagcgcagacccgatcttttggaaaagcgcgttttaatcccaaaggaatcccgcctcttgaataaaatcctacaagagcaacgggaaatccaatca

SEQ ID NO: 29323 - DNA, 507 bp, Neisseria gonorrhoeae
atgacagacactcaaaaccgggtagccatgggctacatcaaaggcgtattcggcataaaaggctggctgaaaattgccgccaacaccgaatattccgacagccttttggactaccccgagtggcatttggccaaggacggcaaaaccgtcagcgttacccttgaagccggaaaagtcgtcaacggcgaactccaagtcaaattcgaaggcatagacgaccgcgattcagcattctcattgcgcggttacaccatcgaaataccccgtgaagcattcgccccgacagaagaagacgaatactactgggcagacttggtcggcatgaccgtcgtcaacaaagacgataccgttttaggcaaggtaagcaacctgatggaaaccggcgcaaacgacgtattgatgattgacggagaacacgggcagattctgattccgttcgtttcccaatatatcgaaaccgtcgataccggcagcaagaccattactgccgactggggtttggactac

SEQ ID NO: 29324 - DNA, 243 bp, Neisseria gonorrhoeae
atggtagttatccgtttggcacgcggcggctcgaaacaccgccccttctacaacgtcatcgttactgactcacgcagccgccgcgacggccgcttcatcgaacgcgtaggcttctacaaccccgtagccaacgaaaaacaagagcgcgtccgcctcaatgcagaccgcctgaaccactggattgcacaaggcgcgcaagtcagcgactccgttgcaaaactgattaaagaacaaaaagccgtc

SEQ ID NO: 29325 - DNA, 1446 bp, Neisseria gonorrhoeae
atgaaaggcgatattggcgtaatcggtttggcggttatggggcaaaacctgattttgaatatgaacgattgcggatttaaggttgtcgcctacaaccggacaatcggtaaagtggacgaatttttaaacggtgcggcaaaagagacgggcattatcggcgcgtattccctgcaagacttggtcgataagctggcaaaaccgagaaaaatcatgatgatggttcgcgcaggttcggtggttgacgactttgtcgaacaactgcttccgctgttggaagaaggcgacatcattatcgacggcggcaatgccaattaccccgacacgacacggcggacacattaccttgccggaaaagggattttgtttgtcggcgcgggcgtatccggcggcgaagaaggcgcgcggcgcgggccgtccatcatgccgggcggggataagcgcgcttgggaagcggtcaagccgattttccaggcgattgccgccaaaacgccgcagggcgaaccgtgttgcgactgggtcggcaaggatggcgcgggacattttgtcaaaatggtgcacaacggcatcgaatacggcgatatgcagctgatttgcgaagcgtaccagtttatgaaagacggtttggggctgtcctacgacgaaatgcaccgcgtgtttgccgagtggaataaaaccgagctggattcttatctgattgaaatcacagcggcaattttgggctataaggacgaaggcggcgaaccgctggccgagaaaatcctcgatacggcagggcaaaaaggcacgggcaaatggacgggcatcaatgccttggatttgggcattccgctgacgctgatttccgaagccgtattcgcccgctgtgtttcgtcgttcaaagaacagcgcgtgcagaccggcaagctgttcgcccgaaccgccacgcccgtcgaaggcggcaaacaagaatgggtcgaggcgttgaggcaggctttgcttgcctccaaaatcatttcctacgcacaaggctttatgttgatccgcgaagcgggcgaaagttacggctggggtttggactacggcaacactgcgctgctgtggcgcgaaggctgcatcatccgcagcgcgtttttgggcaatatccgcgacgcgtatgaggccaatcccgatttggtgttcttgggtgcggatccgtatttcaaaaatattttggaaaactgcctgccggcatggcgcaaggtggttgccaaggcggtcgaatgcggcatccctatgccctgcatggcttcggcgattacgttcttggacggctatacgaccgaacgcctgcctgccaacctcttgcaggcacagcgcgactacttcggcgcgcacacttacgagcgcaccgacaaaccgcgcggcgaatttttccataccaactggacgggcaagggcggagataccgcttcgacaacctacgatatt

SEQ ID NO: 29326 - DNA, 972 bp, Neisseria gonorrhoeae
atgacagaatatcccggcatcgggtcgccgttgttttacggcgttttttttgcggcagtgctggtcatgattgccttggatatgttttcgctgaagaaaaacggcagccataaagtcggcatcaaagaaaccttggcatggagcggcttgtgggttgccgtatcctgcctgttcgcaggctggctgtatttcgaactcgccggcaatcccggctacggcgcggcagccgcaaaagaaaaagtattggaattctttaccggctacattttggaaaaatcgttggcagtcgacaatattttcgtgttcctgatgatattcggctacttcaaagtcgcaccgcagtttcagcaccgcgtgctgctgtacggcgtattgggcgcattggtattgcgcaccgtcatgattttcgtcggcgcggcactggttcggcagtttgagtggattctgtatctgtttggcgcgttcctgctctatactggtatacacatgatgaagcccgaaggagatgaggaagaggatttggcaaacagcaggctgctgaatgccgtcaagaaagtcgttccggtcggcacggcgtttcacggcgagaaattttttaccgtcgagaatggcaaaaaaatcgccacgccgctgtttttggtgctgattatgattgaattgagcgatgtcgtttttgccgtggacagtatccccgccgtctttgccgttaccaccgatccgtttatcgtgctgacttccaatattttcgctattttgggtttgcgggcgatgtatttcctgctggcggatgtggcggaacgctttatcttcctgaaatacggcttggcattcgtgttgggttttatcggtgtgaaaatgctggtgatgcattgggtacacatcccgatttccgtttcgctgtcggtcgtgttcggcgcgttgggtgcatcgatactgacctcgttaatttatacgaaaaaacagcctgataaa

SEQ ID NO: 29327 - DNA, 1251 bp, Neisseria gonorrhoeae
gtggacaaactgaaaatctccgcaaacggcccgctcaacggggaaataacggtctcgggcgcgaaaaacgcggcattgccgctgatgtgcgcgggtttgctgacgtcgggtacgttgcgcctgaaaaacgtccctatgctggcagatgtcgcaaccacgcaaaagctgcttcagggcatgggcgcgcgcgttctgaccgacaatatcagcgaatttgaaatcaacggcggtacggtcaacaatacctgcgccccttacgaattggttcggacgatgcgcgcttcgattttggtgcttggcccgacgctggcgcgtttcggcgaggcgcaagtcagcctgccgggcggctgcgccatcggttcgcgccccgtcaatcagcatttgaaaggcttggaagcgatgggggcggaaatcgccatcgaacacggttacgtcaaagccaaaggcaaactcaaaggtgcgcgcgtggcgatggatgtcgttaccgtcggcggtacggaaaacctgctgatggcggcgacgctggcggaaggtacgacggttttggaaaactgcgccatcgagcctgaagtggtcgatttggcggaatgcctggtcaaaatgggcgcgaaaatcagcggcatcggaacatcgaccatgattgtggaaggtgcgggcgagctgtacggctgcgaacacagcgtcgtccccgaccggattgaagcggggacgttcctgtgtgcggtggcgataaccggcggcagggtggttttgcggaatgccgccccgaaaacgatggaagtggtgttggacaaactggtcgaggcaggtgcggtgattgaagcgggcgacgattggatcgccatcgatatgcggcagcgtccgaaggcggtggacatccgcacggtcgtccatcccggcttccccacggatatgcaggcgcagtttatggcattgaatgccgtggcagagggaagctgccgcgtggtggaaacgatttttgaaaaccgctttatgcacgttccggagttgaaccggatgggggcgaacattacaaccgagggcaatacggcatttgtgcagggtgtggaacggctttccggcgcggtcgtcaaggcgacggatttgcgcgcgtccgccagcctcgttatcgccggtttggcggcgcgcggcgaaaccgtggtcgaacggatttaccacttggatcgcggttatgaaaatattgaaaaaaaactcggcagcgtcggtgcgaacatcgagcgcgtatccggc

SEQ ID NO: 29328 - DNA, 1191 bp, Neisseria gonorrhoeae
atggcatttttaaaactgaccgaacaaaacgtgcggggcaaaaccgtcctcatccgcgccgatatgaacgtgccgttcaaaggcggcaaaatcagcgacgacacccgtatccgcgcctcgctcgcgtccgtcaaatactgcttggacaacggcgcgtccgttattgtgatgacccacttgggccgcccgaccgaaggcgagttccaccccgaagacgacgttgcgcccgttgccgcgcacttgggcggcctgttgggcaaagacgtgaaagtattgaacgactggcgcgaaaacaaaccggctttgaacgcgggcgatgtcgtgatgttgcaaaacgtgcgtatcaacaaaggcgagaagaaaaacgatttagaactgggcaaagcctacgccgccttgtgcgacgtgttcgtcaatgatgcgttcggcaccgcacaccgcgcccaagcttcgaccgaagccgttgcccaagccgcgcccgtcgcctgcgccggcgtattgatggcgggcgaactcgacgctttgggcaaagccctgaaacagcccgcgcgtccgatggtggcgattgttgccggcagcaaagtgtccaccaagctgaccatcctcgaatcgttggcggacaaagtcgatcagcttatcgtcggcggcggcatcgccaacacattcctgttggcggaaggcaaagccatcggtaaatcgctggcggaacatgatttggtggaagaatccaaaaaaattatggcgaaaatggcggccaaaggcggttctgtgccgctgccgaccgatgtcgtcgttgccaaagcctttgccgccgatgccgaagcggtggtaaaagacatcgccgacgttgccgaagacgagatgattttggacatcggcccgaaatccgccgccgcgcttgccgatttgcttaaagccgccggtacggtcgtttggaacgggccggtcggcgtgttcgagttcgatcaattcgcaggcggtacgaaagcccttgccgaagccatcgcccaaagcaaagcgttctcgattgcgggcggcggcgacacgctggcggcgattgccaaattcggcgttaccgaacaaatcggctacatctccaccggcggcggcgcgttccttgagttcttggaaggcaaagagctgcctgccgtagccgctttggaaaaaacgcggcgagtaaacggtttgata

SEQ ID NO: 29329 - DNA, 1124 bp, Neisseria gonorrhoeae
tggttgagcatcgttgccttggcaatcggcgcatttattttcaacacggccgaatacatccccatcgcgcttttgagcgacatcggacgaagcttcggcatggcggcgaccgaaacgggtgtgatgattacggtttatgcgtggattgtcgcgctgacttcgctggcgctgccgctgatgctgctgacgcgcaattatggaacggcgcggcctgctgctggtcctgtttgcgctgtattactgtcagccacatcctgtcgtttgcctcgtggcgttttgaaatcctactcgcaagccgcgtggggattgtgctgacgcacgcggtgttctggtccattacggcttcgctggcggtacgcatcgcccctgtcggaaaagggaatcaggcattggggctgctcagcacggggacggtgatggcgatggtggcggggattccgctcgggcgtatggtcggacaatatttgggctggcaggcgagttttctgctgatcggcctgtgttcggcggcggtaatggcagtgcttgccaaaagcctgccgcgcctgccgagcgtgaataccggttctttaagcagcctgcccctgcttttgaaacggaaaaaactgatgctgctgtatgcggtaacggtgccggtgattacggcgcactttaccgcatacagctacatcgagcccttcgtcatccaaatcggcggtttctccgcgcggcaggttacggtggttccggggctgtacggcctggcgggttttgccgcgtcttacctgttcggcaaatggtttgccaaacatccgcgcgcatttttggcgggcgcggtgtcgcttatcgccctctcttcggggcttttgctgcctttggcgcattttcctgccgccatttacgcgttggtgttcgtatgggggacggcgattgtggtcgtcagcttggggatggttgccaaagttttggatttcgcctccgatgccgcagaccttgccaactcgatttattcggagctttacaacgtcggtataggcggcggcgcactgctgggacattaggttacgcaatactcgggcatttcctgcatcggcgttgcgggtatgctgacggcggcggcaggtttgcgggtctgcctgaatttg

SEQ ID NO: 29330 - DNA, 210 bp, Neisseria gonorrhoeae
gtggaaaccctcctcctcgacatcggcggcatgagctgcggcggctgcgtcaaaagcgttacccggatattagaaagcgtaaaaggcgtggcaagcgtcgaagtcagccttgaaaacaaaagtgcgaccgtcggatacgaccccgcgcaaaccgcagcggaagcactaatcgaagccgtagaagacggcggctatgatgcggcgttgaaa

SEQ ID NO: 29331 - DNA, 555 bp, Neisseria gonorrhoeae
atgttttggcaggttcttccttatgcggttacgattaaccggccgatgccgtctgaaagggtttccgcttcaggcggcatcgcgttggaacagggatgggatatgaaaaaaccgaaaatcctttttgtctgcctcggcaacatctgccgttcgccgatggcggaatacattttgcgccgccgtgccgccgaagcgggcattcccctcgaaacggacagcgcagggacatcgggctggcacgacggcgaggatatgcaccgtgaaacggcaaagatattgaaaaaatacggcattgacgcttcaggctttaccagccgcaaaatccgccaaagcgatgcgacggcgtttgactacatcatcgctatggacggcaagaatttgtccgaattggaaaaaactttcggcaggcggccggaaaaaatattcaagctgaccgacctgatacccgaaagcggttacgaccatgtccccgatccgtggtacatgggtgattttgaagaaacatacaggcttgcggatgcaggctgtcgggcattattggaaaagatttccaaa

SEQ ID NO: 29332 - DNA, 2121 bp, Neisseria gonorrhoeae
atgatgttcaataaatacgttaagaccttccaatacggtaatcaaaccgttactttggaaaccggcgaaattgcccgccaagctgccgctgccgttaaagtatcgatgggcgacactgttgtttttgttgccgttaccaccaacaaagaggtcaaagaaggtcaggacttcttcccgttggccgtcgattatttggaacgcacttatgccgcaggcaaaatccccggcggcttcttcaaacgcgaaggcaaacaaagcgaaaaagaaatcctgaccagccgtctgatcgaccgcccgattcgtccgctgttccccgaaggtttctaccacgacatccaaatcgtagcgatggttgtgtccgtcgatcccgaaatcgattccgacattcctgcaatgttgggcgcgtccgccgcgctggtgttgagcggcgtaccgttcgccggcccgattggcgcggcgcgcgtgggttatataaacggcgtgtacgttttgaacccgactaaagccgagttggcgaaatcacaattggacttggtggtcgccggtacttccaaagccgtgttgatggtggaatccgaagccaaaatcctgcccgaagacgtgatgttgggcgcggtggtttacggccacgatcaaatgcaggttgccatcaatgcaatcaatgaatttgccgacgaagtgaatccggaagtttgggattggaaagcacctgaaaccaatgaagaactggttgccaaagtacgcgggattgccggcgaaaccattaaagaagcgttcaaaatccgtcaaaaacaagcgcgttccgccaaattggacgaggcttggaatgcggtaaaagaagccttgattaccgaagaaaccgacacgctggcagccaacgaaatcaaaggtattttcaaacgcttggaagccgatgtcgtccgcagccaaattttggacggacaaccgcgcatcgacggccgcgacacccgcaccgtccgtccgctgaacatccaaaccggcgtattgccgcgcacgcacggttccgcactgtttacccgtggcgaaacccaagcccttgccgtagcgactttgggtacttcgcgcgacgaacaaatcatcgacgcgttgtccggcgaatataccgaccgctttatgctgcactacaactttccgccgtactctaccggcgaagtgggccgcatgggcgcgccgaaacgccgtgaaatcggtcacggccgtttagctaaacgtgcgttgttggccgtattgccgaaacctgaagatttcagctacaccatgcgcgtggtctccgaaattaccgaatccaacggctcttcctctatggcttctgtctgcggcggctgtttgagcctgctgtctgccggcgtgcctttgaaagcacacgttgccggtatcgcgatgggtctgattttggaaggcaataagtttgccgtcctgaccgacattttgggcgacgaagaccacttgggcgatatggactttaaagtggccggtacgaccgaaggcgttaccgcgctgcaaatggacatcaaaatccaaggcattaccaaagagattatgcaaattgctttggcacaggccaaagaagcgcgtttgcacatcttggatcagatgaaagctgccgttgcgggtccgcaagagctgtccgcacacgcgccgcgtttgttcaccatgaaaatcagccaagacaaaatccgtgatgtgattggtaaaggcggcgaaaccattcgttcgattaccgctgaaaccggtactgaaatcaatatcgctgaagacggtaccatcactatcgctgcgactactcaagaagcgggcgatgcagcgaaaaaacgcatcgaagaaatcactgccgaagtggaagtgggcaaagtgtacgaaggtactgtggttaaaatcctcgacaacaacgtcggcgcgattgtcagcgtgatgccgggcaaagacggtttggtacacatcagccaaatcgcacacgagcgcgtacgcaatgtcggcgattacctgcaagtcggtcaggtggtgaacgtgaaagcattggaagtggatgacagaggccgtgtccgtctgtccatcaaagccctgctggatgcgcctgtccgtgaagaaaatgccgccgag

SEQ ID NO: 29333 - DNA, 724 bp, Neisseria gonorrhoeae
cggactgccggaaattgtccgttttccccgacaaacatctgaccatgagccatccatgaaccacgacatcactttcctcaccctgttcctgctcggtttcttcggcggaactcactgcatcggtatgtgcggcggattaagcagcgcgtttgcgctccaactccccccgcatatcaaccgcttttggctgattctgctgcttaacacaggacggataagcagctatacggcaatcggcctgatgctcggattaatcggacaactcggcatttcactcgaccaaacccgcgtcctgcaaaatattttatacacagcctccaacctcctgctgctctttttaggcttatacttgagcggtatttcttccttggcggcaaaaatcgagaaaatcggcaaaccgatatggcgcaacctgaacccgatactcaaccggctgctgcccataaaatccatacccgcctgccttgctgtcggaatattatggggctggctgccgtgcggactggtttacagcgcatcactttacgcgctgggaagcggtagtgcgacaaccggcggactgtatatgcttgcctttgcactgggtacgctgcccaatcttttggcaatcggcattttttccctgcaactgaaaaaaatcatgcaaaaccgatatatccgcctgtgtacaggattatccgtatcattatgggcattatggaagcttgccgtcctgtggctgtaa

SEQ ID NO: 29334 - DNA, 1233 bp, Neisseria gonorrhoeae
gtggcattaagcggcggcttggattccgtcgttttgctgcatctgctggtttgtgccgggaagcgggcaggatttgtgccggaggcattgcacatccatcacggcttgagtccccgagccgacgattgggcggatttctgccggaattattgcgatatgctaggggtggggctggaaacggttaaggtctgcgtggaaaaaaacggtttgggcatcgaggcggcggcaaggcaaaagcgttatgccgagtttgccgaaaaaggctttgacgttttggcgttggcgcaccacagggacgatcaaatcgaaacctttatgctggcagtcgcgcgcggcggaggtttgcgcgctttggcggctatgcccgccgtccgccctttgggggaaaacggcattatctggcggcctttgctgcctttttcgcgccaagacatatgggattatgcccgaaaacacggtttgccgaatatcgaggatgaaagcaataccgatacggcttatttgcgaaaccgcttccggcaccgtattttgcccgaactttcggcgcagattccccatttcgggcggcatgtgctgaacaatgtccgcgctttgcaggaagatttggctttgttggaagaggtcgtcgttcaagactgccgttgggtttgcggggccggttatttcgatacggcgcggtggctgacgttttccccgcgccggaaaacccatattttgcggaattttctaaaggaaaacggcatccccgtgccgaatcagaacgcacttgccgacattgcccgcgttttgacggaggcaaaaaccggacgttggaacttgcaaggctttgaattgcatcattatgcaggcaggctgtttgtgtttgcgtcggaacagttggcaaaaccggcttttctgaaagatgggacgataagcggaaatctcaaaaaaatactgacagaacatagatttgtgttgaagcggcatccgttcggacttcctgaagccatgttggaacaggacgggattttgaggacggtagcggcatcggatacgttggctgtcggcggcatccataaaaatgtgaaaaaaatccttcaggggaaacgggttctgcctttcctgcgcccaatttggccgctcgttgccgacagcggaaaccgtccattggcgttggcaaactgttgtgcggattttcaaatctcggtttcagacggcattttgcccgtacatcctgactttcccattttattt

SEQ ID NO: 29335 - DNA, 261 bp, Neisseria gonorrhoeae
atgagcgaaactaaaaatgttcgtactttgcaaggcaaagtagtaagcgacaaaatggataaaaccgtaacagtattggttgagcgtaaagtaaaacattcgctgtatggtaagattattcgattatctactaaaatccatgcccatgatgaaaataatcaatatggaattggtgatgtggttgttatatcggaatcccgtccattgtcaaaaactaaatcttgggttgtcagtgagttggttgagaaagcacgttctatt

SEQ ID NO: 29336 - DNA, 309 bp, Neisseria gonorrhoeae
atgccgcaacaaaccatgaatttaatgcgcgagtgcatacccatttttaccgtattgagcgatgaaaaccgccatcagatcctgcatgtattgtggaaacacggtaggatgaatgtgaatgagctgaccgagcatctgcatctgtcgcgccctgctgtgtcgcaccatttaaaaatcatgctgcaagccggagcggtggcggtggagcaggtcggcaaagagcggttttacagtattgccatggcggatgcggtggcgagattgaaacagcttgccgatttgatggctcaaaattgcccgctttcaaaa

SEQ ID NO: 29337 - DNA, 1716 bp, Neisseria gonorrhoeae
atgctgcccaaagaagagcaggtcaaaaagccgatgaccagtaacggacggattagcttcgtcctgatggcaatggcggtcttgtttgcctgtctgattgcccgcgggctgtatctgcagacggtaacgtataactttttgaaagaacagggcgacaaccggattgtgcggactcaagcattgccggctacacgcggtacggtttcggaccggaacggtgcggttttggcgttgagcgcgccgacggagtccctgtttgccgtgcctaaagatatgaaggaaatgccgtctgccgcccaattggaacgcctgtccgagcttgtcgatgtgccggtcgatgttttgaggaacaaactcgaacagaaaggcaagtcgtttatttggatcaagcggcagctcgatcccaaggttgccgaagaggtcaaagccttgggtttggaaaactttgtatttgaaaaagaattaaaacgccattacccgatgggcaacctgtttgcacacgtcatcggatttaccgatattgacggcaaaggtcaggaaggtttggaactttcgcttgaagacagcctgtatggcgaagacggcgcggaagttgttttgcgggaccggcagggcaatattgtggacagcttggactccccgcgcaataaagcaccgcaaaacggcaaagacatcatcctttccctcgatcagaggattcagaccttggcctatgaagagttgaacaaggcggtcgaataccatcaggcaaaagccggaacggtggtggttttggatgcccgcacgggggaaatcctcgccttggccaatacgcccgcctacgatcccaacagacccggccgggcagacagcgaacagcggcgcaaccgtgccgtaaccgatatgatcgaacctggttcggcaatcaaaccgttcgtgattgcgaaggcattggatgcgggcaaaaccgatttgaacgaacggctgaatacgcagccttataaaatcggaccgtctcccgtgcgcgatgatacccatgtttacccctctttggatgtgcgcggcattatgcagaaatcgtccaacgtcggcacaagcaaactgtctgcgcgtttcggcgccgaagaaatgtatgacttctatcatgaattgggcatcggtgtgcgtatgcactcgggctttccgggggaaactgcaggtttgttgagaaattggcgcaggtggcggcccatcgaacaggcgacgatgtctttcggttacggtctgcaattgagcctgctgcaattggcgcgcgcctataccgcactgacgcacgacggcgttttgctgccgctcagctttgagaagcaggcggttgcgccgcaaggcaaacgcatattcaaagaatcgaccgcgcgcgaggtacgcaatctgatggtttccgtaaccgagccgggcggcaccggtacggcgggtgcggtggacggtttcgatgtcggcgctaaaaccggcacggcgcgcaagttcgtcaacgggcgttatgccgacaacaaacacgtcgctacctttatcggttttgcccccgccaaaaacccccgtgtgattgtggcggtaaccatcgacgaaccgactgcccacggctattacggcggcgtagtggcagggccgcccttcaaaaaaattatgggcggcagcctgaacatcttgggcatttccccgaccaagccactgaccgccgcagccgtcaaaacaccgtct

SEQ ID NO: 29338 - DNA, 228 bp, Neisseria gonorrhoeae
atgagtatccaaaaagcagttgattattttggtaatgaatcccgacttgcacgggcgatcggagttaaacaaccgacggtgtgggcttggaataaaaaaggaacgccgcccccgatcattcggtgcgtgcagattgaaaaattaaccggaggcgcagtgaatcgaaaagacttacgtcctgatgactggcatctaatctggccggaattggcaggcgaccaacccaaa

SEQ ID NO: 29339 - DNA, 183 bp, Neisseria gonorrhoeae
atggctgaacaaaaaaagattagggttacattggttaaaagcctgattggtacaattgaatctcatcgtgcatgtgcacgcggtttaggtttgcgtcgtcgcgagcatacggtagaggttttagatacctctgaaaaccgtggtatgattaataaaatcagctacttgttgaaagtggagtct

SEQ ID NO: 29340 - DNA, 180 bp, Neisseria gonorrhoeae
ttggtagagcacctgctttgcaagcagggggtcatcggttcgatcccgtttgcctccaccaaaactttacaaatgaaagcaagtttgctgtttttagcagcttattttgatttgcgaagtagaataacgacgcatcgatctttaacaaattggaaagccgaaatcaacaaacaaagacaa

SEQ ID NO: 29341 - DNA, 2100 bp, Neisseria gonorrhoeae
atggatttattatcggttttccacaaataccgtctgaaatatgcggtggcggtgctgacgatgctgcttttggcggcagtcgggctgcacgcttccgtatatcgcaccttcacgcccgaaaacatccgcagccgcctccaacaaagcattgcccatacccaccggaaaatctcgtttgatgcggatatacggcgcaggcttctgccccgcccgaccgtcatcctgaaaaacctgaccattaccgaacccgacggcggccgggtcgccgtttccgtcaaagaaaccaaaatcggattgagctggaaaaacctgtggtcggatcggatacaggttgaaaaatgggtggtttcgggtgcggatcttgccctgacgcgcgacagaaacggcgcttggaacatccaagacctgttcgacggcgcgaaacactccgcctcagtcaaccgcattatcgtcgaaaacagcaccgtccgcctcaatttcctgcagcaacagcttatcctgaaggaaatcagcctcaacctgcaatcccccgattcgtcggggcagcagtttgaaagttcgggcatactggtttggagaaagctgtccgtcccgtggaaaagcagggggctgttcctttcagacggcatcggcacgcccgaaatctcaccgttccattttgaagcttccacttcgctggacggacacggcatcaccatttccaccaccggcagcccttctgtccgcttcaacgccggcggagcggatgccgccggcctcggcctgcgtgcagacacttccttccgcaacctccacctgaccgcgcaaatccccgcactggcactcaaaaacaacagcatcaaaaccggcacggtcaacggcacgtttaccgccggcggcgaatatgcccgatgggacggttcgttcaaactcgacaaagccaacctgcactccggcatcgccaacatcggcaacgccgaaatctccggcagcttcaaaacaccgcgccttcaaaccaatttctccctcggctcgccgttggtttggagtcgggacaacgggctggacgccccgcgcctgcacatatcgacccttcaggataccgtcgaccgcctgccgcaaccccgtttcatcagccggctcgacggttcgctgtccataccgaatctgcaaaattggaatgccgaattaaacggcacattcgaccgccaacccgttgccgcaaaattcaaatatacgcgggaaggcgcaccgcacctggaagccgccgccgcgctgcaaaaattaaacctcgccccctatcttgacgaatttcggcaacaaaacggcaaaatattccccgacatcctcggcaggctgtccggcaacgtcgaggcacacctcaaaatcggcagcatccaactccccggcttgcaactggacgatatggaaacctacctccacgccgacaaagaccatatcgcgctcagccgtttcaagtcagggctttacggcggccataccgaaggcggcatcagcatcgccaacacccgtcccgccacttaccgcctgcaacagaatgcaagcaacatccaaatccaaccgctgctgcaagacctgttcggcttccacagcttcagcggcaacggcgatgcggtcatcgacctgaccgcaagcggcgaaaaccgcaaacagcttatccgctcgctgcaaggcagcctgtcgctgaatatttccaacggcgcgtggcacggcatcgatatggacagcattttaaaaaacggcctttccgggaaaatctcgggcagcacacccttctaccgattcacgctcaacagcgaaatttcagacggcatcagccgccacatcgataccgaactcttctccgacagcctctatgttaccagcaacggctataccaatctggatacgcaggaattgtctgaagatgtccttatccgcaacgccgtccatccgaaaaacaaaccgattcccctgaaaatcaccggtacggtggacaagccgtccattaccgtcgattacggcaggctgaccggcggcatcaattcgcgcaaagagaaacagaaaatcctcgaagacaccctgctggaacaatggcagtggctcaaacctaaagaaccg

SEQ ID NO: 29342 - DNA, 180 bp, Neisseria gonorrhoeae; identical to SEQ ID NO: 29340

SEQ ID NO: 29343 - DNA, 309 bp, Neisseria gonorrhoeae
atggcaaaccaaaaaatccgtatccgcctgaaagcttatgattacgccctgattgaccgttctgcacaagaaatcgttgaaactgcaaaacgtaccggtgctgttgtaaaaggcccgattcctttgccgaccaaaatcgagcgtttcaacattttgcgttctccgcacgtgaacaaaacttcccgtgaacaattggaaatccgcacccatttgcgcctgatggacatcgtggattggaccgataaaactaccgatgcgctgatgaagctggatttgccggccggtgttgatgtagaaattaaagtccaa

SEQ ID NO: 29344 - DNA, 498 bp, Neisseria gonorrhoeae
atgagtaacacaaccgtagaacaatttgccgccgagctgaaacgccccgtcgaagacctgttgaaacagttgaaagaagccggcgtcagcaaaaacagcggcagcgattccctgacgctggacgacaaacagcttctgaacgcctacctgaccaagaaaaacggcagcaacggcggcaccatcagcatccgccgcaccaaaaccgaagtcagcaccgttgacggcgtaaaagtcgaaacacgcaaacgcggacgcactgtcaacattccttctgccgaagaattggcagcacaagtaaaagccgcccaaacccaagccgcacctgttcagccggagcagacggcagaagacgcggtaaaagcccgagccgaagctgccgcacgcgcagaagcccgtgccaaggcagaagcggaagcggcaaaactgaaagcggcaaaagcaggcaacaaagccaaacctgccgcgcagaaacctaccgaagcaaaagccgaaaccgca

SEQ ID NO: 29345 - DNA, 390 bp, Neisseria gonorrhoeae
atgaacggtaaatactactacggcacaggccgccgcaaaagttcagtggctcgtgtattcctgactaaaggtacgggtcaaatcatcgtaaacggccgtcccgttgacgaattcttcgcacgcgaaaccagccgtatggttgtccgccaacctctggttctgactgaaaacgccgaatctctcgacatcaaagtaaatgttgtcggcggcggcgaaaccggccagtccggcgcaatccgccacggtattacccgtgccctgattgattttgacgctgctttgaaacctgccttgtctcaagccggtttcgttacccgcgatgcgcgcgaagtcgaacgtaaaaaaccgggtctgcgcaaagcacgccgtgcaaaacaattctccaaacgt

SEQ ID NO: 29346 - DNA, 267 bp, Neisseria gonorrhoeae
atgctcaaacaatccatcgaaatcatcaacaaactcggactccacgcccgcgcgtccagcaagttcacccaaaccgcgtcccaattcaaaagcgaagtctgggttacgaaaaacggcagccgcgtcaacggcaaaagcattatggggctgatgatgctcgcagccgccaagggtacggtcatcgaactggaaaccgacggcttggacgaagccgcagccatgaaggcattgaccgacttaatcaacgactacttcggcgagggcgaa

SEQ ID NO: 29347 - DNA, 9246 bp, Neisseria gonorrhoeae
tcaacctgctcttccgtcatggaagccagtttttccgccagcgcgttgccgctcaaataatccggcgggccgtccgaagccgtatggtcgcgccccgccggaatatccgacagcgtattgggcgtattcttcccggcaggcggcttttcggcgggcttttccggttcggcggcggattttgccgccttaaacatatcgaacgccccgatgacctcggcggcagtcccgtccttaagcgcgtcattaaacgccttgcggacaagcgggttctgcccggccagccactcctccagctcgcggctttccacaatcgaatccgcatcggggtgcgccgtatagatttcgcggtaatgcgcctttgccgcctcctgccgcttcatgtccgcctcataacccgccagcttctcctgaatcagcttttccacgccctttttcacatcctcgtcggaaaaatccccgaacaacgaattatcggaaccgtcagccgtttccactccgggtttttccgcccccttctcaagctcctcgatgcgctccctcaaggcttgggcttcggctttcgccgacttttccgcctcgcgcgcctctaccagcttttcataagggatagtgtgtttgccgtccttggcacggatgaccttgtccgcacgccgtccgccgcaccgatacccgcgccgaccaccgcgcccgtactgccgaccaccagcgattccgcccacttcttaccctccaaaccgtcttggatatcggggaaaaccaactggttcaagcccaaacgccccgacacgtccagcggcgtcaggcggctgaagcccttggccaacacctcgcccgccttatccccgaaagcatccgccaacatattgcgcaacgccgcttccgcatcccacgggtcatcgtcgtcactgcccaacatcgaagccaccgcaagcagcgtcgacacaaacggcagccccaagatgcccgaagccatcgcatgcgagaccaacagccccgccagcgtcttacgcgcctccttatcccccttaaacgcaaggtacgcattgcgccccagcgcatacaggatattctgcgaatactgcttgaacagaaagaccaccttcgccgcattgcccatcataaagcgcggacggttttgcgccgcatagtcaaaatgcccgtcatacgtcgcctttttcgcctgttcgaaagccgcctcgctgtccgcccccgcccgtttcgccaaacggtaggccgcgacaaacgtaacctggcggttaaacttctccgcatgatggaacagccaggccgccttatccatcaccttctgccaagccgaccccgccaaccccgggtcgccgttggccacccccgccaaatcatgcgcctgcgacaaatcgatcacaccgtaatccgccgcctttcggaacgccgccttctcatccccgttcaaactgtcctcaatcgtattgaacttctccccgaacctcagcccaatctgttttgaagcccgcagcaattcccgcgccgcaccggcataaccccacttcgccgccatcaccggataagccaccattgccgtctgcgacaggttcacaaccgcagaagcgggcgacatccccatcatccacaaaaagccgaagcccgtcaaagcctgcgccagcttggaaggattcggattcatcaccgcctcgtggcgtttcctcatctcatccgccacacgctgcaactgacgctggtcgaaaccctcctcatatttgcgcccgtccacaaaatcctgcatcacatccaactgttccgccatacggtccgcatagcgcaacttcgccagataattcgcaccgctgcccatattctgcgcatatgcgcgcctcgcatcatcgctgaagcccggcacgcccttgcggtggatgccgtgtttcgcccaagacgtatcgggcagcgagttcaaataaagctgcgtcagcgtatcgttcaatcgggcccgttgcgccggatccaaatccaacataccgacagcctcgcccagctccctcataaaaccgctgccgaccgcatcgcggcttcggatataatcccgggacttcatcacgggcgaaaccttaaaccccgccccgaaatcagccttcagcgcatcgcgcagcttctccgcctcgctcaaagtttccgcgcgggacacattcgcactattcccgtccgcatccttgaccaccaccagataatcgccgaaacgcgccaaggggaaatacacaccgcccagctcgttgtcaaaacgctccttcaggcggcgcaccgtttccgcatcctgccccgcacgcgccaaccgttcggcaagcgcatcgcgcacctgcccgaaatgcgccctataatcatcccgcgccttgcggtacaccctctgcgccgcatcaggcagcccggcaaaacggcggttcagcaaagcaagcccctccaaagccttttgcgccccaacctcatccttttccaaacgcttcacatccgcgcgcgcctgctccaacatccgtaccgcatccgttttagcccggctttccgccgccacatccgccccggcgcgcctcaacgcccgcttcgcctccgaatccgcataaaacagacggcgcaggcgcatatccgcctcatccgccaaaatttcccgaccgtgtttttcctgcgccttctccagcgcataagccgccttatccgccgcccgttgcgccttattgtaagcggcatccgcacgcgcaatacgcgcaccggcggaagcaacggccgcctccgccttctcgattttaccgtccgcaatatccaaagccgtccggatgccgtccaaacgcttctgagcatcctttcgcatcagcgggtcggcatccaccttcgccagcgtcgcatcgtgcatcagatccgcaagcgctttcgcatcctcctccttcaacctgccccattccctgacaaccttgtccgcctccgtaaccgccttgttcgcatccgcgccgaagagttccgacaaacgcccgtattccttcaggccgtccaaaacgccgccgtaaatgtcctcgatctgccgcctgcccaaaaactggagctgaatccccttggaagcatcccagcggtctttcagcgcgtttctcaaatcggattttttacccgttatacggccgattgcggcctcgatgttcgccgcacgggaaaaacgcaccgcctccgtgtcaaaatcggcaatgccgcccttgcccgcatctttgtcttgcaaaatctgcaacaggcgtttatcatcaatgcccgataaaggcgatttgctttcagaggctcccgtagttgatacgcggtcaagtaatgaaagcaagttgcctttttctattttcgtcagcttatggtcgtaatagcggttaccgttcctgctaaccgcgacggcagcccttaccgtgtaatccgcaccgccgacattcagtcccgaaacataatattcataaccctgaatatcgccgttcttagccaaatcctcgttcggcagcgtatcgatatacaccgcattctcaataatctgcggaattgccgcgatactctgcaaatgttccgcgtccttatagtcgtgacgcaatatttcagtgatgcccgaacgtcccaaactgatttcacgccccgtgtccttattcacataaggcccgcgcaaagatttgccgtattccagcgcattgcgcttatattcgcgcaaattgccgccttccggaacctccctgcccgagatacggatggtttccgcacggcgcagcttctcaaggctttccgacttggaacgttccgccgcaccgtcttcggcccgcgcgaacatcactgcacgatgattgccgccccaaggcgcatcccgcgccccttccacattcccgtgcaaatccgccagcatcgcaaacacatccgcgtccgacatcgcaccgccggccttgcccgccaggcgttgcagcacacggcgcaacagggcgccgatacgcgccaacacgcccgcaatgccgcgtttcaaaccgttgccgaccttcacgccgtaacggttttcaatgcccgcccaaccgccggtacgctgcgccgcataaagctccgcgaccgcctcttccaccgcggcggggcgcaccgaggccgccgcatcgcccgtgccttcgcgcccttcctgcaccgcgtccgcaatgcgccgaatcaggccgttgccgtccgcacgttccaattcttcacggtacttggcgaaaccatccgccgcaaagcccctgtgccccagctcgtgccacgccgcccataccgcacgttcgggcgtaaggttttccgccaccagcgtgattttgcccgtcctgccgtcaaaccagccctccacacgctgcgacaacagcatctgcgccttgtccggcgccgtttcggacacggcggcgacatccacccgttccgccagtccgcctatgctttcggcgaggcgttttttgatgctttcggcgtgctcgcgcaatgccttaaaaccttgcggcgcctgacgctctttcaccgtataaacaggccctccctgcaacacacgcgccttgcgccgtgcctcttccggattgtccgaagccgttttcgcaaacgtttcaggcttggctttgcccgtcttttcagacggcttttcggttgccgcgccttgtgcggcggccgacttgccctttccgccatcgaagcgggattttcccgcttcgatatttcgcaccttatccgaagacggcttttcggttgccgcattttttgcagcagccgccttgcccgcaacaggcgtatcttttgcccgggcaggctgcgccctgcccgccggtttgccgtcggcggcggcatcgcgcggccgcgccatcaccttggccggcgcccttgcttcctgcgtcggacgataatcccgacccggctcggacggcacggcttccgacaaaccgcccgcccgcaaggtttccgcctcccgccccttcaaataacggcgaccgtcggagacaaggccgtcagagttggaaggaccggccatatcggcaaactcctccggcatgccgcctttgcccggcctgcccggcacgcccgcaagcgcatcaatatgcctgcggtccgtatgctcgaaacggtattcgccgccccccaaaggcacacccgccttttccggcctgcgcctgtccgccgccaaacggcgcgtgaaatccgccgccgcatccgccatccgtttcttaggcgataccctgcccgccgattccgcaacctgcggattcaataccggcaacaccgtatcggggcgtttgcccgcaacaggcgcacgtttcccgccgtccgtcccggcaaggttttcagacgcggacaggccgggcgcggcaccttccgcgcgcgcccgaacctgtaagttttgccgacgggccggcgcattgccggacgcaacggcggaccctggcaaaccctgcaaggcagccgcatttgcatccgcccccgcatcaggggtcaaacccctgccgccttgggtcaaaccctgccgcacatcctgccgcacatcctgcgccaaacccttatcttccgtgggtaaagcccgggtcaaacccctgccgccgccgacaacggcctcagacgcgccgtcatccggcaacgccgtccgaaccccctgcaaacgctccccctcgcggctcaacagcggcacgctccaaccgttgttgcggcggtaaccgtaaaccgcacggttaagcctgtccaacacatccgccgattccggatgttgcgcacggtaagcgcgtacagccccggccgattccgccaaaccctcaggataatgtccgcgcatatccgccatacccgcctcccggcgcataatcccgtccgccgtatagtccgccaccgtctgcgcatgacggcgcacccattcaggcagcgcgtcaaaccgcctgcgcgattccttatccaacgcatcggcagggacggaaaacccttttttaggaacaggcacggcatccgccatacgcacgggcggcggcaggtaaccctgtttggcttcggaagccgcctgataatccgcctcaatccgcgcgtgatacgcctgctcgatttttcggcgcacaggcgcggcgatttgcccgaaatccgcaacgcccttaatatcaaggcccgcctccttcgccaaagccttgcgcccgcgcgtatccaaaccgtcgaagtattggcccgcaggcagcggcgcgacacgcgcaatcccgcccgaagcagcggcggcagaaccgcccggcgcaaccgaagccgcaccgcgcggcgcaccgccggggcgcacattgccgtaagcggacggaacaccgcccctgtccgcatccgccgaccgtccggacggcgcatcatccgcaaccgaccgggcttccatatcgtcagacaccgcagacggcacagccgcgcccgaatccgccgccaaagcagcggccgcagaaaccgcaccgtcatccggatcaatccccaccgcctccgacggcttggcccggtatttagccgccatgtccgcatactgacgcgccaaaccgtccggcatcacgcccgtatccaaaaattccgccccgtcctccgacgggatacccgaaacatccggctgtttttccgtcccgcgcgccaattcctccgcgtgcggcgtattgccgtcggcagggccgctgaaaaaccgccccgcctcctcctgcttcgtacggtccgcaaactgccgcaaagccggatgcgactgatcgtgatgcgccgtatcgaaacccgcgccgccctgttccgcgcctccgtccgcagccgcctgtgccgccgtccgcagccgcctgtgccgccgcacgcaacgcctgcgccccttccggggccggcctgcccgccttcctgttgcccccgatacccccctgcgcacccgccttccgtccggccgggcggcctgagcgggtcagttaccgccgcataagccttcgttccggcaaaccccaccgcagaatgccccaaagaagagaaagcctccaaagccgcccccttctcgtcccattccccgtttgccagccccgtacccaaatactcgcccgcaaactcaccggccgattccgtcgcataagccgccgcgtgccgtgccgcaccgcccaaaccgcccttggcagactccttcgccagcgccgcaaattcaggcgttcccttagccgccgcaaccgccgccttatccgccgccgcaacacccattttctccaatgcggctttcccggcggccttcttgcccatattcaaaatactgccgccaagtttcatcgccgccatatccgccgcgccgaccaccgcgcccttgaccgccgcatttttcaacgcacccggcgcacctcggccgataaacgccatcaccgcatccttgtccgcagggtcgacgcccgccgcctctgccgccctgtccagctgcccgccgtattccatcagcgtattgcccaaggtcgcgcccgcataagcgccgacagccgcgttaccgcccgccaaagcgcccaatatgccgccggcggttgccgtagcaatagggacaagcgcattgggcgcctgctccagcaccgcacccgccatctcgcccacatcttccaaggcgccgtccaaacccttctcgcgccagtccttcttaagctccccccacacattcgacaggccgccgccgacacccccgcccttttcccaagcctcgcccaactccctgcgcgcttgggatttgcgcccctcctgaatcttccgataatccatatcctcggccttgagccggcccagttcctctttgtcgcccgtaagggcattccaccccatacgcgccgaacgcatagaatttttaaacccgcgcgtcaacgccgtatcgtcggcggccgcccgcgcatccttttgcgtaaagccgcggtactccttcaaacccccgacaagccgcccgtgttccaacggatcgtatctgaccaaatcactcattgctcaaccctcttctcacccttctcattctcataaatgattttaccgccggccgttttctgaccgttcggcttaaagcccaacgccgcataacgcttctcgcgctctcccgcaaactccacatccaaaggcttgcccgtccgcaaatcgacaatcccctcgcgcttcgccgtcaagcccgtatccgggtcggcaacctcataactgacagtcttgaacacattcgggtcaaagcccttctccccttgccgctcaaacttcccgttaagcgcatcaatctgccgcgcaatctccccgcgctgcccgtccgacttcgcaaaaccataagcccgcgtcaaatcggcgatgcgcttcctatcctcaagctccagcgcatccgcctcacgcttcatctcaaacccctgccgcttcatccccagctcggcctgctgcacatcaaacgccctgtccgcattcctctgcgccatctcgcggttcaacgcaccctcgttcgccttaaccgccgcatcaaaccgccccttctgcaacaccgcctcacggttcgccgcattctccgccgcagccgccgccagcctttccctgcccaattccctgaccgccgcatttttattatgttccgccacaatcccgcgcgccgcattaagctgtgccgccgtcaactgaccgttcaaggcccccgcataaggcgtagtcgccctcttataaagctcccgctcctcaggcgacagcgcatccggcccggcagacaccaaaggacgctgcgcgtcaaaatcacgcaccggcttgccgccccgatacacattcccgtcaaatcccaaaggcggcggcgtccgtccgcccgcatccgtcgggcgcgtatcgcgccgcgcgaaatccgccccggcccgcgcatcgggggaaagcgccttatcgccgcccgaaaaccccaaaccggcatccgcaccccgttcgaaagcacccgcccggcgcaaccgccgcgccccatcctcaatattgttacggctcaaatccatcacattccgataacgcgccggcccggcctcataattcgcaacggtacgccgcaccgcatcggcacggtgcgcctgtgccgccgcccgctcccgctcctccgcccccttccgggccttctctttttcctccttttccttcatctcccaaaaatccccggcagacggctcaaacaaacccatcgcaaaccctccgaacaaataaagtccaaaataagcaaaaacccaagcccaatcaaacgcctaaagttaagaacaaacaaaaatcgcaaccccggaccaattaacaaacaacaag

SEQ ID NO: 29348 - DNA, 327 bp, Neisseria gonorrhoeae
atgagagtaaatgcacaacataaaaatgcccgtatctctgctcaaaaggctcgtttggtagctgatttgattcgtggtaaagacgttgcccaagctttgaatattttggctttcagccctaaaaaaggtgccgagctgatcaaaaaagtattggagtcagctattgctaatgctgagcataataacggtgcggacattgatgaactgaaagtggtaactatctttgttgacaaaggtccaagcttgaaacgttttcaagctcgcgccaaaggtcgcggtaaccgcatcgaaaaacaaacttgtcatatcaatgtgacagtgggtaac

SEQ ID NO: 29349 - DNA, 312 bp, Neisseria gonorrhoeae
atgaatcaacaacgtttgactcaagtaatcttggtgcctgtcgtttctgaaaaaagcaacgtattggctgaaaaatgcaaccaaatgacgtttaaagtcttggcaaatgcaaccaaacctgaaatcaaagctgctgtcgagctgctgttcggtgttcaagttgcttctgtaactaccgttaccactaaaggcaaaactaagcgttttggtcgtattttgggtcgccgcagcgatgttaaaaaagcttatgtaagcttggttgacggtcaagagttggatttggaagccgctgctgcagctgcagataaggaa

SEQ ID NO: 29350 - DNA, 249 bp, Neisseria gonorrhoeae
atgtcgctttttattaccgacgagtgcatcaactgcgacgtatgcgaacccgaatgccccaatgatgccatttcccaaggcgaggaaatttacgaaatcaaccccaacctctgcacgcagtgcgtcggacactacgatgagccgcagtgccagcaggtttgcccggtggactgcatcctgattgacgaagaacatcccgaaacccatgacgagttgatggcgaaatacgaaaagattatccagtttaaa

SEQ ID NO: 29351 - DNA, 684 bp, Neisseria gonorrhoeae
ttggcaggcatcctgaccgtgttcggcttcgacattccgcacggcattgtttggtttgtctttattttcatgattttggcgatctttatcgccatgtggataggcaaccctttgattcgttacaattatgaaaacaaaaaactcaacggcgactaccgttattccctcatcctcgtacgcgaccacgccgaaagcgtggcgttttacagcggcgaacaacacgaacacggccggctttccgaccgctttaaagccattatccgcaaccgttggcgcatcgcgcggcaaagcgtctgcttaagcggctttaacgatatgttcaccaacggcatcaaactcttcctgattattttgcaagctccgcgcctgtttgccggacaaatcaaaatcggcgacatccagcagaccgtccaagccttcgcgcgactgcaaaacgcgctgtctttcttccgaatgttctacaacaaattcaccgcctgccacgcccgactggagcgtctgtacgtctttttgctgagtaccgaagaacaacacggcgcgcagcaacccgagattagcgaagtttcagacggcattgcactggaaaacgtcgccctgttccgccacaacggcgaagttttattggacggcatcaacatcaaactcaaaagcggcgattccctgctgatacgcggcccgagcggt

SEQ ID NO: 29352 - DNA, 276 bp, Neisseria gonorrhoeae
atggctcgttcattgaaaaaaggcccatatgtagacctgcatttgctgaaaaaagtagatgctgttcgcgcaagcaacgacaaacgcccgattaaaacctggtctcgtcgttctaccattctgcctgattttatcggtctgaccattgccgtgcacaacggtcgcacccatgtgcctgtgtttatcagcgacaatatggttggtcataaattaggcgaattctcattgacccgtacctttaaaggccacctggccgataaaaaggctaaaaagaaa

SEQ ID NO: 29353 - DNA, 180 bp, Neisseria gonorrhoeae; identical to SEQ ID NO: 29340

SEQ ID NO: 29354 - DNA, 399 bp, Neisseria gonorrhoeae
atgaaagacaagcacgattcttccgccatgcggctggacaaatggctttgggcggcacgttttttcaagacccgttcccttgcgcaaaagcatatcgaactgggtagggttcaagtaaacggctcgaaagtcaaaaacagtaaaaccatagacatcggcgatattatcgacctgacgctcaattcccttccccataaaatcaaggttaaaggtttgaaccaccaacgccgcccggcacccgaggcgcggcttctgtatgaagaagacgcgaaaacggcagcattgagggaagagtgcaaacagctcgaccaattcagccgcatcacttccgcccatcccgacggcagaccgaccaagcgcgaccgccgccaactggacaggctgaaaaaaggagactgg

SEQ ID NO: 29355 - DNA, 180 bp, Neisseria gonorrhoeae; identical to SEQ ID NO: 29340

SEQ ID NO: 29356 - DNA, 276 bp, Neisseria gonorrhoeae
atgacagaacatacgcctgaaaaaaagaatgttaaagtgaatcaactggttgttcaagataaagaatctgcatctaattccggtaaggagggtttttttgcatatttctcaaattcttggtccgaattcaaaaaggtggtttggcctaagcgtgaagatgccgtcagaatgactgtatttgttatagtgtttgttgctgtgctttctatatttatctatgcggcagatacagcaatttcgtggttattttttgatgtattgctgagaagggaaggt

SEQ ID NO: 29357 - DNA, 189 bp, Neisseria gonorrhoeae
atgaaagcaaatgaattgaaagacaaatccgttgagcagttgaatgcagatttgttggacttgttgaaagctcagtttggcttacgtatgcaaaacgctaccggtcaattaggcaaaccaagtgaattgaaacgtgtacgtcgcgatattgctcgtattaaaaccgttttaactgaaaaaggtgctaag

SEQ ID NO: 29358 - DNA, 852 bp, Neisseria gonorrhoeae
atgagcaacggcgcgcgttggacggttaccaatgattcaatgctgaaagagttggatttgtcggaagacgcgcaggtcgaatttagcgacaacaataaattcgtcaaagtgtccgtgagcaagctcaagggcgatggcggcgtgttcaaaatgtatggcgacatcgtcaaaggagaatcggacaagctgattacccgaaaaggcagcgaagggacgcacatcatcgaatatatggacgatgccaaggcaaaaacgacgggaagggaatatctgaaactggtcgaaaacaagggcaatcaagaagacaataaagcatcaaataaagcatcatacaaattgaatgtccgctgtacggaacagggagggtggtgttttgccttgggtgagtcgggtgcttccaaaaaggtcaatatttccacagacggtaagcgggacttctacctctacccggataccctgacgccgggcgcatcgagcagcgtccttttcggcgaggcgttgtatcagttgaacgcggtttccgatgaaacgctggtgcagcgtatgggcgaaatccacgccgacggaatgccgcaggaagacaacaacgtttggatcaaacgcgtcggcggaaaattctccggcagccgcagcgattaccgcgtgggcggttacggcaaccgctattggggctttgccggcggcttcaacaggacggggttcggcgataaatggattcattacaaagggctgatgctccgccacctccaatcgtcctacgcttccgaagactacgtcggcagcggcaaaatcttacggcagggcggcaggtgtttattccgcctggctcaaccgggaaagcagggcttatta

SEQ ID NO: 29359 - DNA, 165 bp, Neisseria gonorrhoeae
atgcgccgtttcaaacgcgccgtagaaaaaaccggcctgctgaccgagctgcgcgcccgcgaagcctacgaaaaaccgactaccgaacgcaaacgcaaaaaagcggcagccgtaaaacgcctgcaaaaacgcctgcgcagccaacagctgccgcccaaaatgtac

SEQ ID NO: 29360 - DNA, 576 bp, Neisseria gonorrhoeae
atgctcaactatgtcaactattccgatattcacgacaatattatcaacaaagcgggcaagtgcgtttttgcctacaatgccaactacgataaactgtccgccaatcattttgaaaactgccaaatcggcatgcactttaccgccgccatcgaaggcacgtccctgcacgacaattcctttatcaacaacggaagccaggtcaaatatgtcagtacgcgctttctcgactggagcgagggcggacacggcaactactggagcgacaacagcccgttcgatttgaacggcgacggcttcggagacagcgcgtaccgtcccgacggcatcatcgaccaaatcatctggcgcgcgcccgtatcgcgcctcttgatgaacagtcccgcaatcagcatcgtcaaatgggcgcaggcgcagtttcccgccgttctgcccggcggcgtggtggacagcaaaccgctgatgaagccttatgcccccaaaattcaaacccgttatcaggcgatgaaggacgagttgctcaaagaagccgaaacgcggcagtcggaacggggcagggcggaaaacggttctttgaac

SEQ ID NO: 29361 - DNA, 234 bp, Neisseria gonorrhoeae
atgggtttgattgctatcgcatgtggtttgatcgttgcattgggtgcattgggtgcatctatcggtatcgcaatggtcggttctaaatatttggagtcttctgctcgccaacctgaactgattggtccgctgcaaaccaaactgttcctgattgccggtctgattgatgccgcattcttgatcggtgtcgccattgcactactgttcgccttcgtcaacccgtttgcaggtgca

SEQ ID NO: 29362 - DNA, 468 bp, Neisseria gonorrhoeae
gtgaatatcaatgcaacattattcgctcaaatcatcgtctttttcggtttggtatggtttaccatgaaatttgtgtggccgccgattgcaaaagctttggatgagcgtgccgcaaaaatcgccgagggcttggctgccgccgagcgtggtaaaagcgatttcgagcaggctgaaaaaaaggttgcagaacttttggcagaagggcgtaatcaggtttccgaaatggttgccaacgccgaaaaacgtgccgccaaaattgtcgaagaagccaaagaacaggcttcttccgaggcggcgcgcattgcagctcaggcaaaggccgatgtggagcaggaattgttccgcgcacgcgaatccctgcgcgatcaggttgccgtgttggctgtcaaaggtgccgaatctattttgcgcagcgaagtcgatgcttccaaacacgcaaaactgctcgataccctgaaacaggagttg

SEQ ID NO: 29363 - DNA, 531 bp, Neisseria gonorrhoeae
atggcagagttcgcaacgatcgccagaccttatgcaaaggcattgttcggtctggctcaggaaaaaaaccaaattgagtcttggttgggcggactggaaaaacttgcggcggttgttcaggaagggaaggtggcttcattgattgaccgtcctgaaacgaatgcttcagaaaaagcagatatcctcatcgatttggtcggtttgaaagacaaggagttaaaaaactttgttatcgtcttggccgggcagaaacgtttgtcgatattgccggaagtgtatgctcaatatcaagacttgaccttatcattcaaccatatcaaatctgccgtcatttacagtgcctatccgttgaccgacaaacaggtcggcgagttggcgcaaatgctgaataagcgtttcgacagcgagctgaaaatctctgtcgaaatcgaaccggagctgattggcggcataaaagttgaagtgggtgatcaggttttggatttgtctgtacaaggcaaactgagtgctttgtacacgactatgacgaat

SEQ ID NO: 29364 - DNA, 483 bp, Neisseria gonorrhoeae
atgaacactcaccaccacccgccctgcccctgcggttcaggcacaagctatgccggctgctgccgaccgcttcatctgcgccaaatcctgccgcccaccgccgaagccctcatacgttcgcggtacggcgcatatgtgctgcaccttatcgactacatcatcgctactaccgttccggcgcaacaaacattcctcgatgccgccgaactgatgcagtggagcagagaagccgaatggctgggcttgaatgtcatcgcacaccgcaacctcggcaaacagcacgcccaagtcgaatttgaagcctacttccaagacggcggaaaccgaacagtgcatcacgagctgtcggcattcgtgaaaatagcggagcaatggtatttcatcgatccgactgttccgctgcctaccatgaaacagccctgcatttgcggttcgggcaaaaaattcaaagcctgctgcggcaaatatctgcaacctgtcgca

SEQ ID NO: 29365 - DNA, 132 bp, Neisseria gonorrhoeae
atgaaacgcacttatcaaccttccgttaccaaacgcaaacgcacccacggcttcctcgtgcgctccaaaacacgcggcggacgcgcagtattggccgcacgccgtgccaaaggccgcaaacgcctggcagtg

SEQ ID NO: 29366 - DNA, 632 bp, Neisseria meningitidis
atgaacacctcgcaacgcaaccgcctcgtcagccgctggctcaactcctacgaacgctaccgctaccgccgcctcatccacgccgtccggctcggcggggccgtcctgttcgccaccgcctccgcccggctgctccacctccaacacggcgagtggatagggatgaccgtcttcgtcgtcctcggcatgctccagtttcaaggggcgatttactccaaggcggtggaacgtatgctcggcacggtcatcgggctgggcgcgggtttgggcgttttatggctgaaccagcattatttccacggcaacctcctcttctacctcaccgtcggcacggcaagcgcactggccggctgggcggcggtcggcaaaaacggctacgtccctatgctggcggggctgacgatgtgcatgctcatcggcgacaacggcagcgaatggttcgacagcggcctgatgcgcgcgatgaacgtcctcatcggcgcggccatcgccatcgccgccgccaaactgtgccgctgaaatccacactgatgtggcgtttcatgcttgccgacaacctgaccgactgcagcaaaatgattgccgaaatcagcaacggcaggcgcatgacccgcgaacgcctcgaagagggg

SEQ ID NO: 29367 - DNA, 489 bp, Neisseria meningitidis
gtgaaacccgccgcgcaaccgcctgtgcagtccgcgccgcaacctgccgcgcccgctgcggaaaataaagcggttcccgcgcccgccccgcaatctcctgccgcttcgccttccggaacgcgttcggtcggcggcattgtttggcagcgtccgacgcaaggtaaagtggttgccgatttcggcggcaacaacaagggtgtcgatattgcaggaaatgcgggacaacccgttttggcggcggctgacggcaaagtggtttatgccggttccggtttgaggggatacggaaacttggtcatcatccagcataattcttccttcctgaccgcatacgggcacaaccaaaaattactggtcggcgaaggtcagcaggtcaaacgcggtcagcaggttgccttgatgggcaataccgacgcttctagaacgcagcttcatttcgaggtgcggcaaaacggcaaaccagttaatccgaacagctatatcgcgttc

SEQ ID NO: 29368 - DNA, 1413 bp, Neisseria meningitidis
atgccgtctgaagccctttcagacggcattgcacaggaaaccgtcatgccgcaaaacactttaaacatcgttatcctcgccgccggcaaaggcacgcgcatgtattccaaaatgcccaaagtgctgcaccgcatcggcggcaagcccatgctcgggcgcgttatcgacaccgccgccgcgctgaatccgcaaaacatctgcgtcgtcatcgggcacggcaaagaccaagttttaaacgctgtcaaacgcgatgtcgtttgggttgaacaaaccgaacagctcggtaccggccacgccgtcaaaaccgccctgccccaccttgccgccgaaggccgcacgctggtgttgtacggcgacgttcctttaattgacgttgaaaccctcgaaaccctgctcgaagccgcaggcaacgaagtcgggctgttgaccgacgtgcccgccgacccgtcaggtttggggcgcatcatccgcgacggcagcggcagcgtaaccgccattgtcgaagaaaaagacgccgacgccgcccaaaaagccgtgaaagaaaccaacacaggcattctcgtcctgcccaacgccaaactggaaaactggctgaacagcctttccagcaacaatgcccaaggcgaatattatttaaccgacctcatcgccaaagccgttgccgacggtattaaagttcatcccgtccgagtgcgcgcctcccacctcgccgccggcgtgaacaacaaacgccagctcgccgaactcgaacgcatcttccaaaccggacaggcgcaagaattgctcaaagcaggcgttaccctgcgcgatccggcgcgtttcgatttacgaggccgtctgaaacacggacaggatgtcgtaattgatgtgaactgtatctttgaaggcgaagtcgaaatcggcgacaacgtcgaaatcggcgcaaactgcgtcatcaaaaacgccaaaatcggtgcaaacagcaaaatcgcccccttctcccacctcgaagactgcgaagtcggcgaaaacaaccgaatcggcccgtacgcccgcctgcgtccgcaagcccgccttgcagacgacgtacacgtcggcaacttcgtcgaaatcaaaaacgccgccatcggcaaaggcaccaaagccaaccacctcacctacattggtgatgccgaagtcggcagcaaaaccaacttcggcgcaggtacgattattgccaactacgacggcgtgcacaaacacaaaaccgtcatcggcgacgaagtgcgcatcggttcaaactgcgtactggttgcccctgtaacactgggcaacaaagtaaccacaggcgcaggcagcacgattacccgcaatatcgaagacaacaaactcgccctcgcccgcgcccgccaaaccgtcatcgaaggctgggtgcgtcccgaaaaagacaaacaa

SEQ ID NO: 29369 - DNA, 2367 bp, Neisseria meningitidis
ctgaacggtgtaaataccaccggtatggcggtgatgctgtccaacagcggcaatgcgatggcgacggcaaaggcggttaaagaacgcatggcgacgttggaaaaatactttcctcagggtatgagctggaaaaccccttacgatacttccaaattcgtcgaaatttcgattgaaaaagtgattcatactttaatcgaagcgatggtgctggtgtttgtcgtaatgtatctcttcctgcaaaacatccgttatacgctgattccgaccatcgtcgtaccgatttcgctgttgggcggtttcgccttcatctcttatatgggcatgtcgattaacgtactgaccatgtttgcgatggttttggtcatcggcatcgtggtcgatgacgcgattgtggtggttgaaaacgtcgagcgcattatggcgggtgaaggcttgccgcccaaagaagcgaccaaaaaagcgatgggtcagatttcgggcgcggtcatcggtattaccgccgttctgatttccgtgttcgtaccgttggcgatgttcagcggggcgacgggcaatatttacaaacagtttgccctgacgatggcgtcatcaatcgcattctccgccttccttgcgctgacactcacacctgctttgtgtgccacaatgttgaagaccatcccgaaagggcatcacgaagagaaaaaaggtttcttcggttggtttaacaaaaaattcgacaactggacacacggctacgaaggctgggttgccaaagtattgcgcaagactttgcgcatgatggttgtttatgttggtttggcggttgtgggcgtgttcctgtttatgcgcctgccgacttcattcctgccgaccgaagaccaaggcttcgtcatggtcagcgtgcaactgcctgcaggagcgacccaagagcgcaccaatgcgactttggcgcaagttacccaactggcgaaaagcattcctgaaatagaaaacatcattaccgtttccggcttcagcttttcgggcagcggtcagaatatggcgatgggttttgccatattgaaagattggaatgagcgtaccgcgcccggcagcgatgccgttgcgattgccggcaagctgacgggtatgatgatggggacgcttaaagacggttttggcatcgccgtcgtcccgcctccgattttggagttgggcaatggttcgggcctgagcatcaacctgcaagaccgcaataataccggccataccgcattgctggcgaagcgcaacgagttgattcagaaaatgcgtgccagcggtttgtttgaccccagcaccgtccgtgctggcggtttggaagactcgccgcagttgaaaatcgacatcaaccgtgccgccgcggcggcgcaaggcatttcgtttgccgacatccgcaccgcattggcaagtgcgctgagttcgtcttatgtcagcgacttcccgaaccaaggccgtctgcaacgcgtgatggtgcaggccgacgaggatgcccgtatgcagcctgccgatattttgaacctgaccgtgccgaacaaatccggcgtcgccgtaccgctttccaccattgctactgtttcttgggaaaacggtacggaacagagcgtacgcttcaacggttatccttcgatgaagctgtccgcttcgcctgcaaccggcgtttccaccgggcaggctatggcggcggttcaaaaaatggttgacgaattgggcggcggttacagcctggagtggggcggacagtcgcgcgaagaggcaaaaggcggctcgcaaaccctgattttgtacggtttggcggttgcagccgtatttttggtacttgccgcgctttatgaaagctggtcgattccgctggcggtcatccttgtgattccgttgggtttgatcggtgcggctgcgggcgtaaccgggcgcaacctgtttaaaggactgttgggcagcgttccctcgttcgccaacgacatctactttcaagtcggtttcgttaccgtgatgggtttgagtgcgaaaaacgcgattttgattatcgaatttgccaaagaccttcaagcgcaagggaaaagcgcggtcgaagctgctttggaagccgcccgcctgcgtttccgtccgattatcatgacctcgttcgcctttattttgggcgtggttcccctgtatattgccggcggtgcaagttctgccagccagcgcgccattggtacaaccgtattctgggggatgctcatcggcacgctcttgtccgtgttccttgttccgcttttctatgtggtggtgcgcaaattcttcaaagaaaccgcgcacgaacacgaaatggcagtaaaacacgccgccgaagcgggcatcaccggttcggacgacagccaacat

SEQ ID NO: 29370 - DNA, 165 bp, Neisseria meningitidis; identical to SEQ ID NO: 28908

SEQ ID NO: 29371 - DNA, 1782 bp, Neisseria meningitidis
atgaacaaaatataccgcatcatttggaatagtgccctcaatgcctgggtcgccgtatccgagctcacacgcaaccacaccaaacgcgcctccgcaaccgtggcgaccgccgtattggcgacactgttgtttgcaacggttcaggcgagtactaccgatgacgacgatttatatttagaacccgtacaacgcactgctgtcgtgttgagcttccgttccgataaagaaggcacgggagaaaaagaagttacagaagattcaaattggggagtatatttcgacaagaaaggagtactaacagccggaacaatcaccctcaaagccggcgacaacctgaaaatcaaacaaaacaccaatgaaaacaccaatgccagtagcttcacctactcgctgaaaaaagacctcacagatctgaccagtgttggaactgaaaaattatcgtttagcgcaaacagcaataaagtcaacatcacaagcgacaccaaaggcttgaatttcgcgaaaaaaacggctgagaccaacggcgacaccacggttcatctgaacggtatcggttcgactttgaccgatacgctgctgaataccggagcgaccacaaacgtaaccaacgacaacgttaccgatgacgagaaaaaacgtgcggcaagcgttaaagacgtattaaacgcaggctggaacattaaaggcgttaaacccggtacaacagcttccgataacgttgatttcgtccgcacttacgacacagtcgagttcttgagcgcagatacgaaaacaacgactgttaatgtggaaagcaaagacaacggcaagagaaccgaagttaaaatcggtgcgaagacttctgttatcaaagaaaaagacggtaagttggttactggtaaagacaaaggcgagaatgattcttctacagacaaaggcgaaggcttagtgactgcaaaagaagtgattgatgcagtaaacaaggctggttggagaatgaaaacaacaaccgctaatggtcaaacaggtcaagctgacaagtttgaaaccgttacatcaggcacaaatgtaacctttgctagtggtaaaggtacaactgcgactgtaagtaaagatgatcaaggcaacatcactgttatgtatgatgtaaatgtcggcgatgccctaaacgtcaatcagctgcaaaacagcggttggaatttggattccaaagcggttgcaggttcttcgggcaaagtcatcagcggcaatgtttcgccgagcaagggaaagatggatgaaaccgtcaacattaatgccggcaacaacatcgagattacccgcaacggcaaaaatatcgacatcgccacttcgatgaccccgcaattttccagcgtttcgctcggcgcgggggcggatgcgcccactttaagcgtggatgacgagggcgcgttgaatgtcggcagcaaggatgccaacaaacccgtccgcattaccaatgtcgccccgggcgttaaagagggggatgttacaaacgtcgcacaacttaaaggcgtggcgcaaaacttgaacaaccacatcgacaatgtggacggcaacgcgcgtgcgggcatcgcccaagcgattgcaaccgcaggtctggttcaggcgtatctgcccggcaagagtatgatggcgatcggcggcggcacttatcgcggcgaagccggttatgccatcggctactcaagcatttccgacggcggaaattggattatcaaaggcacggcttccggcaattcgcgcggccatttcggtgcttccgcatctgtcggttatcagtgg

SEQ ID NO: 29372 - DNA, 588 bp, Neisseria meningitidis
ttgagcggcatcaacatcaacctcaaaaacggcgattccctgctgatacgcggcccgagcggttgcggcaaaacctcgctgttgcgcgcgccggcggggctttggccgttcggcagcagcggcaaagtcagccgtccgccgcatcaagacatcctcttcctgccgcaacgcccgtacacggcacagggcagcctgcgcgacgcggtttgttaccccgatatcgacaaacagcatcccgagttagccgaagccatgaacacctgccgcttgggttatctgattgacaaattggacaaaacagacgactggcagcacaaactctcccctggcgaactgcaacgcgtcgccttcgtccgcgccctgctctcgcagcccaaagttatcctgctcgacgaagccaccgccgccttggacgaaccggccgaagccgcgctctaccgcgccttaaagcaaaaactgcccgacagcatcatcatcagcatcggacaccgaagcacgctcaacgcgttccacaatatgcgcctcgatgtcggcaacgttgctgcggttgaacgatgccgtctgaagccgttttcagacggcatcgtt

SEQ ID NO: 29373 - DNA, 3615 bp, Neisseria meningitidis
atgatgtggtgtgcatcaaaccgcgtgggcaacaagttgcccaccctacgcttgctagaccgaatggcaggtatttatatcacaggcaaagaaaaaggtgttttagcagcgcaggcaggaaaagacatcaacatcattgccggtcaaatcagcaatcaatcagagcaagggcaaacccggctgcaagcagggcgcgacattaacctagatacggtacaaaccagcaaacatcaagcaacccattttgatgccgataaccatgttattcgcggttcaacgaacgaagtcggcagcagcattcaaacaaaaggcgatgttaccctattgtcagggaataacctcaatgccaaagctgccgaagtcagcagcgcaaacggtacactcgctgtgtctgccaaaaatgacatcaacatcagtgcaggcatcaacacgacccatgttgatgatgcgtccaaacacacaggcagaagcggtggtggcaataaattgattattaccgacaaagcccagagccataacgaaactgctcaaagcagcacctttgaaggcaagcaagttgtattgcaggcaggaaacgatgccaatatccttggcagcaatgttatttccgataatggcacccggattcaagcaggcaatcatgttcgcattggtacaacccaaactcaaagccaaagcgaaacctatcatcaaacccagaaatcaggattgatgagtgcaggtatcggcttcactattggcagcaagacaaacacacaagaaaaccaatcccaaagcaacgaacatacaggcagtaccgtaggcagcttgaaaggcgataccaccattgttgcaggcaaacactacgaacaaatcggcagtaccgtttccagcccagaaggcaacaatatcatccatgcccaaagcatagacattcaagcggcacacaacaaattaaacagtaataccacccaaacctatgaacaaaaaggcttaacggtggcattcagttcgcccgttaccgatttggcacaacaagcgattgccgtcgcacaaagcagcaaacaagtcggacaaagcaaaaatggtcgtgtcaatgccatggcagctgccaatgcaggctggcaagcctatcaaacaggtaagagtgcacaaaacttagccaatggtacaaccaatgccaaacaagtcagcatctccataacctacggcgaacagcaaaaccgacaaaccacccaagttcaagcaagccaagcccaagcgagtcaaattcaagcaggcggtaaaaccacattaatcgccacaggcgcagcagaacaatccaatatcaacatcgcaggctcagatattgccggcaaagcaggcacaatcctgattgccgataacgacatcacactccaatcagccgagcaaagcaataccgaacgcagccaaaacaaatcgacaggttggaacgcaggtgctgccgtatcattcggacaaggaggctggtcattaggcgttaccgcaggcggcaatgtcggcaaaggctacggcaatggcgatagcgtaacccaccgccatagccatattggcgacaaaggcagccaaacccttatccaaagcggtggcgacactaccatcaaaggcgcgcaagtacgcggcaaaggcgtacaagtcaatgccaaaaacctaagtattcaaagcgtacaagatagcgaaacctatcaaagcaaacaacaaaacgccagtgcacaagtgaccgtcggttatggcttcagtgccagtggcgattacagccaaagcaaaatccgagccaatcatgcttcggtaaccgagcaaagcggtatttatgccggagaagacggctatcaaatcaaggtcggaaaccatacagacctcaaaggcggcatcatcaccagtacccaaagcgccggagataagggcaaaaaccgctttcagacggccaccctcacccatagcgacatcaaaaaccacagccaatacaaaggcgaaagttttggattgggcgcaagtgcgtccataagcggcaaaacactgggacagggcgcacaaaataagcctcaaaacaaacacctgacaagcgtggccgataaaaacggcgcaagttcatcagtaggctacggcagcgacagcgacagccaaagcagcatcacaaaaagcggcatcaatacccaaaacattcaaatcaccgacgaagccgcacaaatcaggctgacaggcaaaacagcggcacaaaccaaagccgatattggtacaaacgtaaccacagacaccgccgaacgacattcgggcagcttgaagaacaccttcaacagagaagcggtgcaaaacgagctggatttgcaaagggaagtaacccaagagtttgataaaactagacaaggagtgaaacaagaactttatgcagtagtagatagcaaacgagcgcaagccacacaagagagactcaaaaatggtggatatgacaatgataaatctagagcattaaataaggaagctaatgaattagatgaaaaaattcgttggcttgatgcaggattaggactcgtttggggcgcagggagttctgatatggcttggagtatgtttgccacaacccaagccgatagagcggtaaggtctgcaactgcacctaaagaaatgtggttccataagaagataatagatgaaaaaacaggtaaagtatcctttgataccagacaaatttggtcattgaatgatttaagcaaggaagaactggcaagcattcaagacacaaatggcaaagttattactgtgtctaatcctggtattttcaataatcgagaagattcattaagcaacgcagcaaaacaaaatcgtaatagtacaaacggtagtggtgttattgcagttatgaatcctccaacagggaaatataaatctgattctaataacaaaataaaagattttttatggctcagttcaagtcttgtttctgaactgatgtatgtcggttacgaccaattaaataataaagtgttccaaggctatttacccaaaaccaattcagaaaaactgaatcaagatatttatcgagaggttcaaaaaatgggtaatggctggtcggttgataccagtaaccacagtcgtgggggaattacagcaagcgtttccttaaaagattgggtaaacaatcaaaaacaaaatggcattgccccaatcagaaaagcacgtttctatggtacagccacaaatgtgcagaatgattacgccgatgttttacagaaaaacggctatacctatacgggtgcagacggtaaaacttataacagcggagcctattcgattgtgcatgacaaggattttgtggggaacaaatggatacctttcttattaggaaccaatgacaccacacaaggtacatgtaaggggttttgttattcgcacagttcatattttgcggaagtgcctgaacagtataagcgagacaaaaatggaaattttgttactgataatgaagggaataaaattgaaacgaaagactgggacagttacacaaaaatatggggaattcctaaaaaaggtactgatggaaaagacataaatcacgctattcccaaattagtcaatccaaacaagccaaatggagaaaagtatgaagaaaatcctttc

SEQ ID NO: 29374 - DNA, 1646 bp, Neisseria meningitidis
atgaaacaatccgcccgaataaaaaatatggatcagacattaaaaaatacattgggcatttgcgcgcttttagccttttgttttggcgcggccatcgcatcaggttatcacttggaatatgaatacggctaccgttattctgccgtgggtgctttggcttcggttgtatttttattattattggcacgcggtttcccgcgcgtttcttcagttgttttactgatttacgtcggcacaaccgccctatatttgccggtcggctggctgtatggtgcgccgtcttatcagatagtcggttcgatattggaaagcaatcctgccgaggcgcgtgaatttgtcggcaatcttcccgggtcgctttattttgtgcaggcattatttttcatttttggcttgacagtttggagatattgtgtatcggggggggtatttgctgacgtaaaaaactataaacgccgcagcaaaatatggctgactatattattgactttgattttgtcctgcgcggtgatggataaaatcgccagcgataaagatttgcgagaacctgatgccggcctgttgttgaatattttcgacctgtattacgatttggcttccgcgccggcacaatatgtcgccaagcgcgcccacattttggaagcagcaaaaaaagcgtcaacatggcatatccgtcatgttgcgcccaagtataaaaattatgttgtggttatcggtgagagcgcgcgttcggattatatgaatgtttacggtttcccattgcccgatacgccttttttgagtcagaccaaagggctgttgataaacggttaccaatcgaccgcccacgcgacgaatctttcgctgccgcagactttggggctgccgggagaaccgaacaataacatcgtcagcttggcgaacaggcgggttttcggacggcgtggctgtctaatcaaggaatgttggggcattttgccaacgaaatttccacctatgccctacgcagcgattatccgtggtttacccaaaggggtgattatggcaaaagcgcggggttgagcgaccgccttttgttgccggcgttcaaacgggttttgataggaaatgcaggcacgaagcctcggctgattgtgatgcacctgatgggttcgcacagtgatttttgcacacgtttggataaggatgcgcggcggtttcagtatcaaactgaaaaaatatcctgctatgtttccaccatcgcgcaaaccgataaatttttagaagatacagttaagatattgaatgaaaataaagaaagctggtctttggtttacttttccgaccacggtttgatgcatgtcggtaaaggcggcgagcgaacgttgacacatggtgcgtggaagcgtcaaagctacggcgtgccgctggttaaaatttcgtccgatgacacgcggcgcgaaatgattaaagtgaggcgcagcgcgtttaattttttacgcggattcggcagttggacgggtatcgaaaccgacgagttgcccgatgacggctatgatttttgggggaatgttcccgatgtgcagggcgaaggcaataaccttgcctttatcgacggactgcccgacgaccccgcgccgtggtatgcgggaaaaggcaaatcgactaaaaatacgtctaaaaaatga

SEQ ID NO: 29375 - DNA, 1167 bp, Neisseria meningitidis
ttgcctttactaagtgtggcagtaactcagcagttgtacgctcaacccaatgagtcattaccaacggttgaattagagcctgtggttattaccattgataagagcggtatggcacttgccaatcgtatcacgcaaatgccccataccaccaaagttatttatgaagagcaaattcaagagcaagcaacaggctctcgacagcttgccgatgtgatggcacagctcattccaagtttgggggtaagtagtggcactaccagtaactttgggcaaaccatgcacggtcgtcaagtgcaatttttgttaaatggcgtgcctttgacaggttcgcgagacatctctagacagcttaatagtatcaatcccaatcaagtggctagaattgaagttttatcaggagcaaccagtatttatgggtctggagcaacaggcggtttgattaatatcgttactaagtctgatttggaagaggagcaatttgaaacccgcatcggtgtacatggtagtaaattatccagtgaaggtatcggttatcaggtaggtcagagtgtagcaggtgtcagcgaaaatggtaatgtccttgcacgacttgatgtcgactatcgcaccacaggaggggcatttgatgctaacggtaaacgcatcgctcctgagcctgcccaaactgataagcaagacagcaaaagcctaagtgtcaatacaaatgttgattggcaacttgacgacaagcaaaatatcaatctggcattgacgcattataacgacaaacaagataccgattatgcacctgattatggtaatcgccttgcggtgttgtttggagaaaagccttcattaaatgccatcaaaggcttatcattatcagaacagccaaaaaccaccaaaagcacctttaatatcaactatcatcatgatgatttgtggggtaacaccatcaataccaatgcttattatcgcagagagaaaggcagattttatccctttgttgccccgttttcgatcgccaaagccctgcctattttacaaagcatgaatttgccatcagccactttggatgcttataccaaggctccacaagctcgcgcctatggggtgttacaatccgaatctaaggcagaggtactagggcgtgtccctaatttgaataagcccaaaagagccctattt

SEQ ID NO: 29376 - DNA, 1216 bp, Neisseria meningitidis
agcaaagcgaaaaaattgattgagatgattcagacggcaccggtggagtggaagccgttgggggaggttggtctattggttcgtggcaacggtttgcagaaaaaagattttaccgagagcggcgtaccggcgattcattacggacaaatttacacctattatggcaatcagacggataagactctttctttcgtttcaccggaattggcggaaaaactgaagaaagtagataaaggtgatgtggtaattaccaacactagtgaaaatatagaagacgtaggaaaagcccttttatatttgggagaagagcaagctgttacaggcggacacgcaactatttttaaaccaagcaaagaaattgtcggcaaattctttgtctatttcactcaaacagaaatttttgataaggcaaaaagaaaatttgcaaaaggaacaaaggttattgatgtttccgcaaccgatatggcaaaaatcaaaattcccatcccatccctagaaactcagcaaaaaattgtaaaaatacttgacaaattcaccgagctggaagatacgcaggaagctgaactagccctgcgcaaacgccaataccggtattaccgcgactttcttttagattttgacaatcaaatcgggggggatagctgatggctatcaatgccgtctgaaagatgtggtttggaagacgttgggggaggtatttaatatttttgctggaggcgacgtaccaaaagacgctttctctgaagtggaaacggaagaattttgtatccccattttatctaaaggtataggaagtaaggcactgtatggctggactaatgttgctaaaatcaatcaacctagcttaactatatcagctagaggaacgataggctgggctagttttcagaataaaccttttttcccaatagtacgcctgttagtgttaacaccaaaaattgaattaaacctaaaatatgcctactactttatgaaaagtattgaatcaaattataaagttcctgaaagtggtattccacagctaacgaaaccaatgataaaagatatttcaatccccatcccaccactccccgaacaagaaaaaatcgtcgccatcctcgacaaattcgataccctgacccactccatcagcgaaggcctgccgcacgaaatagccctgcgccggaaacaatacgaatattaccgcgaacagctgcttgcctttcggtagggtggg

SEQ ID NO: 29377 - DNA, 2163 bp, Neisseria meningitidis
atgaataccccattattccgcctcagcctgctctcgcttaccctggcggcaggttttgcccatgcggcagaaaataatgccaatgtcgcattggataccgttaccgtaaaaggcgaccgccaaggcagcaaaatccgtaccaacatcgttacgcttcaacaaaaagacgaaagcaccgcaaccgatatgcgcgaactcttaaaagaagagccgtccatcgatttcggcggcggcaacggcacgtcccaattcctgacgctgcgcggtatgggtcagaactctgtcgacatcaaggtggacaacgcctattccgacagccaaatcctttaccaccaaggcagatttattgtcgatcccgctttggttaaagtcgtttccgtacaaaaaggcgcgggttccgcctctgccggtatcggcgcgaccaacggcgcgattatcgccaaaaccgtcgatgcccaagacctgctcaaaggcttggataaaaactggggcgtgcgcctcaacagcggctttgccagcaacgaaggcgtaagctacggcgccagcgtattcggaaaagagggcaacttcgacggtttgttctcttacaaccgcaacgatgaaaaagattacgaagccggcaaaggtttccgcaatgtcaacggcggcaaaaccgtaccgtacagcgcgctggacaaacgcagctacctcgccaaaatcggaacaactttcggcgacgacgaccaccgcatcgtgttgagccacatgaaagaccaacaccggggcatccgcactgtgcgtgaagaatttaccgtcggcagcgaagattcacggataaatattaaacgccaagcccctgcttaccgcgaaaccacacaatccaacaccaatttggcgtacacgggtaaaaacctgggctttgtcgaaaaactggatgccaacgcctatgtgttggaaaaagaacgctattccgccgatgacagcggcaccggctacgcaggcaatgtaaaaggccccaaccatacccgaatcaccactcggggtatgaatttcaacttcgacagccgccttgccgaacaaaccctgctgaaatacggtatcaactaccgccatcaggaaatcaaaccgcaagcgtttttgaactcgaaatttgagatctccgataagaaaaaaggagccgacggaaaagaagtcgacgtagatgatgcacaaaaagaaaaaaatcgtgccaatgaaaaaattgttcacgcctacaaactgtctaacccgaccaaaaccgataccggcgcgtatatcgaagccattcacgagattgacggctttaccctgaccggcgggctgcgttacgaccgcttcaaggtgaaaacccatgacggcaaaaccgtttcaagcagcaaccttaacccgagtttcggtgtgatttggcagccgcacgaacactggagcttcagcgcgagccacaactacgccagccgcagcccgcgcctgtatgacgcgctgcaaacccacggtaaacgcggcatcatctcgattgccgacggcacgaaagccgaacgcgcgcgcaataccgaaatcggcttcaactacaacgacggcacgtttgccgccaacggcagctacttctggcaaaccatcaaagacgcgcttgccaatccgcaaaaccgccacgactctgtcgccgtccgtgaagccgtcaacgccggttacatcaaaaaccacggttacgaattgggcgcgtcctaccgcaccggcggcctgactgccaaagtcggcgtaagccacagcaaaccgcgcttttacgatacgcacaaagacaagctgttgagcgcgaatcctgaatttggcgcacaagtcggccgcacttggacggcctcccttgcctaccgcttccaaaatccgaatctggaaatcggctggcgcggacgctatgttcaaaaagccgtgggttcgatattggtggcaggtcaaaaagaccgcagcggcaaattggaaaacgttgtacgccaaggtttcggtgtgaacgatgtcttcgccaactggaaaccgctgggcaaagacacgctcaatgttaatctttcggttaacaacgtgttcaacacgttctactatccgcacagccaacgctggaccaataccctgccgggcgtgggccgcgatgtacgcttgggcgtgaactacaagttc

SEQ ID NO: 29378 - DNA, 1485 bp, Neisseria meningitidis
atgctaaagaaaataaaaaaagctctttttcagcctaaaaagttttttcaagattcaatgtggttgacaacatctccattttatcttacccccccacgtaacaatttatttgtcatatctaatttaggtcagcttaaccaagtccaaagcctaattaaaatacaaaaattaaccaataatttactagtaattttatatacttctaaaaacttaaaaatgcctaagttagttcatcaatcagctaacaagaatctatttgaatctatttatctatttgagcttcctagaagccctaataatataactcctaaaaaattactttatatttatagaagttacaaaaaaatccttaatattatacagcctgctcatctctatatgctgtcttttacaggccactactcctatctgattagtattgcaaaaaaaaagaatattacgactcatttaattgatgaagggactggaacatatgctcctttattagaatcattttcatatcatccaacaaaattagaacgttatttgattggaaataatcttaatattaaaggatatatagatcattttgacatattgcatgtcccctttcctgaatatgctaaaaaaatatttaatgcaaaaaaatataaccggttttttgcgcatgctggaggaataagcattaataataacattgcaaacttacagaaaaaatatcaaatatctaaaaatgactatatttttgttagtcaacgctaccccatttcagatgatttgtattataagagtatagtagaaatcttaaacagcataagtttacaaattaaaggaaagatatttattaaactacacccaaaagagatgggcaacaactatgtaatgtctttatttctaaatatggtagaaataaaccctcggctggtagttattaatgaacctccttttctaattgagcccctaatatacttaacaaatcctaaaggaattataggcctggcctctagttctttaatttatacaccattactctcaccctcaacccaatgtctttctattggagagttaattattaacttaattcaaaaatattcaatggtggaaaacactgaaatgatccaagaacacttagagattattaagaaatttaattttattaatatactaaatgatttaaatggggtaataagtaaccctctctttaaaacagaagaaacatttgaaacacttcttaaatctgcagaattcgcatataaatctaaaaactactttcaggctattttttactggcaacttgccagcaaaaacaatattaccttattagggcataaagcattatggtactacaatgcactttataatgtaaaacaaatttataagatggaatattcagatattttttatatcgataatatctccgtagactttcatagtaaagataaattgacatgggaaaaaattaaacattattactattccgccgacaatagaattggtagagataga

SEQ ID NO: 29379 - DNA, 669 bp, Neisseria meningitidis
atgcaaatactcaaagcgttcaaatttgaattgatgccaaacggcgcacaaatccgcagacttaagcagttttgcggttgttcccgttttgtattcaatcgcgctttggcgtatcaaaatgaacagtacgaagcagataaatcattcaaattcagttacaacaaaatcgcgaatttgttgcctgaatggaaacgtgaattaacttggctaaaagactgccacagccaagttttgcagcaatcgctcgaagatttagaaagctcattcaaaaacttcttcgccaaacgttcggactttccaaaattcaaacgcaagggcgaaaaagacagtttcagatttccgcaaggctttaaactggaacaacaaaataaccgcatctatctgcccaaaatcggttggatacgttatcgcaacagccgtgccattgtcggcgaaatgaagaacgtaaccgtcagccgaaaatgcggtaagtggtatatctccgttcaaacagaatttgaacaaaaaacaccgcaacccaaaggcggagaaatcggtatcgatataggtattgttcgttttgcgacactttcaagcagcgaatattttgagccgattaacgcattcaagaacctgaaaggcaaactggcaaaactacaacgccgacttaaaaacaaggttaaatttagc

SEQ ID NO: 29380 - DNA, 8397 bp, Neisseria meningitidis
atgaaccgcaccctgtacaaagttgtatttaacaaacatcgaaactgcatgatagccgttgctgaaaatgccaaacgcgagggcaaaaacacagccgacacccaagctgtaggtattttgccaaatgatattgcgggctttgcgggttttatccattctatctctgttatctcattctccctttcattactgctcggttctgcccttatcctgacttcttcttctgctaatgcccaaggtatcgttgccgacaaatccgcacctgcacagcaacagcctaccatcctgcaaacaggtaacggcataccgcaagtcaatattcaaacccctacttcggcaggggtttctgttaatcaatatacacagtttgatgtgggtaatcgcggggcgattttaaacaacagccgcagcaacacccaaacacagctaggcggttggattcaaggcaatctttggttggcaaggggcgaagcacgtgtggttgtaaaccaaatcaacagcagccattcttcacaaatgaatggctatattgaagtgggcggacgacgtgcagaagtcgttattgccaatccggcagggattgcagtcaatggtggtggttttatcaatgcttcccgtgctactttgacgacaggccaaccgcaatatcaagcaggcgcattaacaggctttcaggttcgttcgggtcatgttgcgatcacgggacaaggtttggatgcccgtgataccgatttcacgcagatattgagccatgcggttaagattgatgggcctgtgtggggtaaagatgtgcgtgtgtcggcagggaaaaataatgtctcagctgatggctctatccggtcttcacactcccctgctacgaatataaattccgacaactcactgtatgccatcgatacaggggcattgggcggtatgtatgccggtaagatcaccctgatcagcactgatcgtgatgcatccgtgcgcaatcaggggcaatggtttgcctcagccggcaatgtggcagtgaatgctgagggtaaactggtcaacacaggcatgattgcagcgacgggagaaaatcatgcggtttcacttcatgcccgcaatgttcataatagcggtacggttgcctcacaggatgatgccaatattcacagccagacgctggacaattcaggtacggtcttatcctcaggtcaattgactgtccgtaatttaggccgtctgaaaaaccataacaacggtacgatccaggctgcccgcttagatatgtcaacaggtggtttggataacacaggtaatattactcaaacaggttcacaagcattggatttggtatctgccggcaaattcgataacagtggcaagattggtgtgagcgacgttccacagaccggtttgaatcccaatccatcagtcataccacagattccgagtactgcaacaggttcaggcagcagcactgtctcggcatctaagcctggttcaaacaatcccgtttcacctacagcacctgcaaaaaaccacgccggaggacgcattcaaacaacaggagcatttgacaatgcaggatcaatcaatgcgggtgggcaaattgacattgccgcccaaaacggtttggaaaattcgggtagtctgaatgcggctaaactacgagtatcaggcgattcatttaacaatacggtaaaaggcaaactccaggcacacgatctggctgttaacactcaaactgctaaaaacagcggtcacttattaactcaaaccggcaagattgacaaccgtgaactgcataatgccggagaaattgccgccaacaatctgacactcattcattcgggccgcttgagcaatgataaaaaaggcaatattcgagctgcatatttacagcttgataccgccggtttacataatgcaggtaacattcttgccgatagtggaaccgttaccaccaagaataatcttcgcaatacaggaaaagtttctgttgcacgactgaataccgaaggtcagactctagataatacgcacggacatatagaggctgaaacggttaacatccaaagtcagcaactgactaaccaaagcggccatattactgctaccgaacaactgactatcaatagtcgaaatgtagacaaccaaaacggcaaactcctatctgcaaaccaagcacaattagctgtttcagacggcctatacaaccaacatggtgaaattgccaccaaccggcagttgtctattcacgataaaaatcaaaacactttggcgttaaacaatgcggatggcacgattcaatctgccggtaatgtatcgctacaagccaaatcactcgccaacaatggcacattaacagccggtaacaaactggatattgctttggcggacgatttcgtcgtagagcgcgacctcactgcaggcaaacaattaaatctaagcataaaaggccgtctgaaaaatacccataccctacaagcaggccatacgctcaaactcaatgccggcaatatagataaccaagttacaggtaaaattattggcggagaacaaacggacatcacatccgaacagcatgttgacaacaggggcttgatcaacagcgacggtttgacccacatcggtgcaggtcaaaccctgaccaacaccgggacaggcaaaatctatggcaaccatattgccctggacgcgcaaatactgcttaaccgggaagaaacgacggaaggcagtaccaaagcgggggcaatagctgcaaggaaacatttggatattggagcgaaagagattcataaccaagaaggtgccctactatccagcgaaggtatttttgccgtaggtaatcgactggatgaacaacatcatgcggcaggcatggctgatacctttgttaatggcagtgccggtttggaagtacaaggtgatgcattgatgtccgttcggaatatgcagaatatcaataatcactttaaaacagagacatacttagccaaagcagaaaagcaagttcgtgactacaccgtactggggcaaaatacctactatcaggcaggaaaagacggtttattcgacaactcgcaaggacaaaaagaccaaactactgctacgttccatttaaaaaatggttctcgtattgaggccaaccaatggcatgtccgagactaccacatcgagacttataaagaacgcatcatcgaaaaccggccggcacacattactgtgggcggtaatttgactgcctcaggtcaaaattggctgaacaaagacagccggattgtagtaggcgggcgtattatcactgatgatttaaaccagaaagaaattaccaatcaaagtacaacaggcaaaggtcgcacagatgctgtcggcacacagtgggattcagttacaaaaaaaggatggtacagcggtagaaaaagacaacgccgtactgaaaaaaaccacacttcttaccatgatacccaactatttacccatgacttcgacacgcctgtatccgtcatccaacagaatgccgcctccccttcctttcaacccgccgcatctgcagccaaactgattgacggagcatccacagcagccgtcaatgggcagcgcatccataccggtaatgtggtctcattaaataacgctactgttactctgcccaacagcagcctctacaccacccatcctgacaataaaggctggttgattgaaaccgatccccaatttgcagactaccgccgctggttgggcagcgactacatgttgcaacaactgaaattggacaccaatcatctacacaaacggctaggcgacggctactatgaacaaaaacttgttaatgaacaaatccaccagttaacaggctaccgccgactcgacggctacaaaagtgatgaagaacaattcaaagctctgatggacaacggccttactgctgccaaaacattcggtctcaccccaggtatcgccttgagtgcagagcaagttgcccgcttaacttcagatatcgtttggatggaaaatcaaaccgtcaccctgtctgacggttcgactcaaaccgtactggttcctaaagtctatgccctggcgcgcaaaggtgatctcaatacctccggtggcctgattagtgccgaacaagtcttacttaaactgcaaaacggcaacctgactaacagcggtaccattgcggggcgacaggccgtactcatccaggcacggaatattaacagcaacggtaacattcaagccgaccaaatcggcttaaaagctgaaaaaagtatcaatatcgacggcgggcaggtacaagcaggcagactgctgactgcccaagcgcaaaatatcaaccttaacggtacaacccaaacttccggtaatgaacgtaacggcaataccgccatcgatcgtatggccggcattaacgtggtcggaagccatactgagcaagtagataacagaacttcagacggcatcctatccctgcatgccggcaacgatatcaacctcaatgcggccaccgtctctaaccaagttaaaggcggcactacccaaattaccgccggcaataatctcaacctcggcaccattcataccgaacatcgcgaagcctatggtacattagatgacgagaaccatcgccatgtccgccaaagtaccgaagtcggcagcagtatccgcacgcaaaacggcgcaatgcttagagccggcaacgacttaaaaatccgtcaaggtgaactggaggccgacgagggtaaaaccgtccttgccgcgggacgtgatgtcaatattagcgaaggacgccaaataaccgaattggacgcctctgtaagcgggaaaagcaaaggcatcctttccagtaccaaaacacacgacccgtaccgcttcagtcatgatgaagcagtcggcagcaacatcggcggcggcaaaatgattgttgcagccgggcaggatatcaatgtacgcggcagcaaccttatttctgataagggcactgtcttaaaagcaggaaacgacatcgatatttctactgcccataatcgctacaccggcaatgaataccacgagagcaaaaaatcaggcgtcatgggcacaggcggattgggctttactatcggtaaccgaaaaactaccgatgacactgatcgtaccaatattgtccatacaggcagcattataggcagcctgaatggagacaccgttacagttgccggaaaccgctaccgacaaaccggcagtaccgtctccagccccgaggggcgcaatactgtcactgccaaaagcatagatgtagagtccgcaaacaaccggtatgccactgactacgtccatacccgggaacaaaaaggcctcaccgtcgccctcaatgtcccggttgtccaagctgcacaaaacttcgtacaagcagcccaaaatgtgggcaaaagtaaaaataaacgcgttaatgccatggctgcagccaatgctgcatggcagggttatcaagcagcccaacaaatgcaacaatttgctccaagcagcagtgcgggacaaggtcaaaacaacaatcaaagctccggtatcagtgtgtccgttacctacggcgaacagaaaagccgtaacgagcaaaaaagccgttacaccgaagcggcagcaagtcaaattatcggcaaagggcaaaccacacttgcggcaacaggaagtggggagcagtccaatatcaatattacaggttccgatgtcatcggccatgcaggtactgccctcattgccgacaaccatatcagactccaatctgccaaacaggacggcagcgagcaaagcaaaaacaaaagcagtggttggaatgcaggcgtagccgtcaaaataggcaacggcatcaggtttggaattaccgccggaggaaatatcggtaaaggtaaagagcaagggggaaatactacccaccgccacacccatgtcggcagcacagccggacaaaccaccatccgaagcggcggggataccaccctcaaaggtgcgcagctcatcggcaaaggcatacaggcagatacgcgcaacctgcatatagaaagtgttcaagatactgaaacctatcagagcaaacagcaaaacggcaatgtccaagttactgtcggttacggattcagtgcaagcggcagttaccgccaaagcaaagtcaaagcagaccatgcctccgtaaccgggcaaagcggtatttatgccggagaagacggctatcaaatcaaagtcagagacaacacagacctcaagggcggtatcatcacgtctagccaaagcgcagaagataagggcaaaaacctttttcagacggccaccctcacccatagcgacattcaaaaccacagccgctacgaaggcaaaagcttcggcataggcggcagtttcgacctgaacggcggctgggacggcacggttaccgacaaacaaggcaggcctaccgacaggataagcccggcagccggctacggcagcgacggagacagcaaaaacagcaccacccgcagcggcatcaacacccgcaacatacacatcaccgacgaagcgggacaacttgcccgaacaggcaggactgcaaaagaaaccgaagcgcgtatctacaccggcatcgacaccgaaactgcggatcaacacacaggccgtctgaaaaacagcttcgacaaagacgcggtcgccaaagagatcaacctgcaaagggaagtaacgaaggagttcggcagaaacgccgcccaagccgtagcggccgttgccgacaaactcggcaatacccaaagttacgaacggtatcaggaagcccgaaccctgctggaggacgaactgcaaaacacggacagcgaagccgaaaaagccgccatccgcgcatccctcggccaagtaaacgcctatcttgccgaaaaccaaagccgctacgacacctggaaagaaggcggcataggcaggagtatcctgcacggggcggcaggcggactgacgaccggcagcctcggcggcatactggccggcggcggcacttcccttgccgcaccgtatttggacaaagcggcggaaaacctcggtacggcgggcaaagcggcggtcaacgcactgggcggggcggcaatcggctatgcaactggtggtagtggtggtgctgtggtgggtgcgaatgtagattggcataatcggcagttgcatccgagtgaaagagattggataagaaaaaatgcacaagcttttgcgaaacaggaggtaggtggtagagaacccactatagatgaaattgcattagcagaaaaacgactagcacaacaggcggctaaagagacagatttgttttggatgctaacattagaaaaagtaacagatttatcagctcaaaaattcctaagacaagcaaaaggaacttttacaaatgaaaatggtacgcagcaacaattttttactacgcaagggaagcaatttatgcgtcctgaattgtttgctaatgaagtatatgatctgtctttttacaaaaaccatttacaatctcctaaaaatagtagtatcagcaagggtacaggagaattggctcgaagagttacttcatctacttgggataaagcaaaacaagatcctattttgacaggattgcaaatagctgcctcccctgtacatttagttcgggatgtaggtaaggcaagctggcagtgcgtaagcggctttggacaatgtttgcaacaaggaaaagagaattttgtagaaacaggttctgcaattggaacaggaactgcctcttttcaactaaacgaccttaagccgatttatggtcaagatgtacgtggtgcacaagcaggattggttgcactacaaacggcagatggaataactacggcattgggtgcagcaaaagcattaaatgttgcaggaaaaggtagtcgctattttataaatgaatgggctagtagtccgcctagtggttctcgtgctgcacagcgtggggcagtggggaatttaacccattcgcaacaagttttgacagatggttcacatattcaacgtggcggaaaacttttacctaatattcgctataaagcaggcgagtttgattatttatatgaaactgatactttaggtagaattaaaagttttgaaacagataatttgcaattaacacagagagatagattaaagcataattcaaaaactcctgataaagtcaaggggcaagaccatgcaggacatttaattggagatagatttggaggttcgcccaatttagataatttagtgtcacagcacaaagatgtaaacttaagtgcgtataaagttttggagaataaatgggcggaagcaattaaatcaggaaaaaatgttaaaatccaaatgcaaattgaatatgcagcaggtacaagacgccctacacgatttgttggatattattggattgatggtaaaccaactagaattaatattaataattta

SEQ ID NO: 29381 - DNA, 624 bp, Neisseria meningitidis
aggagacagtgtggccatcgttacgccattcgtgcgggtcggaacttacccgacaaggaatttcgctaccttaggaccgttatagttacggccgccgtttactggggcttcgatccgatgctctcacatcttcaattaaccttccagcaccgggcaggcgtcacaccctatacgtccactttcgtgttagcagagtgctgtgtttttaataaacagtcgcagccacctattctctgcgaccctccagggcttacggagcaagtccttaaccttagagggcataccttctcccgaagttacggtatcaatttgccgagttccttctcctgagttctctcaagcgccttagaattctcatcctgcccacctgtgtcggtttgcggtacggttcgattcaaactgaagcttagtggcttttcctggaagcgtggtatcggttacttcgtgtccgtagacactcgtcgtcacttctcggtgttaagaagacccggatttgcctaagtcttccacctaccggcttaaacaagctattccaacagcttgccaacctaaccttctccgtccccacatcgcatttgaatcaagtacaggaatattaacctgtttcccatcgactacgcattt

SEQ ID NO: 29382 - DNA, 915 bp, Neisseria meningitidis
atggaaaaagcagaacatttgaacagcagccggttcgtcaatctagtcaaaagcggcggcggcagctatgtggagggcagctaccgtttcgatactttgtccaacggcatttccatccacggcggcacagtaacggcacggtgtgatttttgcagcagccgcctcgccgaaccttatgtgtcgttcgtgctcttgctggaaggcagtttggacttcggcatcaaccgctgccgcttccaaatcgatgcggacggcggcaagattgtcctaattgctgtcggggaagaagtcctgttcagccgctatctttaccgaggcggcaaaacggtcaaaatgaccattaaaggtatggaacaatggctgctgcgtccggaatacgcgcgtttcgcacccctgctttaccgcgaaccggtcaggatatgggatttgcccccgaacctgcgcggcttggcggcatcctgcctgaaagccgtcccaaaggggcatttgggcgaaacattgcgccgcgaggcggacgtgttgcggctgctgtcggacttgtgggacacggtttcagacggcatcgggccggcggcggggcaaacggcggaagcagacgctatgccgtctgaagacttcagccgcaccctaaatgccgcgtttgccgacggcgcacaccaagtcaaccggctgacagacgcgctgaacatcagtgaaaggacgctgcaacgccgtatgcgcgaccatttcggtattaccgcaagcgagtggctgcaccacaaacaaatgcagcacgcgctctacctgttgcaaaacgaggggaaaagcataggcgaaaccgcatatttatgcggctaccgccacgtttccagctttactcaggcattcaggcaatatttcggcagcacgcctgcggaaaccaaaaaagaaaaccgg

SEQ ID NO: 29383 - DNA, 1631 bp, Neisseria meningitidis
gcacgtttgagtacgtcgccttccgcttcttccagcaatttctgcactgtctcggcagcggcatcgcggtcgccgatttcgagatacatttcggcaaggtcgtatttcgcttcggaaggcgcgtcagaacctacagattccgaaggaaactggtatctgcattatttgggatattttcttccgagaggtagatgctccaatctaccgtttcctcctcgccgtctttcaggaagtcgggcaaagcgtctgcttcagaggtgttggaatcaggcgtttccaaagtgatttccgctgcattttcctcaacggccggtgcttcagcaggttgcaacagtgcggacaaatcatcggcaacggtttccgctgcattttcctcaacggcaggtacttcagaaggttgaagtaatgcggacaaatcgtctgcggtggcgttgaaatcaggtatttcggcaacggttttcgttacattttcctcaacggccggtgcttcagcaggttgcaacagtgcggacaaatcatcggcaacgatttccgctgcattttcctcaacggcaggtacttcagaaggttgaagtaatgcggacaaatcgtctgcggtggcgttgaaatcgggtgtttcggcaacggtttccgttacattttcctcaacggacggtgcttcggcaggttgaagcaatgcggacaaatcgtctgcggcggcgttgaaatcgggcgtttcaggcgcagtttccgcgacggcatcggtttcgtacactttcaggaaatcgtgcaactcttccggtgtttggacttcggcaactgttttttccaagatggtttcgggcgaggaagccttcaggaagcctgccagtccggagggtgaggcaggttttgcggaagctgtttcttctgtgccgatatggttgtttgagggcaggttgtcggagaaatcggtatcgacggtttccggtttgttttcggcagtttgggcgacagattccggttcgggcgtgtcgatgacgatttcgacagggttgtacgggttgaaggtctcgggctcgtacacgctgtctgtggattcgatggcgttccaatcggcatccgcgcgtttttgggtttcttcatcctgcgtaagtgcgccggataaaatgccgttttgcgcggctgccaggctgtcgaaatccaagtcgatgcggttggaaggcgtatcggtttcgacatcgaacgtttgttttgccgataactcttcttcagattccccatctaaggcaagtgtgtcgtttacatcgtttttcggagcgggttcgggcgttgccggagtttcgacttcggcaaaggtgatttctatgccgtcgtctgccgcgtcgtcaaggtcaggctcttcctcagggacggattcttcggtacggcgcgcgcgtttggattgggcaaggcgcaaaagcagcagcagggcgatcaatgccgcgcctccgccggcaagcagcaaggtgtacgaaccgccgaacagaccgtcaaacagtccgctttcggtttcttcttcggcagaaacctgttcgacaggttcggaaacggcgttaccggtttcgtcggtcggcgtgtcgatggcagaagcggcggcttcttggggggcggattcggcagcggtttccgat

SEQ ID NO: 29384 - DNA, 366 bp, Neisseria meningitidis
atgctttcagcgcttatctcttccgaacttagctacccggctatgccactggcgtgacaaccggtacaccagaggttcgtccactccggtcctctcgtactaggagcagcccccgtcaaacttccaacgcccactgcagatagggaccaaactgtctcacgacgttttaaacccagctcacgtaccactttaaatggcgaacagccatacccttgggaccgactacagccccaggatgtgatgagccgacatcgaggtgccaaactccgccgtcgatatgaactcttgggcggaatcagcctgttatccccggagtaccttttatccgttgagcgatggcccttccatacagaaccaccggatcac

SEQ ID NO: 29385 - DNA, 885 bp, Neisseria meningitidis
atgtgtatcgagatgaaatttatattttttgtactgtatgttttgcagtttctgccgtttgcgctgctgcacaaacttgccgacctgacgggtttgctcgcctaccttttggtcaaaccccgccgccgtatcggcgaaatcaatttggcaaaatgctttcccgagtgggacggaaaaaagcgcgaaaccgtattgaagcagcatttcaaacatatggcgaaactgatgcttgaatacggcttatattggtacgcgcctgccgggcgtttgaaatcgctggtgcgttaccgcaataagcattatttggacgacgcgctggcggcgggggaaaaagtcatcattctgtacccgcacttcaccgcgttcgagatggcggtgtacgcgcttaatcaggatgtaccgctgatcagtatgtattcccaccaaaaaaacaagatattggacgcacagattttgaaaggccgcaaccgctacgacaatgtcttccttatcgggcgcaccgaaggcgtgcgcgccctcgtcaaacagttccgcaaaagcagcgcgccgtttctgtatctgcccgatcaggatttcggacgcaacgattcggtttttgtggattttttcggtattcagacggcaacgattaccggcttgagccgcattgccgcgcttgcaaatgcaaaagtgatacccgccatccccgtccgcgaggcggacaatacggttacattgcatttctacccggcttgggaatcctttccgagtgaagatgcgcaggccgacgcgcagcgcatgaaccgttttatcgaggaaccgtgcgcgaacatcccgagcagtatttttggctgcacaagcgtttcaaaacccgtccggaaggcagccccgatttttactgatacg

SEQ ID NO: 29386 - DNA, 4473 bp, Neisseria meningitidis
atgaataaaactctctatcgtgtaattttcaaccgcaaacgtggggctgtggtagccgttgctgaaactaccaagcgcgaaggtaaaagctgtgccgatagtgattcaggcagcgctcatgtgaaatctgttccttttggtactactcatgcacctgtttgtcgttcaaatatcttttctttttctttattgggtttttctttatgtttggctgtaggtacggccaatattgcttttgctgatggcattattgctgataaagctgctcctaaaacccaacaagccacgattctgcaaacaggtaacggcataccgcaagtcaatattcaaacccctacttcggcaggggtttctgttaatcaatacgcccagtttgatgtgggtaatcgcggggcgattttaaacaacagccgcagcaacacccaaacacagctaggcggttggattcaaggtaatccttggttggcaaggggcgaagcacgtgtggttgtaaaccaaatcaacagcagccattcttcacaaatgaatggctatattgaagtgggcggacgacgtgcagaagtcgttattgccaatccggcagggattgcagtcaatggtggtggttttatcaatgcttcccgtgccactttgacgacaggccaaccgcaatatcaagcaggagaccttagcggctttaagataaggcaaggcaatgttgtaatcgccggacacggtttggatgcccgtgataccgatttcacgcaaatattgagccatgcggttaagattgatgggcctgtgtggggtaaagatgtgcgtgtcgtcgcgggacaaaacgatgtggtcgcaacaggtaatgcacattcgcctattctcaataatgctgctgccaatacgtcaaacaatacagccaacaacggcacacatatccctttatttgcgattgatacaggcaaattaggaggtatgtatgccaacaaaatcaccttgatcagtacggccgagcaagcaggcattcgtaatcaagggcagttgtttgcttcttccggcaatgtggcgattgatgcaaatggccgtttagtcaatagtggcacgatggctgccgccaatgcgaaagatacggataatacagcggaacacaaagtcaatatccgcagtcagggcgttgaaaacagcggtacggcggtatcgcaacaaggcactcaaattcacagtcagtcgattcaaaacactggcacattattgtcctcaggcgaaatattgattcacaattcgggcagcctgaaaaatgaaacatcaggcaccattgaagccgctcgtttggctattgataccgacacacttaataatcaaggcaaactctctcaaacaggttcacaaaaactccatattgatgcacaaggcaaaatggataaccgtggccgcatgggtttacaagataccgcaccaaccgcgtcaaatggttcaagcaatcaaaccggcaatagttacaatgcatctttccattcatccactaccacaccaacaacggcaacaggtacgggtactgcaaccgtttctatatcaaacataactgcgcctacctttgctgatgggacaattcgcactcatggtgcactggataattcaggcagtattattgccaatggtcaaacagatgttagtgcgcaacaaggtttaaataatgcaggacaaatagacattcatcagttaaatgcaaaaggttcggcgtttgacaatcacaatggaacaattatcagtgatgcggtccacattcaagccggcagcctgaataatcaaaatggcaacatcacaacacgccaacagttagagattgaaaccgatcaactggataacgctcatggcaagttattatcagcagaaatagcggatttagccgtttcaggcagcctgaacaatcaaaatggcgaaatagcgaccaatcaacaactgattattcacgatggtcagcaatctaccgctgtcattgataatacgaatggcacgatacaatcaggccgtgatgttgctattcaggcaaaatcgttatccaacaacggcacacttgccgctgataataaactggatattgcgttacaagatgatttttatgtagaacgcaatatcgtggcgggcaatgaattgtcgctcagtacacgaggcagcctgaaaaattcacatactttgcaagcaggaaaacgcattcggattaaagcaaataaccttgataatgcagcacaaggcaacattcaatccggcggtgcaacagacattggcacgcagcacaatttaaccaatagaggcttgattgacggacaacaaaccaaaatccaagccgggcaaatgaataatatcggtacaggtcggatttatggcgacaatatcgctattgcggctacccgcttagacaatcaagatgaaaacggtacaggtgccgccattgcggcacgtgaaaacctgaatttaggcatcggacaattaaacaaccgtgaaaacagtctgatttacagcggtaacgatatggcggttggcggcgcattagataccaatggccaagccacaggcaaagcccaaaggatacacaatgccggcgcaaccattgaagccgccggcaaaatgcgtttaggcgtagaaaagctgcacaataccaatgagcatttgaaaacgcagttggtagaaacagggcgcgagcatattgttgattacgaagcatttggacgacacgaattattgcgggaaggcacacaacatgaattaggctggtctgtctataacgatgaatcagaccacttacgcacccctgatggagcggcgcatgaaaattggcataaatacgattatgaaaaagtcacccaaaaaacccaagttacccaaactgcgccagccaaaatcatttcaggtaatgatttaaccattgatggtaaagaagtatttaataccgatagccaaatcatcgccggcggcaatttgcttgtgcaaacagaaaaagacggtttgcataacgagcaaacctttggcgaaaagaaagtattcagtgaaaatggcaaattacacagctattggcgtgagaaacataaaggacgagactcaacgggacatagcgaacaaaattacactttgccggaggaaatcacacgcaacatttcactgggttcatttgcctatgaatcgcatcgcaaagcattaagccatcatgcgcccagccaaggcactgagttgccgcaaagcaacggtatttcgctaccctatacgtccaattcttttaccccattacccagcagcagcttatatattatcaatcctgtcaataaaggctatcttgttgaaaccgatccacgctttgccaactaccgtcaatggttgggtagtgactatatgctggacagcctcaaactagacccaaacaatttacataaacgtttgggtgatggttattacgagcaacgtttaatcaatgaacagatcgcagagctgacagggcatcgtcgtttagacggttatcaaaacgacgaagaacaatttaaagccttaatggataatggcgcgactgcggcacgctccatgaatctcagcgttggcattgcattaagtgccgagcaagtagcgcaactgaccagcgatattgtttggttggtacaaaaagaagttaaacttcctgatggcggcacacaaaccgtattggtgccacaggtttatgtacgcgttaagaatggcgacatagacggtaaaggtgcattgttgtcaggcagcaatacacaaatcaatgtttcaggcagcctgaaaaactcaggcacgattgcagggcgcaatgcgcttattatcaataccgatacgctagacaatatcggtgggcgtattcatgcgcaaaaatcagcggttacggccacacaagacatcaataatattggcggcattctttctgtcgaacagacattattgctcaacgcaggcaacaacatcaacagccaaagcaccgccgccagcagtcaaaatacacaaggcagcagcacctacctagaccgaatggcaggtatttatatcacaggcaaagaaaaaggtgttttagcagcgcaggcaggaaaagacatcaacatcattgccggtcaaatcagcaatcaatcagagcaagggcaaacccggctgcaagcagggcgcgacattaacctagatacggtacaaaccagcaaacatcaagcaacccattttgatgccgataaccatgttattcgcggttcaacgaacgaagtcggcagcagcattcaaacaaaaggcgatgttaccctattgtcagggaataacctcaatgccaaagctgccgaagtcagcagcgcaaacggtacactcgctgtgtctgccaaaaatgacatcaacatcagtgcaggcatcaacacgacccatgttgatgatgcgtccaaacacacaggcagaagcggtggtggcaataaattgattattaccgacaaagcccagagccataacgaaactgctcaa

SEQ ID NO: 29387 - DNA, 1509 bp, Neisseria meningitidis
aatactgccgcatcggaaaccgctgccgaatccgccccccaagaagccgccgcttctgccatcgacacgccgaccgacgaaaccggtaacgccgtttccgaacctgtcgaacaggtttctgccgaagaagaaaccgaaagcggactgtttgacggtctgttcggcggttcgtacaccttgctgcttgccggcggaggcgcggcattgatcgccctgctgctgcttttgcgccttgcccaatccaaacgcgcgcgccgtaccgaagaatccgtccctgaggaagagcctgaccttgacgacgcggcagacgacggcatagaaatcacctttgccgaagtcgaaactccggcaacgcccgaacccgctccgaaaaacgatgtaaacgacacacttgccttagatggggaatctgaagaagagttatcggcaaaacaaacgttcgatgtcgaaaccgatacgccttccaaccgcatcgacttggatttcgacagcctggcagccgcgcaaaacggcattttatccggcgcacttacgcaggatgaagaaacccaaaaacgcgcggatgccgattggaacgccatcgaatccacagacagcgtgtacgagcccgagaccttcaacccgtacaaccctgtcgaaatcgtcatcgacacgcccgaaccggaatctgtcgcccaaactgccgaaaacaaaccggaaaccgtcgataccgatttctccgacaacctgccctcaaacaaccatatcggcacagaagaaacagcttccgcaaaacctgcctcaccctccggactggcaggcttcctgaaggcttcctcgcccgaaaccatcttggaaaaaacagttgccgaagtccaaacaccggaagagttgcacgatttcctgaaagtgtacgaaaccgatgccgtcgcggaaactgcgcctgaaacgcccgatttcaacgccgccgcagacgatttgtccgcattgcttcaacctgccgaagcaccgtccgttgaggaaaatgtaacggaaaccgttgccgaaacacccgatttcaacgccaccgcagacgatttgtccgcattacttcaaccttctgaagtacctgccgttgaggaaaatgcagcggaaatcgttgccgatgatttgtccgcactgttgcaacctgctgaagcaccggccgttgaggaaaatgtaacgaaaaccgttgccgaaatacctgatttcaacgccaccgcagacgatttgtccgcattacttcaaccttctgaagtacctgccgttgaggaaaatgcagcggaaaccgttgccgatgatttgtccgcactgttgcaacctgctgaagcaccggccgttgaggaaaatgcagcggaaatcactttggaaacgcctgattccaacacctctgaagcagacgctttgcccgacttcctgaaagacggcgaggaggaaacggtagattggagcatctacctctcggaagaaaatatcccaaataatgcagataccagtttccttcggaatctg

SEQ ID NO: 29388 - DNA, 984 bp, Neisseria meningitidis
atgttcggcaaatttaccgctgtccctgtaatacttcatcggggcaaaatccaggaacgtttccccgtcggctttgaaacttcccgctatgctgcgcaggaattgttccgccgccgtgtcggtgtcggcatgtttggcataataagccgcatcgacctgacgcatagcttgtgccaccagccgctcttctgcctgccgttgggaaatgccgggatggagtttggcaaatttagcggcattatttttaatttttctgatctcgctgtcgtgcagctgcctattgttccaatcgacattcgcccctactgccgccgtaccgacattcccgcccgccgcatagccgatggccgccccgcccagtgcgttgaccgccgctttgcccgccgtaccgaggttttccgccgctttgtccaaatacggtgcagcaagggaagtgccgctgccggccagtatgccgccgaggctgccggtcgtcagtccgcctgccgccccgtgcagtatgctcctgcctatgccgccttctttccaggtgtcgtagcggctttggttttcggcaagataggcgtttacttggccgagggatgcgcggatggcggctttttcggcttcgctgtccgtgttttgcagttcgtcctccagcagggttcgggcttcctgataccgttcgtaactttgggtattgccgagtttgtcggcaacggccgctacggcttgggcggcgtttctgccgaactccttcgttacttccctttgcaggttgatctctttggcgaccgcgtctttgtcgaagctgtttttcagacggcctgtgtgttgatccgcagtttcggtgtcgatgccggtgtagatacgcgcttcggtttcttttgcagtcctgcctgttcgggcaagttgtcccgcttcgtcggtgatgtgtatgttgcgggtgttgatgccgcttttcgtgatgctgctttgactgtcttggtcgctgccataacccac

SEQ ID NO: 29389 - DNA, 2025 bp, Neisseria meningitidis
atgaacgacatgactttatatctcatcatcgccctcgtgcctttggcaggctcgctgattgcgggtttattcggcaacaaaatcggacgtgccggcgcgcatacggttacgatactcggtgtggcggtgtccgccgtgctgtcggcttatgtgctgtggggattcctcaatggcagccgtgccaagtttgacgagaacgtctatacctggctgacgatgggcggtttggatttctccgtcggcttcttggtcgatacgatgacggcgatgatgatggtcgtggtaacgggcgtatcgttgatggtgcatatctacaccatcggctatatgcacgatgaaaaagtcggctaccaacgcttcttcagctatatttctttgtttactttcagcatgttgatgctgattatgagcaacaacttcatccagctcttcttcggttgggaagctgtgggtttggtgtcgtatctcttgatcggtttctatttcaaacgcccgagcgcgacatttgccaacctgaaagcctttttgatcaaccgtgtcggcgacttcggctttttgctcggtatcggcttggtgcttgcctatttcggcggcagcctgcgttatcaggacgtattcgcctatctgcccaacgtgcaaaatgccaccatccagcttttccccggtgtggaatggtcgttgattactgtaacctgtttgctcttgtttgtcggtgcaatgggtaaatcggcacaattcccgctgcacgtctggctgcccgattcgatggaaggcccgaccccgatttctgcattgattcacgccgcaaccatggttaccgccggtttgttcatggtatcgcgtatgtcgccgatttatgagatgagtagcactgcgctgtctgtcatcatggtgattggtgcgattaccgccctgtttatgggtttcttgggcgtgattcaaaacgacatcaaacgtgtggttgcgtattccaccctgtcgcaactgggctatatgaccgtggctctgggcgcgtctgcctattccgtggcgatgttccatgtgatgacccacgctttctttaaagccttgctgttcttggcggcgggcagcgcgattatcggtatgcaccacgaccaagatatgcgccacatgggtaacctgaaaaaatacatgccgattacttggctgactatgctgatcggcaatttgtcgctgatcggtacgccgttcttctccggcttctactccaaagattcgattatcgaagcggcgaaatacagcaccctgccgggcagcggctttgcctatttcgccgtcctcgccagcgtgtttgttaccgcgttttacgcgttccgccaatactttatggtgttccacggcgaagagaaatggcgcagcctgcccgaacaccattcagacggccacggcgaagaacatcacggtttgggtaaaaacgacaatccgcacgaaagcccgttggtggttaccctgcctttgattttgcttgccgttccgtccgtcatcatcggctacatcgccatcgaacccatgctttacggcgatttcttcaaagacgtgatttttgttaatgccgatgcgcatccgaccatgcacattatgaaagaagagttccacggcgcattggcgatggtgtcgcacagcctgcattcgcccgttctctatctcgctatcgcaggcgtattgagcgcatggctcctatacgtcaaactgccgcacctgcctgcgaaaatcgcgcaggcgttccgtccggtttacgttttgtttgaaaacaaatactaccttgatgccctgtatttcaacgttttcgccaaaggcacacgcgcattgggtaccttcttctggaaagtcggcgataccgccattatcgacaacggtattgtcaacggctctgccagactggtcggcgcggttgccgcgcaagtgcgtaaagtccaaacaggctttatctacacctacgctgccgctatggtgttcggcgtattggtcttgctcggtatgaccttctggggattgttcagataa

SEQ ID NO: 29390 - DNA, 576 bp, Neisseria meningitidis
atgccgtctgaaaacccgataggaaaaacgatgaaatccatagacgaacaaagcctgcataatgcccgccgcctgtttgaaagcggcgacatcgaccgtatcgaagtcggtaccaccgcgggcctgcaacagattcaccgttacctgttcggcggcttatatgattttgcgggtcaaatcagggaagacaacatttccaaaggcggttttcgttttgccaacgccatgtatttaaaagaggctttggttaaaatcgagcagatgcccgagcggacttttgaagaaatcatcgccaaatatgttgaaatgaacattgcccatccgtttttggagggtaatggcagaagtacccgcatctggctggatttggtgctgaagaaaaacctgaaaaaagtcgtgaactggcaaaatgtaagcaaaaccctgtatttgcaggcgatggaacgcagccccgtcaacgatttagaactgcgctttttgttaaaggacaacctgaccgacgatgtggacaaccgtgaaatcatctttaaaggtatcgagcagtcgtattattacgaagggtatgaaaaaggctga

SEQ ID NO: 29391 - DNA, 2262 bp, Neisseria meningitidis
atgttacaaatcgaaatcgacggcaaacaagtatctgtggagcagggcgcgacggtaattgaagccgcgcacaagctcggtacttatattccgcatttctgttaccacaaaaagctctctattgccgccaactgccgtatgtgtctggtggacgtggaaaaagcccccaaacccctgcccgcctgtgccacgccggttacagacggcatgattgtgcgtacgcattcggcaaaagcccgagaggcgcaagaaggcgtgatggagttcctgctcatcaaccatccgcttgattgtccgacctgcgaccagggcggcgaatgccagttgcaggatttggcggtgggctacggaaaaaccaccagccgctacaccgaagaaaaacgttccgtcgtcggcaaagacatggggcctttggtttccgccgaggaaatgagccgctgtatccactgcacccgctgcgttcgtttcactgaagaaatcgccggtttgcaagaaattgcgatggtgaatcgcggcgaacactccgaaatcatgccctttatcggcaaaacggtggaaaccgagctgtcgggcaacgtcatcgatttgtgtcctgtcggcgcattgaccagcaaaccgttccgcttcaacgcgcgtacttgggaattgaaccgccgcaaatctgtttccgcccacgatgctttgggcagcaacctgattgtacaaaccaaagaccataccgtccgccgcgtgttgccgctggaaaacgaagcgattaacgaatgctggctgtccgaccgcgaccgttttgcctacgaaggcctgtatcacgaaagccgtctgaaaaacccgaaaatcaaacagggcggcgagtggatggacgtggattggaaaaccgcattggaatatgtccgcagcgcgattgaatgtatcgccaaagacggcaaccaaaaccaagtcggcatttgggcgaacccgatgaatacggttgaagagctgtatctggccaaaaaacttgccgacggcttgggtgttaaaaactttgcaacccgtttgcgtcaacaagacaaacgtctttcagacggcattaagggtgcgcaatggttgggacaaagcattgaatctttggctgacaacgatgccgtattggtagtcggcgcgaacttgcgcaaagaacagccgctcctgaccgcccgcctgcgccgcgccgccaaagaccgtatggcattgagcgtattggccggcagcaaggaagaattgtttatgccgcttctctctcaggaagccgcacatcccgacgagtgggcaggccgtctgaaaaacttgtctgccaatgcggaacacgccgttaccgccagcctgaaaaacgctgaaaaagcagcggtgattttgggcgcggaagtgcaaaaccatcctgattacgccgcgatttatgccgccgttcaagagctggcagatgcgaccggcgcagtgctgggtattttgccgcaagccgccaacagcgttggtgcggatgtcttgggcgtgaactcgggcgagagcgttgccgaaatggcaaacgcgccgaaacaggcagtcttgctgctcaacgtcgagcctgaaatcgatacggttgacggtgcaaaagccgtggctgcgttgaaacaagcgaaaagcgtgatggcgtttacgccgtttgtcagcgaaacgctgctggacgtgtgcgacgtattgttgccgattgcgccgtttaccgaaacctcgggcagcttcatcaatatggaaggccgtctgcaatctttccacggcgtggtacaaggcttcggcgattcgcgtccgatgtggaaagtgttgcgcgtattgggcaacctgtttgacctgaaaggttttgaataccacgataccgtcgcgattctgaaagacgcgctggatgcggaaagcctgccgtccaaactgaacaaccgcgccgcttcgactcaaaaagattttcagacggcatcaagccgcctcgtgcgcgtgggcggagtgggcatctatcacaccgatgctatcgtgcgccgttccgcaccgttgcaagaaaccagccatgccgccgtgcctgctgcgcgtgtaaatccaaatacattggcacgcttgggcctgcaagacggacaaaccgctgtcgccaaacaaaacggcgcaagcgtatcggttgccgtcaaagccgatgccggtttgcctgaaaacgtggtgcatttgccgctgcataccgaaaatgccgcgctgggtgcgttgatggacactattgaactggcgggagcttga

SEQ ID NO: 29392 - DNA, 1302 bp, Neisseria meningitidis
atggctatttaccaatcaggcgtgatttttgaccaagtggataccgccaatcccgactgctggacattggacgaatacgtcaaacgcggcggctataccgccctgcgtaaaatcctgtccggaaacatctctcaaaccgatgtgattgacgaagtcaaaacctccggcttgcgcggtcgtggcggtgcgggcttcccgaccggtttgaaatggagctttatgccccgttcctttccgggcgaaaaatacgtcgtttgcaataccgacgaaggcgagccgggtacatttaaagaccgcgacatcatcatgttcaatccccatgccctgatcgaaggcatgattatcgccggttacgcgatgggcgcgaaagccggttacaactatatccacggcgaaatttttgaaggctaccaacgctttgaggccgctttggagcaggcgcgtgccgcaggctttttgggtaaaaatattttgggttcggattttgaatttgaactcttcgcccaccacggctacggcgcatatatttgcggcgaggaaaccgcattgctcgaatcgctggaaggcaaaaaaggccagccgcgctttaagccgccattccctgcttcgttcggcctgtacggcaaaccgactaccatcaacaatactgaaacgttctcctccgttccattcattatccgtgacggtggacaggcatttgccgataaaggtattccgaatgcaggcggtaccaaattattctgtatttccggccatgtcgagcgtccgggcaactatgaagtgccgttgggtacgccgtttgccgaagtcttgaaaatggcgggcggtatgcgcggcggtaaaaaactcaaagccgtcattcccggcggttcgtccgcgcccgtattgcctgccgacatcatgatgcagaccaatatggactacgactcgatctccaaagcaggctccatgctcggttccggcgcgattatcgtgatggatgaagacgtgtgcatggtcaaagccctcgaacgcttaagctacttttactacgatgaatcctgcggccaatgcaccccgtgccgcgaaggtacgggctggctctaccgcatcgtccaccgcatcgtagaaggcaaaggccgtatggaagacttggatttgctggattctatcggtaaccaaatggcaggccgcaccatctgcgctctcgccgatgccgccgtcttccccgtccgcagctttaccaagcatttccgtgatgagtttgtgcattacatcgaacacggcggaccgatgaaagagcataagtggggagggtggtaa

SEQ ID NO: 29393 - DNA, 474 bp, Neisseria meningitidis
atgttatccgcagaatctttaaaacaaatcgacatcgagttggcaaaatatcctgccgaccaacgccgctccgcgattatgggcgcattgcgtatcgcccaaaccgaaaaaggctggctcgctcccgagaccatcgcctttgtcgcagactatatcggcatctcgcctgcacaagcctacgaagtcgctaccttctacaatatgtacgaccttgagcctgtcggcaaatacaaactgaccgtttgtaccaacctgccctgcgccctgcgcggcggtatggcaaccggcgaatacctcaaacaaaaactcggtatcagctacggcgaaaccacgcctgacggcaaatttacccttgtcgaaggcgaatgcatgggggcgtgcggcgatgctcctgttatgttgttgaataatcataaaatgtgcagctttatgactgaagaggcgattgagaagaaactggcggagttggagtag

SEQ ID NO: 29394 - DNA, 2208 bp, Neisseria meningitidis
atgtttcccgaccaatccgcccccaacctgctgcaaggcttgaaccctgaacaactttccgccgtaacctggccgccgcaatccgcccttgtgctggcaggcgcgggcagcggcaaaacgcgcgtgctgaccacgcgtatcgcatggctgttgcaaaccggtcaggcaagcgtgcatagcattatggcggtaacgtttaccaataaagccgccaaagaaatgcagacccgtttgggcgcaatgattcccgtcaacgtccgcgccatgtggctcggcacgtttcacggtctctgccaccgctttttgcgcctgcaccaccgcgacgcaggcctgccgtcttcctttcaaattctcgacagcggcgaccagctttccctcatcaaacgcctgctcaaaagcctcaacatcgccgaagaaatcatcgcaccgcgttcgctgcaaggctttatcaacgcgcaaaaagaatccggtttgcgcgcttccgtgttgagcgcgcccgacccgcacacgcgccgcatgattgagtgctacgccgaatacgacaaaatctgccaacgcgaaggcgtggtcgatttcgccgagcttatgctccgcagctacgaaatgctgcaaagcaacgaaattctgcgccggcattaccaaaaccgcttcaaccatattctggtcgacgagttccaagacaccaacaaactgcaatacgcgtggctcaaactcatggcgggcggtaacacggcagtgtttgccgtcggcgacgacgaccaaagcatttaccgattccgtggcgcaaacgtcggcaatatgaccgcactgatggaagaattccacatcgacgcgcccgtcaaactcgaacaaaactaccgctccgtcggcaacatcctcgcctccgccaacgccgtcatcgaaaacaacgacgaacgcctcggcaaaaacctgcgcaccgacgccgaagcaggcgacaaaatccgctactactccgcctttaccgatctcgaagaagcccaattcatcgtggacgaaaccaaagccctcgaacgcgagggctgggatttggacgaaatcgccgtcctctaccgcagcaacgcccaatcgcgcgtcatcgaacaaagcctgttccgcagcggcattccctacaaaatctacggcggattgcgcttttacgaacgccaagaaatcaaacacgcgctcgcctacctgcgcctcgccgtcaatcccgacgacgacaacgccctcttgcgtgtcatcaacttcccaccacgcggcatcggcgcacgcaccatcgagaaccttcagacggcatcgcaagagcaaggcatcaccctctggcaagccgcctgcaacgccggtgcaaaagccaccaaaatcgccgccttcgtccgcctgattgaagccctgcgcaaccaagtcggacaaatgtccctgtccgaaatcatcgtcggcatcctcaaagacagcggcctgaccgaacactaccgaacccaaaaaggcgacaaccaagaccgcctcgacaacctcgacgaactcgtcaacgccgccatcgagttcaaacccgaagacagcaactttgaaaccctgcccgacaacatttcagacgaccccgccttccccatcctcgctttcctaagcaatgctgctctcgaatccggcgaaaaccaagcaggcgcgggcgaaaaagccgtacaactcatgaccgtgcacgccgccaaaggcttggaatttaacgccgtattcctcaccggcatggaagaaggccgcttccccagcgaaatgagccttgccgaacgcggcggcctcgaagaagaacgccgcctgatgtacgtcgccatcacccgcgcccgcaaacgcctctacatcaccatggcgcaacaacgcatgctgcacggacaaacccaattcggcatcgtctcccgcttcgtcgaagaaatcccgcccgaagtattgcactacctgtccgtcaaaaaacccgcctacgaccgctatggcaacacgcgccaaaccgccgcgcccaaagacaaaatcatcgacgactacaaacagccccaaacctacgcaggtttccgtatcggacaaaacgtccgccacgccaaattcggcaccggcgtgattatcgatgccgcagataaaggcgaatccgcccgactgaccatcaatttcggcaaacagggcgtgaaagagttggacaccaagtttgcgaaattggaagcgatgtaa

SEQ ID NO: 29395 - DNA, 738 bp, Neisseria meningitidis
atgaagcaggttgatttaaacgccgatctcgccgaaggctgcggcagcgacgaagccttgttgcagctgattacttcggccaacatcgcctgcgcccaacacgccggcagcattgccgatattcgggcggcattggcgtatgcccaacaaaacggcgtgcgcatcggagcacaccccggctatcccgatcgggaaaacttcggccgtaccgaaatgaatctgtccgaagccgatttgcgggcgtgtctgaattaccagttgggcgcattgcaggccttgtgccgtgatcagggtttggaaatggcttatgtcaaaccgcacggcgcaatgtacaaccaagcggcgaaaaaccgtgcgctggcggataccgttgcccgaattgtggcggatttcgacccgaaattgaaattgatggcactttccggcagcctgctcttggaagccggaaaagccgcaggcttgggtgtgatttccgaagtattcgccgaccgccgctatatgcccgacggtacgctggttccccgcagccgccccgatgcgcaggtggacagcgacgaagaagccatcgcccaagtattgcagatggtgcgggacgggcaggtcaaagcagtggacggcagcctggttgccgtgcaagccgacagcatctgtctgcacggagacgggccgcacgccgtggtgtttgccgaaaaaatccggcaggaactactggcggcaggcatcaaagtttctgcttga

SEQ ID NO: 29396 - DNA, 237 bp, Neisseria meningitidis
atgtcaaacatcgaacaacaagttaaaaaaattgttgctgaacaactgggcgtaaacgaagccgacgtgaaaaacgaatcttctttccaagacgacttgggcgcggattctttggacaccgtggagctggttatggctttggaagaagcattcggctgcgaaatccccgacgaagatgccgaaaaaatcaccaccgtccaactggctatcgactacatcaatgcccacaacggctaa

SEQ ID NO: 29397 - DNA, 1248 bp, Neisseria meningitidis
atgagtcagagaagagtagtcattacaggcttaggtcaggtttcccctgtcggcaacactgtcgcagaggcttgggacaccctgctcgccggcaaaagcggcatcggcgcgattacccgctttgacgcatccgacatcaacagccgtgtcgccggcgaagtgcgcggtttcgacatcggacaatacatcagcgcgaaagaagcgcgccggatggacgtattcatccactacggcattgccgccgcattgcaggcaatcgccgattcgggtttggacgatgtggaaaacctcgacaaagaccgcatcggcgtgaacatcggttccggcatcggcggactgcccagcatcgaggtcaccggcaaagccgtaatcgaaggcggcgcgcgcaaaatcaaccctttctttatccccggttcgctgatcaacctgatttccggacacgttaccatcctcaaaggctaccgcggcccgagctacgggatggtttccgcctgtaccaccggcgcgcacgccatcggcaattccgcccgactgatcaaatacggcgacgcggacataatggttgccggcggcgcggaaggcgcaatcagcactttgggcgtgggcggttttgccgcgatgaaagccctctccacccgcaacgacgaccccgccaccgcttcccgtccgtgggacaaaggccgcgacggcttcgttatcggcgaaggcgcgggcatattggtgttggaagaattggaacacgccaaaaaacgcggcgcgaaaatctacgccgaaatcgtcggcttcggcatgagttccgatgcttaccatatcaccgcgccgaacgaagaaggccccgcccttgccgttacccgcgcgctgaaagatgccggcatcaatcccgaagacgtggattacgtcaacgcgcacggcacgtccacccccttgggcgatgccaacgaaaccaaagccctcaaacgcgcgttcggcgaacacgcctacaaaaccgtcgtcagctcgaccaaatccatgaccggccacctgctcggcgcggcgggcggcgtggaggccgtgtacagcattttggcgatacacgacggcaaaatcccgccgaccatcaacatttttgaacaagacgttgaagccggctgcgatttggactactgcgccaacgaagcgcgcgacgcggaaatcgacgttgccatttccaactccttcggcttcggcggcaccaacggcacgctggtcttcaaacgcttcaaaggctga

SEQ ID NO: 29398 - DNA, 1515 bp, Neisseria meningitidis
atgactacctccaaatgccctgtaacccatctgaccatgaacaacggcgcgcctgttgccgacaatcaaaacagcctgaccgccggtcctcgcggccctctgctggcgcaggatttgtggctgaatgaaaaactcgccgacttcgtgcgcgaagtcatccccgaacgccgtatgcacgccaaaggttcgggcgcgttcggtacgtttaccgtaacgcacgacatcaccaaatacacccgcgccaaaatcttcagcgaagtcggcaaaaaaaccgagatgttcgcccgtttcaccaccgtggcaggcgaacgcggcgcagccgatgcagaacgcgacatccgcggttttgcgttgaagttctataccgaagaaggcaactgggatgtggtcggcaacaacacgcccgtgttcttcctgcgcgacccgcgtaagttccccgacctgaacaaagccgtcaaacgcgacccgcgcaccaatatgcgctctgccacaaacaactgggacttctggacgctgctgcccgaagcactgcaccaagttaccatcgtgatgagcgaccgcggcatccccgccggctaccgccatatgcacggcttcggttcgcatacctacagcttctggaacgaagcaggcgagcgtttttgggtgaaattccatttccgcacccaacaaggcattaaaaacctgaccaacgaagaagccgccaaaatcatcgccgacgaccgtgaaagccatcagcgcgacctgtacgaagccatcgagcgcggcgagtttccgaaatggacgatgtacatccaagtcatgcctgaagccgatgcggaaaaagtgccgtatcatccgtttgacttgaccaaagtttggccgaaaaaagactatccgctgattgaagtgggcgaattcgagttgaaccgcaatcccgaaaacttcttcgccgatgtggaacaatccgccttcgcaccgagcaacctcgttcccggtgtcggcgccagcccagataaaatgttgcaggcgcgtttgttcaattacgccgacgcgcaacgctaccgcttgggcgtgaacttccgccaaatccctgtcaaccgtccgcgttgccctgttcacagcaaccagcgcgacggacaaggacgcgccgacggcaactacggcagcctgccgcactacgaacccaacagcttcggccaatggcagcagcagcccgacttcgccgaaccgcctttgaaaatcaacggcgacgcggcgcactgggactaccgccaagacgatgacgactatttcagccaaccgcgcgccctgttcaacctgatgaacgacgcgcagaaacaggcattgttcggcaacaccgccgccgcaatgggcgacgcgcccgacttcatcaaataccgccatatccgcaactgctaccgttgcgatccggcatacggcgaaggcgtggcaaaagccctcggactgactgtcgaagacgcacaagccgcccgcgcgaccgaccccgcactgggtcaggccggtttgctgtaa

SEQ ID NO: 29399 - DNA, 2391 bp, Neisseria meningitidis
atgactgaacaaaaacacgaagaatacggcgccgacagcattcaggtgctcgaaggcttggaagcggtacgcaaacgccccggtatgtacatcggcgacacgcaggacggcagcggcctgcaccacatggtgttcgaagtattggacaacgccattgacgaagcactcgccggacattgcgacaaaatcaccgttaccatccacgccgaccattccgtcagcgtcgccgacaacgggcgcggtatgcccaccggcatccacccgaaagaaggacgctccgccgccgaagtcatcatgaccgtattgcacgcgggcggtaaattcgacaacaacagctacaaaatctccggcggcctgcacggcgtgggcgtgtcggtcgtcaacgcgctgtccgactgggtaacgctgaccatctaccgcgacggcaaagaacacttcgtccgcttcgtgcgcggcgaaaccgaagagccgctgaaagtggtcggcgattccgataaaaaaggcacgaccgtgcgcttcctcgccagtacggaaaccttcggcaacgtcgaatacagcttcgacatccttgccaaacgcatccgcgaactttcgttcctgaacaacggcgtggacatcgaattgaccgacgagcgcgacggcaaacacgaaagcttcgccctttccggcggcgtggctggattcgtgcaatacatgaaccgcaaaaaaacgcccttgcacgaaaaaatcttctacgcgttcggcgagaaagacggcatgagcgtcgaatgcgcaatgcaatggaacgacagctatcaggaaagcgtgcagtgcttcaccaacaacatccctcagcgcgacggcggtacgcacctgaccgcgttgcgccaagtgatgacgcgcaccatcaacagctacatcgaagccaacgaagtcgccaaaaaagccaaagtggaaaccgccggcgacgatatgcgcgaaggtttgacctgcgtgttgtccgtcaaactgcccgaccccaaattttcgtcccaaaccaaagacaaactggtttccggcgaaatcggtcccgtcgtcaacgaagtcatcagccaagccctgaccgacttcctcgaagaaaaccctgccgaagccaaaatcatcaccggcaaaatcgtcgatgccgcccgcgcgcgcgaagccgcccgcaaagcccgcgaaatcacccgccgcaaaggcgtgatggacggcttggggctacccggtaaactcgccgactgccaagaaaaagaccccgcattgtcagaactttatctggtcgagggcgattctgcaggcggttccgccatgcaggggcgcgaccgcaaattccaagcgattttgccgcttaagggcaagattttgaacgtcgaaaaagcgcgctttgaaaaaatgctcgccagtcaggaagtagccgctttgattaccgcgttgggcgcgggcatcggcaaagaagaattcaatgccgagaagctgcgttaccaccgcatcattatcatgaccgatgccgatgtggacggcgcgcatatccgcaccttgcttttgaccttcttctaccgccaaatgcccgaactggtcgagcgcggctacatctatatcgcccagccgcctttgtataaagcgaaatacggcaaacaggaacgttacctcaaggacgagttggaaaaagaccaatggctgctcggtcttgccttggaaaaagccaaaatcatttcagacggccgcaccatcgaaggcgcagaacttgccgacaccgccaaacaattcctgttggcaaaaaccgtcatcgaacaggaaagccgcttcgtagacgaactcgtcctgcgcgccatgctacacgcgtcgcccattgatttgacgtcgtctgaaaacgccgataaagccgttgccgaactttccggtctgcttgacgaaaaagaagtcgccctcgaacgcatcgaaggtcatgaaggacaccggttcatcaaaatcacgcgcaagctgcacggcaacgtcatggtcagctacatcgaacccaagttcctcaacagcaaagcctaccaaaccctcacccaaaccgccgccgcgctcaaaggcatggtcggcgagggtgccaagctttacaaaggcgaaaacgggtacgacgcggacagctttgaaaccgctttggacatcttgatgagcgttgcccaaaaaggtatgtccatccaacgatacaaaggcttgggcgagatgaaccccgagcagctgtgggaaaccacgatggatcccgccgtgcgccgcctgttgaaagtgcgcatcgaagatgccattgccgccgacgaagtgttcgttacgctgatgggcgacgaggtcgagccgcgccgtgcctttatcgaaaacaacgcgctgattgcccaaaatatcgacgcataa

SEQ ID NO: 29400 - DNA, 1320 bp, Neisseria meningitidis
atgaaggcagccgccgcctttgcgacaggtttggatgcacaggctgttcgcatcgtcatcgacatttacggctcgctcgcactgaccggatacggacacggtacatttgacgcgctgatgctcggtttggaaggcagcctgccgcacgacatcccgcttgccggcattcccgaacgcctcgaacgcatccgcacgcagcacatcctccggctcaacgggcaagaaatccgcttcatccccgaccgcgacctgaacatactcggcaatcaagtgctgcccaaacaccccaacggtctgcgttttaccgcctatgcttcagacggcacggtattgaaggaacaggtttattattcggtcggcggcggctttgtcgttaccgaagaagattttgaccggcaggcggaaacggaaaaagccgttccctatccctataccagttgcgccgaactgcttgcccgatgccgtctgaaccggctcgacatctccgaagtcgtgttggcaaacgaagccgcgcttgccggatgcggcgaagccgaaatccgccgccgcgccgctgccgttgccgaggttatggaaggctgcatcaaacgcggcttgggtgcggacggcgaactgcccggcggattgaacgtccgccgccgcgccccgcagcttgccgccaagctcaaagtcctgcgcgaaaccgaaatcgtcaacacccagctctggccgatggtgtacgccatggcggtcaacgaagaaaacgccgtcggcggacgcgtcgttaccgcaccgaccaacggcgcggcaggcatcattcccgccgtattgcactatttccgcaagttcaatccgcacgccacacaggaacgcgtcgaaaacttcctgctcaccgcaggcgcaatcggcatcctctacaagaccaacgcctccatttccggtgcggatgtcggctgtcagggcgaagtcggcgtagcgtgttcgatggcggcgggcgcatatgccgaagtcatcggcggcacgcccaaacaagtggaaaacgccgccgaaatggcgatggaacaccatttggggctgacttgcgaccccgtcggcggactggtgcaaatcccctgcatcgagcgcaacggcatcgccgccgaaaaagccctcaaactcggcaccctcgcgcttttggaagacggcacggacaaaaaagtctcgctcgacgaagtcatccgaaccatgttacagacagggcgcgacatgaagtccacctacaaagaaacctcgcttgccggactcgccgccacgctccggaaaaaagccgtccccgtatccgtgcgcgtggtcgagtgctga

SEQ ID NO: 29401 - DNA, 1032 bp, Neisseria meningitidis
atgggcatcaaagtcgccatcaacggctacggacgcatcggccgccaggttttgcgcgccatctacgattatcagattcaagaccaactccaaatcgtcgccgtcaacgccagcggcagccttgaaaccaacgcccacctcaccaaattcgacaccgtgcacggacgctttgaagccgacgtatcccacgacggcggcaacctcatcgtcaacggcgacaaaatccccttcttctcgacccgcaaccctgccgaactgccgtggaaagaactcggtgtcgatttggtcatggaatgcaccggcgcgttcaccagcaaagaaaaagccaaagttcatctggaaagcggcgcgaaaaaagtcctcatttccgcaccgggcggcgacgatgtcgatgcaaccgtcgtgtacggcgtgaacgacagcatcctgaccgccgacatgaccgtcgtttccaacgcttcctgcaccaccaactgcctctcgccggttgccaaagtgttgagcgaaagcgtcggcatcgtcaaaggcgcgatgaccaccatccacgcgctgaccaacgaccaaaccgttaccgacgtgcgccacaaagacctgcgccgcgcccgcagcggcgtggaaaacatgattccgaccaaaactggcgcggcaaaagccgtcggtttggtactgcccgaattgaaagacaaactcgacgggcttgccatccgcgtgccgaccgtcaacgtatcattggtagatttgaacttccaagccgcgcgcgacacgacaatcgaagaaatcaacgcactgatgaaagccgcctcggaagcaggcgcgctcaaaggcgttttaggctacaacaccctgcccttggtttccatggacttcaaccacactaccgaagccagccacttcgacgcaacactgaccaaagtcgttgacggcaacatgattaaagtcttcgcatggtatgacaacgaatggggcttcagctgccaaatgctgaacaccgcacgccgtatgttcggacttgaagtgcgcccgctcaaataa

SEQ ID NO: 29402 - DNA, 810 bp, Neisseria meningitidis
atgacaccgctcaaaatcgccatcgccggcgcaaacggccgtatggggcgcgtcctcgtcgaagccgtcaacaaccatcccgacaccgtcctttccggtgcgcttgaacactcaggctcagaagccctcgggctggacgcaggctacgccgtcggactcaaaaccggcatcgccatttcagacgacgttgacaccgttctcgcacaaagcgacgtactcatcgacttcacccgccccgagcccaccctcaaacacctgcaaaaatgcgttgaaaaacaagtcaacatcatcatcggcacaacaggcttcgacgatgcgggcaaagccgccatccgcgctgccgccgaaaaaacaggcatcgttttcgccgccaacttcagcgtcggcgtcaacctcaccttccacatcctcgacaccgtcgccctcgtactcaacgaaggctacgacatcgaaatcattgaaggtcaccaccgccacaaagtcgacgcacctagcggcaccgcgttacgcatgggcgaagtcatcgccggcgcgctcggcagagacctcaaacaatgcgccgtttacggccgcgaaggccacaccggcccgcgcgatccgtccaccatcggctttgccaccgtccgcgcgggcgacatcgtcggcgaccacaccgccctcttcgccaccgacggcgagcgcgtggaaatcacccacaaggcaagcagccgcatgacctttgccgccggcgccgtccgcgccgcagtttgggtaaacggtaaaacgggtttgtacgatatgcaggacgtactcgggctgaacaaccgttaa

SEQ ID NO: 29403 - DNA, 1155 bp, Neisseria meningitidis
atggctgataaaaaaagccctttgattgccgtcagtgtcggcgaagcgtcgggcgacctattgggggcgcacctgatacgcgccatccgcaagcgttgtccgcaggcgcgttttgtcggtatcggcggcgaactgatgaaggcggaaggtttcgagagcctttatgatcaggagcggctggcggtgcgcggctttgtcgaagtggtcaggcggctgccggaaattttacggatacgcagggggctggtacgggatttgctgtcgttgaaacctgatgtctttgtcggtatcgatgcgcccgattttaatctgggtgtggcggagcggctcaaacggtcggggattccgaccgtgcattatgtcagtccgtcggtttgggcgtggcggcgggaacgcgtgggcaaaatcgtgcatcaggtcaaccgcgtgctgtgcctgttcccgatggagccgcagctttatctcgatgcgggcggacgtgcggagtttgtcggtcatccgatggcgcagcttatgcccttggaagacgaccgtgaaacggcgcggaaaactttgggcgtggatgccggcatccccgtattcgccctgctgcccggcagccgcgtcagcgaaatcgactatatggcgccggtgttttttcagacggcattattgttgttgaaacgctatcccgccgcacgcttcctgctgcctgccgcaacggaggcgacgaagcggcgtttggcggaaattttgcagcgttcggagtttgccggattaccgctgacggtaaccgacagacagtctgaaacggtgtgcagggcggcggatgcggtgctggtaacgagcggtacggcaactttggaggtggcgctgtgcaagcgtccgatggtcatcagctacaagatttcgccgctgacctatgcttatgtgaaacgcaaaatcaaagtgccgcatgttggcctgccgaatatcctgttgggtaaggaggctgtgccggagctgcttcaacatgatgccgtaccggaaaaactggcggcggcgttggcggactggtacgaacaccccgataaggttgccgcgctgcaacaggatttcagggtattgcacctgctgttgaaaaaagatacggcggatttggccgcgcgcgcggttttggaagaggcgggatgttga

SEQ ID NO: 29404 - DNA, 1887 bp, Neisseria meningitidis
atgatttaccccaaaacctacgacgtgattgtcgtcggtggcggccatgccggtaccgaagccgcgctcgccgccgcccgcatgggcgcgcagacgcttttgctcacacacaatatcgaaacgctcggacaaatgtcatgcaacccttccatcggcggcatcggcaaagggcatttggtacgcgaactcgacgcgctcggcggcgcaatggcgttggccaccgacaaatccggtatccagttccgccgcctgaacgccagcaaaggcgcggcagttcgagccacgcgcgcgcaggccgaccgcattttgtacaaagccgccatccgcgaaatgttggaaaaccaagaaaacctcgaccttttccaacaagccgtcgaagacgtaacgctcgacggcgaacgcatcagcggcgtaatcaccgcgatgggcgtggaattcaaagcccgcgccgtggtgctgaccgcaggcacatttttgtccggcaaaatccatatcggtttggaaaactacgaaggcggccgcgccggcgaccccgccgccaaatcgctgggcggacgtttgcgcgaattgaagctgccgcaaggccgtctgaaaaccggcacgccgccgcgcatcgacggacgcacgattgacttttcccaactgaccgaacagcccggcgacacacccgttcccgtcatgtccgtgcgcggcaacgccgaaatgcacccgcgccaagtgtcctgctggattacgcataccaacacgcaaacccacgacatcatccgctcaggcttcgaccgcagcccgatgtttaccggcaaaatcgaaggcgtgggcccgcgttattgtccgtctatcgaagacaaaatcaaccgtttcgccgataaagacagccaccagattttcctagaacccgaaggcctgactacgtacgaatactatcctaacggtatctccaccagcctgccgttcgacatccaaatcgcgctcgtccgcagtatgaaaggtttggaaaacgcccatatcctgcgccccggctacgccatcgaatacgactacttcgacccgcgcaacctcaaagccagcctcgaaaccaaaaccattgagggactgtttttcgctgggcaaatcaacggtacgaccggctacgaagaagccgccgcgcaaggtttattggcaggcgcgaacgccgtgcaatatgtgcgcggacaagacccgctcctgctgcgccgcgaacaagcctacctcggcgtattggtggacgacctcatcaccaaaggcgtgaacgaaccctaccgaatgttcaccagccgcgccgaataccgcctgcaactcagggaagacaacgccgacatgcgcctgaccgaagacggctacaaaatcggcttggtgggtgaagcgcaatggcgtatgttcaacgaaaaacgcgaagccgtcgaacgcgaaatccaacgtttgaaaacaacgtggtacacaccgcaaaaactcgccgaagacgaacaaatccgcgtattcggacaaaaactcagccgagaagccaacctgcacgatttgttacgccgcccgaacctcgactacgccgcgctgatgacgctcgaaggcgcgatgccgtctgaaaacctctccgccgaagtcatcgaacaagtcgaaatccaagtcaaataccaaggctatatcgaccgccaaaacgaagaaatcgacagccgccgcgacatcgaaaccttaaaactgcccgacggcatcgattacggcaaagtcaaaggcttgtcggcagaagtgcagcaaaagctcaaccagcacaaacccgaaaccgtcgggcaggcaagccgcatttccggtgtaacgcctgccgccgtcgcactgctgatggtgcatttgaagcgcggatttaaagacgcgaaataa

SEQ ID NO: 29405 - DNA, 585 bp, Neisseria meningitidis
atgcacatactgaccgccggcgtggacgaggcaggacgcggacctttagtcggcagcgtgtttgccgccgccgtcatccttccggaaacattcgacctgcccggactgaccgactccaaaaaactcagcgagaaaaaacgcgacgcgcttgccgaaatgataaaaaatcaggcggttgcgtggcacgtcgccgccgccgggcccgaagaaatcgccagcctcaacatcctgcacgccaccatgctcgcgatgaaacgcgccgttgacggtttggctgtgcgtcccgaaaaaatattcatcgacggcaaccgcattcccgaacatttgaacatccctgccgaagccgtcgtcaaaggcgacagcaaaatcatcgaaatatccgccgcatccgttttggcaaagaccgcccgcgatgcggaaatgtacgcactggcgcaacgccatccccaatacggtttcgacaaacacaaaggttacggcacgaagcagcatttggaagccctcgaaaaatacggcgtgctgcccgaacaccgccgcgacttcgcccccgtcagaaacctgctcgcgcagcaggccttgttttaa

SEQ ID NO: 29406 - DNA, 774 bp, Neisseria meningitidis
atgagtgcgaacatccttgccatcgccaatcagaagggcggtgtgggcaaaacgacgacgacggtaaatttggcggcttcgctggcatcgcgcggcaaacgcgtgctggtggtcgatttggatccgcagggcaatgcgacgacgggcagcggcatcgacaaggcgagtttgcagtccggcgtttatcaggtcttattgggcgatgcggacgtgaaatcggcggcggtacgcagcaaagagggcggatacggcgtgttgggtgcgaaccgcgcgctggccggcgcggaaatcgagctggtgcaggaaatcgcccgggaagtgcgtttgaaaaacgcgctcaaggcagtggcggaagattacgactttatcctgatcgactgcccgccttcgctgacgctgttgacgcttaacggcttggtggcggcaggcggcgtgattgtgccgatgttgtgcgaatattacgcgctggaagggatttccgatttgattgcgaccgtgcgcaaaatccgtcaggcggtcaatcccgatttggatatcacgggcatcgtgcgtacgatgtacgacagccgcagcaggctagttgccgaagtcagcgaacagttgcgcagccatttcggggatttgctgtttgaaaccgtcatcccgcgcaatatccgccttgcggaagcgccgagccacggtatgccggtgatggcttatgatgcgcaggcaaagggtgccaaggcgtatcttgccttggcggacgagctgatggcgagggtgtcggggaaatag

SEQ ID NO: 29407 - DNA, 624 bp, Neisseria meningitidis
atggaacgcaaagaacgcctgcgtgcaggcattgccgcgatggggctggatatttcggaaacggcacaggacaggcttttggcctatgtggatttgttgaaaaagtggaacaaaacctacaatctgaccgcactgcgcgacgaggaaaaaatgattgtccatcatcttttggacagcctgacgctgctgccccatatcgagggtgtgcaaacgatgctggatgtcggttcgggcggcggtcagcccggcattccggcggcggtgtgccgtccggatgtgcagataacccttttggatgcgaatacgaagaaaacggcttttttacagcaggcggttatcgagttggggttggacaatgtgcgcgtggtatccggacgcgtggaggcggtttcggacgtgcgtgccgacgtggttaccagccgtgcgtttgcagaactggcggactttgtatcgtggacggcgcatctgttgaaagacggcggctactgggcggcgatgaagggcgtatatccgcagggggaaatcggccgcctgccgcaggatgtgtgcgttgaaaaagtccaaaggctcgacgtgccaggcttggatgcggaacgccatatcgtcatcctgagcaagcgttga

SEQ ID NO: 29408 - DNA, 558 bp, Neisseria meningitidis
atgatcaacgatattcaaaaaacagccgaaggcaagatgcagcgttcggtcgaagtactgaaagaaaatctggcaaaagtgcgtaccggccgcgcgcatactggcctgctcgaccaagtggaagtcgaatactggggcagcatggtccccgtcagccaagttgccaacgtaacgcttctggacgcgcgcaccatcggcgtgaaaccgtttgagggcaatatggcggccaaagtcgagaaagccatccgcgattcaaacttgggactgaacccggcagctgtcggcgacctgatccgcgtgccgatgcccatgctgaccgaggaacgccgcaaagacctgattaaagtcgtacgcggcgaagcggaagaaggccgcgtctccatccgcaacgtgcgccgcgatgccaacgaccacatcaaaaaactcctcaaagacaaagaaatttccgaagacgaggcacgtcgcggcgaagaagcggttcaaaaactgaccgacaaatacattaccgaagccgacaaactcctgactgccaaagaagaagatttgatggcaatttaa

SEQ ID NO: 29409 - DNA, 747 bp, Neisseria meningitidis
atgaaaagcagcacgcaggccgttttggaacacaccgccattcccaagcatatcgccgtgattatggacggcaacggccgttgggcgaaaaaacgtttcctcccgcgcataatgggacacaaacgcggtttggacgcattggaaaatatggtgaagcattgcgccaaactgggtgtgcaatatctgaccgtgtttgccttttcaaccgaaaactggcgccgccccgaagacgaagtttcgttcctgatggggctgtttttacaggctttgcaaaaacaggtacgccgcctgcacgaaaacaatatgcgcctgaaaatactgggcagccgcgaacgcttcaaccgtcaaatcctgaagggcatcgaagaggcggaagccttgacggcaaacaataccggcctgaccctgagcattgccgccgattacggcggacgttgggacattttgcaggcggcaaacaaactgattgccgaaggcgtatccgagattacggaagacacgctggcgaaatacctgatgctgggcgatgcgcccgagccggatttgttcatccgcaccggcggcgaaacgcgcatcagcaatttcctgctctggcagatggcgtatgccgaactgtatttcaccgatattttgtggcccgattttgacggcaaggctttggacgatgccgtcgcttcgttccaaaaacgcgaacggcggttcggacgcacctccgagcaactgcctatcgaacagcaaaggaactga

SEQ ID NO: 29410 - DNA, 798 bp, Neisseria meningitidis
atgctgaaacaacgggtgataaccgccatgtggctgctgccgctgatgctgggcatgctgttttacgcgccgcaatggttgtgggctgcattttgcggactgattgccctgattgccttgtgggaatatgcccgtatgggcggtttgtgcaaaattaaaaccaaccattacctcgccgcaaccttggttttcggcgtggttgcctatgcgggcggctggatgctgcctaatttggtttggtatgttgttttggcattttggctcgccgttatgcctttatggttgagattcaaatggaggctcaacggcggttggcaggtttatgccgtcggctggcttctggtcatgccgttttggttcgcgctcgtatccctgcgcccgcatcccgatgatgccctgccgctgctcgccgtgatgggtttggtgtgggttgccgatatttgcgcgtatttcagcggcaaggcgttcggcaaacacaaaatcgcaccggcaatcagccccggcaaaagctgggaaggtgcaatcggcggcgcggtttgcgtggccgtgtacatgaccgccgtacgaagtgccggctggctggcattcgatacaggctggttcgataccgtgttaatcggtttggtgttgaccgttgtcagcgtatgcggcgaccttttggaaagctggctcaagcgcgcggcaggcatcaaagacagcagcaacctgctgcccggacacggcggcgtgttcgaccgcaccgacagcctgattgccgttatcagcgtctatgcagcgatgatgtcggttttaaattga

SEQ ID NO: 29411 - DNA, 1044 bp, Neisseria meningitidis
atgattccggccacctacaccctgtcccaaatcaccgcgcggctcggcggcgaatggcgcggcgaagacacttctgttaccgccgtgcgcccgctcgcagacgcgcaggcggaacacatcagcttcctcgccaacccgaaatacaaagccgaagtccacgacagcagcgcgggtgcggtcatcgtttccgccaaagcggcagacggatttgaagggcgcaacctgattgtcgccgacgacccctatctctatttcgccaaagtcgcgcgcctattttcacccgtcgtcaaagcgcgcggcggcatccatccgaccgccgtcgtcgaagagagtgccaccgttcccgcaagctgcgaaatcggcgcgaacgcctacatcggcgcaaacaccgtgctcggcgaaggctgccgcatcttggcaaacgccgtcgtccaacacgattgccgtttaggtgatgaagttgttttacatcctaacgccgtcgtttattacggctgcacactgggcagacgcgttgaaatccacagcggcgcggtcatcggcgcggacggattcggactcgccttcgccggcgattcgtggtttaaaatcccgcaaactggcgcggtaacgctgggcgacgacgtggaaatcggctcgaacaccaacatcgaccggggcgcgatgagcgacaccaccgtcggcaacggcaccaaaatcgacaaccaagtccaaatcggacacaactgcaaaatcggctcgcacaccgtcatcgccgccaaaaccggcatctcaggcagcgtcaccataggcagctactgcatcatcggcggcggcgtcggcacggtcggacacatcgaaatcgccgacaaaaccaccatcggcggcggcacgtccgtcacccacagcattaccgaaagcggcaaacacctcgccggcatcttcccgatgtccacccataaagaatgggcgcgcaacgccgtttacatccaccgcttaagcgaaatgaacaaacgcctcaaaacgctggaacagcagctttcagacggcaaagacacgcaataa

SEQ ID NO: 29412 - DNA, 450 bp, Neisseria meningitidis
atggacgttcaactccccatcgaagccaaagacatccaaaaactcatcccccaccgctacccgtttctccagctcgaccgcatcaccgccttcgagccgatgaaaaccctaaccgccatcaaaaacgtaaccataaacgaaccccagttccaaggccactttcccgacctgcccgtgatgcccggcgtactcatcatcgaagccatggcgcaagcctgcggcacactcgccatcctcagcgaaggcgggcgcaaggaaaacgaattcttcttcttcgccggcatagacgaagcccgtttcaaacgccaagtcatccccggcgaccaactcgtctttgaagtcgagctgctgaccagccggcgcggcatcggcaaattcaacgccgttgccaaagtggacgggcaagtcgccgtcgaagccgtgattatgtgcgccaaacgcgtggtttga

SEQ ID NO: 29413 - DNA, 2838 bp, Neisseria meningitidis
atgttagacaaatactcccccgccgaaatcgaatccaaacattatcaaaactgggaagagcagggctatttccaacctgatatggatttgaccaaaccgtctttttccatccaactgccgccgcccaatgtaaccggcacgctgcacatgggtcatgccttcaaccaaaccattatggacggcctgacccgctactaccgtatgaaaggctgcaacaccgcctggattcccggcaccgaccacgcgggcatcgccacgcaaatcgtggtcgagcgtcagcttgccgcgcaaaacgtgtcccgtcatgacttgggtcgtgaaaaattcttggaaaaagtgtgggaatggaaagaagtttccggcggcacgattacgcagcagatgcgccgtgtgggctgttctgccgactggacgcgcgagtatttcacaatggacgatgtacgcgccgaaaccgtaaccgaagtgttcgtacgcctgtatgaacagggcttgatttatcgcggcaaacgcttggtgaactgggatccggtattgggtaccgcagtgtctgatttggaagtggaaagcgtggaagaacaaggctctatgtggcacatccgctatccgctggcggacaatcctgccgaagccgtcatcgtcgccaccacccgtcccgaaacgctgttgggcgacgttgccgttgccgtcaatcccgaagacgaacgttatacccacttaatcggcaaagaattaatcctgccgctgaccggccgcaccattcccgtgattgccgacgaatacgttgaaaaagacttcggcaccggctgcgtgaaaatcacgcctgcgcacgacttcaacgactacgaagtcggcaaacgccacgatacgcgcttggttaatgtgttcgacttggaagccaaagtattggcaaacgccgaagtgttcaacttcaaaggcgaagcgcaaccaagctttgccctgcctgaaaaatacgcaggcttggaccgctttgccgcgcgcaaacaaatggttgccgatttgcaggaacaaggtttcttggtcgaaatcaaagcgcacacgctgatgacgccgaaaggcgaccgtaccggttccgtgattgagccgatgctgaccagccaatggtttgtcgccatgtccgccacgccaaacggcggcgagcctgacagcgaattcaaaggcttaagccttgctgacaaagccaaaaaagccgtcgacagcggcgcggtgcgctttatccccgaaaactgggtcaacacctacaaccaatggatgaacaacatccaagactggtgcatctcgcgccaactgtggtgggggcatcaaatccctgcatggtacgacaacgaaggcaatgtgtacgttgcccgcaatcaggaagaagccgaaaaacaagccggcaaaacaggcttgacccgagaagaagacgtattggacacatggttctcctccgcactcgtgccgttctccacgctcggctggccgtctgaaaccgacgaactcaaagccttcctgccgtccaacgtcttggtcaccggctacgaaatcatcttcttctgggtggcgcgcatgattatgatgaccacccactttaccggcaaagtaccgtttaaagacgtgtacatccacggcatcgtgcgcgaccacgaaggcaaaaaaatgtccaaatccgaaggcaacgtcattgaccctgtggatttgatcgacggcatcgacttggaaaaactgctggtgaaacgtaccaccggtctgcgcaaacccgaaaccgcgccgaaagtggaagaagcctcgagaaaactcttccccgaaggcattccgagtatgggcgcggacgctttgcgcttcaccatggcgagctacgccagcttggggcgcagcgtgaacttcgacttcaaacgcgccgaaggctaccgcaacttctgcaacaaaatctggaacgccaccaacttcgtcttgatgaacaccgaaaaccaagactgcggctacggcgcaaccgccactgagccgcgcggctattccttccccgatatgtggattgtagaccgtctgaatcagaccatcgagcaagtaacgcaagcctacgaaacctaccgctttgatttggcagcggaaaccctgtacagcttcatgtggaacgactattgcgactggtatttagaacttgccaaagtgcagcttcaaaccggctgcgccagccgccaacgcgccacacgccataccttattgcgcgtactcgaagccgccctgcgcctgctgcacccgattatcccgttcatcaccgaagaactgtggcaaaccgtcgctcctatgtgcgacgcgaaaaccgccgacagcatcatgctcgcccgcttccccgaagccgacagcggcgagattgttcagacggcattcgagcaaatgaccgtgttgcaggatttgattggcgcagtccgcaacctgcgcggcgaaatgggcatccagcccaacgtaaaagccccgctgtttgtcgaaagcacggacgacttggcggactacctcaaatacctgccgatgatgacccgcctgaccgaagcacagcaagtcgccaccctgcccgaaagcgaagacgcgcccgtcgccgtctgcaacggcgcgcgcctgatgctgaaagtcgaaatcgacaaagccaccgaaaccgcccgtttgagcaaagaagccgagaagctgcaaaaagccttggacaaactcaacgccaaactctccaaacccggctacaccgaaaaagccccggcgcatttggtggaaaaagacaaagccgatttggcggaattggaagacaaaatggcaaaagtgcaaactcagttgtcgaagttgaaagactga

SEQ ID NO: 29414 - DNA, 369 bp, Neisseria meningitidis
atgcgtcatcgtaatggcaatcgcaaattaaaccgtaccagcagtcatcgtgctgcaatgctgcgtaatatggcgaattcattattgactcacgaaactattgtaacaactctgcctaaggccaaggaattgcgccgtgtagtagagccgttgattacattgggtaaaaagccgtcattggcaaaccgccgtttggcatttgaccgtactcgcgaccgtgatgttgtagtaaaactgtttggcgatttgggtcctcgttttactgctcgtaacggtggttatgttcgggtgttgaaatacggattccgtaaaggtgataatgcacctctggcactggttgaattggttgacaaaccggctgctgagtaa

SEQ ID NO: 29415 - DNA, 987 bp, Neisseria meningitidis
atgcagaatagcacaaccgaatttttgaaacctcgtcaaattgatgtaaatactttttctgcaactcgtgcaaaagtatctatgcagccatttgaacgtggtttcggtcataccttaggtaatgctttgcgccgtatcttactgtcatccatgaatggttttgctcctactgaagtagctattgccggtgtattacacgaatattctactgttgatggtattcaggaagatgttgttgacattttgctgaatattaaaggtattgtgtttaaactccatggtcgtagccaagttcaacttgtgttgaagaaatcaggttcaggtgtcgtatctgccggtgatattgagttgccgcatgatgtagaaattctgaatcctggtcatgtcatttgtcatttggctgataacggtcaaattgagatggaaattaaagtagagcaaggtcgtggttatcaatctgtttcaggtcgtcaggtagttcgtgatgagaaccgtcagattggtgcaatccagttggatgcgagcttttcgcccatcagccgtgttagctttgaggttgaacctgcacgtgtagagcagcggacggatcttgataagttggttttggatatcgaaaccgacggttctattgatcctgaggaagctgtacgcagtgcggcacgtattttgattgatcagatgtctatttttgctgatttgcagggtacgcctgtggaggaggttgaagaaaaagcacctcctatcgaccctgttcttttgcgtccggtggatgatctggaattgacagtacgttcagctaattgtttgaaagctgaggatatttattatattggcgatttgattcaacgcactgaaaccgagcttcttaaaacgccgaatttgggacgtaaatctttgaatgagattaaggaagtattggcatctaaaggtttgacactgggttctaagttggaagcatggccacctgtaggcttggaaaagccttaa

SEQ ID NO: 29416 - DNA, 621 bp, Neisseria meningitidis
atggcacgttatattggccctaaatgtaagttggcacgtcgcgaaggtacggatttgtttttgaagagtgcgcgccgctctttggattctaaatgtaaaattgattccgctcccggtcagcatggtgcaaaaaaaccgcgtttgtcagactatggtttgcagttgcgtgaaaaacaaaaaatccgccgtatttatggcgtattagaacgtcagttccgtcgttatttcgcagaagctgatcgtcgtaaaggctctaccggcgagttgctgttgcagttgctggaatctcgtttggataatgtcgtttatcgtatgggtttcggttctacccgagctgaagcaagacagcttgtttctcataaggcgatagttgtgaatggacaagttgtcaatattccttctttccaagtgaaagctggtgatgttgtctcagttcgtgaaaaagccaaaaaacaggtacgtattcaagaagcattgggtttggcaactcaaatcggcttgccgggttgggtttctgtagatgcggataaacttgagggtgtgttcaaaaacatgccggatcgctcggaattgaccggtgatattaatgaacagctggtggtagagttctactctaaataa

SEQ ID NO: 29417 - DNA, 396 bp, Neisseria meningitidis
atggctaaagcaaacacagcttcacgtgtacgtaaaaaagtacgtaaaaccgtgagtgagggtattgtgcacgttcatgcatctttcaacaataccatcattacaatcactgaccgtcaaggcaatgcgttgtcttgggctacctctggcggcgctggttttaaaggttctcgtaaaagtacaccatttgcagcacaagttgcagcagaagcagctggtaaagttgcccaagagtatggcgttaaaaatttagaggttcgtattaaaggtccaggtccaggtcgtgaatcctctgtacgtgctttgaatgctcttggtttcaagattaccagcattactgacgttaccccgttgcctcataacggttgccgtccgcctaaaaaacgtcgtatttaa

SEQ ID NO: 29418 - DNA, 363 bp, Neisseria meningitidis
atggctcgtattgcaggggtaaatatccctaataacgcacacatcgtaattggtcttcaggctatttacggtattggtgctactcgtgctaaattgatttgtgaggctgcaaatattgcgcctgatactaaagcaaaagatttggacgagactcaattagatgctttgcgtgaccaagttgccaagtatgaagtagaaggtgatttgcgtcgtgaggtaactatgagtatcaagcgattgatggacatgggctgctatcgtggcttccgtcatcgtcgcggcttaccatgccgcggtcaacgcactcgtacaaatgcgcgtacccgcaaaggtccgcgtaaagcgattgctggtaagaaataa

SEQ ID NO: 29419 - DNA, 114 bp, Neisseria meningitidis
atgcgtgtacaaccatctgttaagaaaatttgccgaaattgcaagattattcgtcgaaatcgtgtagttcgtgtaatttgtactgatctccgtcacaaacagcgtcaaggttaa

SEQ ID NO: 29420 - DNA, 219 bp, Neisseria meningitidis
atggcgaaagaagatactatccaaatgcaaggtgaaattcttgaaactttacctaatgcaacatttaaagtaaaacttgagaatgaccatattgtattgggtcatatttctgggaagatgcggatgcattacattcgtatttctccgggagataaggtcacagtagagctgacaccttatgatctaactagggctcgaatcgttttcagagcaagataa

SEQ ID NO: 29421 - DNA, 1311 bp, Neisseria meningitidis
gtggctaatcaacaaacgtcatcaggttcatccaaatttggagatcttaagaaacgtcttttgtttctatttggagcattgattgtttttcgaattggtgcccatatacccgtacctggagttgatgctgttgctttagctaaattatacgaaagcgctggaaacggcatcctgggaatattgaatatgttttccggtgggtcgttagagcgctttagtatatttgcaataggaattatgccatatatttcagcttctattattgtacagctcgcttctgaaattttgccatcattgaaggctttaaaaaaagaaggggaggctggtagaaaggtaattacgaaatatactaggtatggtactgttttgttagcaattcttcaaagtctaggtgttgcatctttcgtatttcagcaaggaattgttgtaacaagttcatttgagtttcatgtttccacggtagtttctttggtaacgggaaccatgtttcttatgtggcttggggagcaaattactgaaaggggtatcgggaacggtatttctttaatcattacggcaggtattgcttcaggtattccttcgggtattgcaaagctggttacactgacgaaccaaggttctatgagcatgcttacggcgttgtttattgtatttggtgccttattattaatttatttggttgtatactttgaaagtgcacagcggaagattcctattcattatgcaaaacgccagtttaatggtagggcgggtagtcaaaatacgcatatgcctttcaagttgaatatggctggtgttattcccccaatttttgcttccagtattattctatttccatctactcttttaggttggtttggttcggctgatacaaatagtgttttgcacaaaatagctggattgttacaacacggtcaattgctgtatatggctttatttgcagcgacagttattttcttttgttatttttatacggctttggtttttagccctaaagaaatggcagagaatttaaaaaagagtggtgcttttgttcctgggattagacctggtgagcagacctctaggtatttagaaaaagttgtattacgtttgacattgtttggagctctttatattacaactatttgtttaattccagagttcttaactacggttttaaatgtacctttttatttgggtggcacgtctttgttgattctagttgttgtaacgatggattttagtacacaaataaattcgtataggcttactcaacagtatgataagttaatgactcgttcagaaatgaaatcattttctcggaaatag

SEQ ID NO: 29422 - DNA, 435 bp, Neisseria meningitidis
atgtttttgaatacaattcaacctgctgttggtgctacgcatgctggtcgtcgtgttggacgcggtattggtagtggtcttggcaaaacgggtggtcgtggtcataaaggtcaaaagagccggtctggtgggtttcataaggtgggtttcgagggtggtcaaatgcccttgcaacgacgcctccctaaaagaggttttaaatctttaacagcatcagctaatgcacagcttcgtttaagtgaactggaatcaattgctgttaatgagattgatattttggtcttaaagcaagcgggtctgattgcatctacagtctctaatgttaaagttattgcttttggtgaaatttctaaggcagttgctttgaagggtattaaagttaccaaaggtgcgagagctgctatcgaggctgttggtggtaagattgaaatgtaa

SEQ ID NO: 29423 - DNA, 186 bp, Neisseria meningitidis
atggctgaacaaaaaaagattagggttacattggttaaaagcctgattggtacaattgaatctcatcgtgcatgtgcacgcggtttaggtttgcgtcgtcgcgagcatacggtagaggttttagatacccctgaaaaccgtggtatgattaataaaatcagctacttgttgaaagtggagtcttga

SEQ ID NO: 29424 - DNA, 519 bp, Neisseria meningitidis
atggcaaaacatgaaattgaagaacgcggtgacggtctgattgaaaagatggtcgcagttaaccgtgtaaccaaagtagttaaaggtggtcgcattatggctttctctgcgctaactgttgttggtgatggagatggtcgtattggtatgggtaaaggtaagtcaaaagaagtgcctgttgcagtccaaaaggcgatggatcaagcacgacgctctatgattaaggtaccattaaaaaatggtacgattcatcatgaggttattggtcgacatggtgctactaaagtatttatgcagcctgctaaagagggtagtggcgtaaaagccggtggacctatgcgtttggtttttgatgctatgggcattcataatatctccgccaaagtgcacggatctactaacccatataatatcgtacgtgcaacattagatggtttgtctaagttgcatactcctgctgatatcgcagccaaacgtggcttgacagtggaagacattttgggagttaaccatggctga

SEQ ID NO: 29425 - DNA, 354 bp, Neisseria meningitidis
atggataaacatacaacccgactccgtcgtgcacgcaaaacccgtgctcgtattgcggacttgaaaatggtaagattatgtgtgttccgaagcaataatcatatttatgctcaagtaattagtgctgaaggtgataaagtattggctcaagcctctacattggaagctgaggtgcgcggtagtctgaaatctggaagcaatgttgaagcagctgcaatagttggtaaacgtatcgctgagaaggctaaagcagcaggtgtagaaaaggttgcttttgatcgttcaggtttccaatatcacggtcgtgtgaaggctttggctgaagctgctcgtgaaaatggtttaagcttctaa

SEQ ID NO: 29426 - DNA, 534 bp, Neisseria meningitidis
atgtcacgtgtcgcaaaaaacccagtgactgttcccgctggtgtagaagtaaaatttggaacagaggcattagttattaagggtaagaacggtgaattgtcttttcctttgcattctgatgtagccattgaatttaatgatggcaaattgacttttgttgcgaataacagcagtaaacaagcaaatgcaatgtctggtactgctcgcgcattagtcagcaatatggttaaaggtgtttcagaaggttttgagaaaagattgcaattgataggtgtgggttatcgtgctcaagcacaaggtaaaatcttgaatctgtctttgggtttttctcatccgatcgtatatgaaatgcctgaaggtgtctccgttcaaactcctagccaaacagagattgttttaaccggctcggataaacaagttgttggtcaagttgctgctgagattcgtgcgttccgtgctcctgagccttataagggtaaaggtgttcgctatgtaggcgaagtagtggtaatgaaagaagccaagaaaaaataa

SEQ ID NO: 29427 - DNA, 393 bp, Neisseria meningitidis
atgagtatgcatgatcctatttccgatatgttgactcgtatccgcaatgcgcaacgtgctaataaagcagcggttgcaatgccttcttcaaaattaaagtgtgctattgcaaaggtattgaaagaagaaggatatattgaggacttcgcagtttcatctgacgtaaagtctatattggaaattcaattaaaatactatgcaggtcgtcctgtaattgaacaaatcaagcgtgtatctcgccctggtttgcgtatttataaagcgtctagtgagattccaagtgttatgaatggcttgggtattgctattgttagtacttctaaaggtgtaatgactgatcgtaaagcacgttctcaaggtgttggtggtgagttgttatgcattgtagcctag

SEQ ID NO: 29428 - DNA, 306 bp, Neisseria meningitidis
atggctaagaaagcacttattaatcgtgatctgaaacgtcaagctttggctaaaaaatatgcggctaaacgcgcggcaattaaagcggtaatcaatgattcgaatgcaactgaggaagagcgttttgaggctcgtttgaggtttcaatccattcctcgtaatgcggcacctgtgcgtcaacgtcgtcgttgtgctttgacaggtcgccctcgtggtactttccgtaaatttggtttgggtcgtattaaaatccgtgaaatcgccatgcgtggcgaaattccgggtgttgttaaagccagctggtaa

SEQ ID NO: 29429 - DNA, 540 bp, Neisseria meningitidis
atggctcggttgagagagttttataaagagacagttgttcctgaattggttaaacaatttggttacaaatcagtaatggaagtcccgcgtattgaaaaaatcaccttgaatatgggtgtgggtgaggctattgctgataaaaaagttatggaacatgctgtttccgatttagagaaaattgccggtcaaaaaccggttgttactgttgcccgtaaatctatcgcaggttttaaaatccgtgataactatccggttggttgcaaagtaacattgcgtcgtgatcaaatgtttgaattcttggatcgtttgattactattgcattacctcgcgtacgtgacttccgtggtgtgagcggtaaatcatttgatggccgtggcaattacaatatgggtgttcgtgagcaaattatttttccggaaattgaatacgataaaattgatgctttgcgtggtttgaatattactattactactacagcaaaaaccgatgaggaagcgaaagctttattgtcattgtttaaatttccgttcaaaggataa

SEQ ID NO: 29430 - DNA, 324 bp, Neisseria meningitidis
atgaataaaatcattaaaggcgatagggttgtagtaattgctggtaaggataaaggtaagcagggtcaagtagttcgagtgttgggtgataaagttgttgttgagggcgttaatgttgtaaaacgccatcaaaaacctaatccaatgcgtggcattgagggcggtattattactaaagaaatgcctttggatatttctaatatcgcaatcctgaatccggaaactaataaagcggaccgtgttggtattaagctgattgaaaatgaaggcaaagttaaacgcgttcgtttcttcaaatcaaatggctctatcattggggcataa

SEQ ID NO: 29431 - DNA, 369 bp, Neisseria meningitidis
atgattcaaatgcagaccatcttagatgtggctgataactctggtgcgcgtcgcgtaatgtgtatcaaggtattgggcggatctaagcgtcgctacgcttctgttggcgatattattaaagtggcagttaaagatgcggctccgcgtggccgtgtcaaaaaaggcgatgtatataatgcggtagttgttcgtactgctaagggtgtacgtcgtcctgatggtgcgttaattaaattcgataacaatgccgccgtgttactgaataataaacttgaacctttgggtactcgtatctttggtccggtaacccgtgaattgcgtactgagcgatttatgaaaatcgtttcattggcacctgaagtattataa

SEQ ID NO: 29432 - DNA, 264 bp, Neisseria meningitidis
atgagcgaaactaaaaatgttcgtactttgcaaggcaaagtagtaagcgacaaaatggataaaaccgtaacagtattggttgagcgtaaagtaaaacatccgctgtatggtaagattattcggttatctactaaaatccatgcccatgatgaaaataatcaatatggaattggtgatgtggttgttatatcggaatcccgtccattgtcaaaaactaaatcttgggttgtcagtgagctggttgagaaagcacgttctatttaa

SEQ ID NO: 29433 - DNA, 192 bp, Neisseria meningitidis
atgaaagcaaatgaattgaaagacaaatccgttgagcagttgaatgcagatttgttggacttgttgaaagctcagtttggcttacgtatgcaaaacgctaccggtcaattaggcaaaccaagtgaattgaaacgtgtacgtcgcgatattgctcgtattaaaaccgttttaactgaaaaaggtgctaagtaa

SEQ ID NO: 29434 - DNA, 417 bp, Neisseria meningitidis
atgctgcagccaactagactgaaataccgtaagcaacaaaagggtcgcaatactggcatcgctactcgcggtaataaggtaagtttcggtgagttcggcttgaaagccgtaggtcgtggtcgtttgactgcccgtcaaatcgaagctgctcgtcgtgcaatgacccgtcatatcaaacgtggtggtcgtatttggattcgtgtattccctgataaaccgattactgaaaagcctattcaagttcgtatgggtggcggtaaaggtaacgtggaatattacattgccgaaattaaaccaggtaaagtgttgtatgaaatggatggcgttccagaggaactggctcgtgaagcattcgagttggctgctgccaaattgcctattcctacaacctttgtagtaagacaggtgggtcaataa

SEQ ID NO: 29435 - DNA, 693 bp, Neisseria meningitidis
atgggacaaaagattaaccctacaggctttcgcctggcggtaactaaagactgggcttcaaaatggtttgctaaaagcaccgacttttctactgttttgaagcaggatatcgatgttcgcaattatttgcgtcaaaaattggccaatgcttcggttggtcgagtggttattgaacgccctgcaaaatctgcacgcattaccattcactccgctcgtccgggtgtggttataggtaaaaaaggtgaggatatcgaggttttgaaacgtgacttgcaagtcttgatgggtgtacctgttcatgtaaatattgaagagattcgccgtcctgagttggatgctcaaattattgctgacggtattgcccagcagttggaaaagcgcgttcaattccgtcgtgctatgaaacgagcaatgcaaaatgcaatgcgttctggtgctaaaggcattaagattatgacttcaggccgtctgaatggtgcggatattgcccgtagcgaatggtatcgtgaaggtcgcgtgccactgcatactttacgtgcaaatgtagattatgcaaccagcgaagcgcacaccacatatggtgtattgggtctgaaagtttgggtttatacggaaggcaatattaaatcttccaaacctgaacatgagagtaaacaaagaaaggcaggtagacgtaatgctgcagccaactag

SEQ ID NO: 29436 - DNA, 330 bp, Neisseria meningitidis
atgagagtaaatgcacaacataaaaatgcccgtatctctgctcaaaaggctcgtttggtagctgatttgattcgtggtaaagacgttgcccaagctttgaatattttggctttcagtcctaaaaaaggtgccgagctgattaaaaaagtattggagtcagctattgctaatgccgagcacaataacggtgcggacattgatgaactgaaagtggtaactatctttgttgacaaaggcccaagcttgaaacgttttcaagctcgcgccaaaggtcgcggtaaccgcatcgaaaaacaaacttgtcatatcaatgtgacagtgggtaactaa

SEQ ID NO: 29437 - DNA, 279 bp, Neisseria meningitidis
atggctcgttcattgaaaaaaggcccatatgtagacctgcatttgctgaaaaaagtagatgctgctcgcgcaagcaacgacaaacgcccgattaaaacctggtctcgtcgttctaccattctgcctgattttatcggtctgaccattgctgtgcacaacggccgcacccatgtgcctgtgtttatcagcgacaatatggttggtcataaattaggcgaattctcattgacccgtacctttaaaggccacttggccgataaaaaggctaaaaagaaataa

SEQ ID NO: 29438 - DNA, 834 bp, Neisseria meningitidis
atggcaatcgttaaaatgaagccgacctctgcaggccgtcgcggcatggttcgcgtggtaacagaaggtttgcacaaaggtgcaccttatgcgcccttgcttgaaaagaaaaattctactgccggccgtaacaataatggtcatatcaccacccgtcacaaaggcggcggtcataaacaccattaccgtgttgtagactttaaacgtaacaaagacggcattcctgccaaagtagagcgtatcgaatacgatcctaaccgtactgccttcatcgcactgttgtgctatgcagacggcgagcgtcgttacatcattgctcctcgcggtattcaagccggtgctgtattggtttccggtgctgaagctgccatcaaagtaggcaacaccctgccgattcgcaacattcccgttggtacgactatccactgtatcgaaatgaaacccggtaaaggtgctcaaatcgcacgttctgccggtgcttctgcggtattgctggctaaagaaggcgcgtacgctcaagtccgtctgcgctctggcgaagtccgtaaaatcaacgtaaattgccgtgcgaccattggtgaagttggtaacgaagagcaaagcctgaaaaaaatcggtaaagccggtgccaaccgttggcgcggtattcgtccgaccgtacgcggtgttgtcatgaatcctgtcgatcacccgcatggtggtggtgaaggccgtacgggcgaggcccgcgaaccggtcagcccatggggtactcctgctaaaggctaccgcactcgtaataacaaacgcacggataacatgattgttcgtcgccgttactcaaataaaggttaa

SEQ ID NO: 29439 - DNA, 321 bp, Neisseria meningitidis
atgggtatgaatcaacaacgtttgactcaagtgattttggcacctatcgtttctgaaaaaagcaacgtattggctgaaaaacgcaaccaaatgacgtttaaagtcttggcaaatgcaaccaaacctgaaatcaaagctgctgttgagctgctgtttggtgttcaagttgcttctgtaactaccgttacaactaaaggcaaaactaagcgttttggtcgtactttgggccgccgcagcgatgttaaaaaagcttatgtaagcttggctgccggtcaagagttggatttggaagccgctgctgcagctgcagataaggaataa

SEQ ID NO: 29440 - DNA, 621 bp, Neisseria meningitidis
atggaattgaaagtaattgacgctaaaggacaagtttcaggcagcctgtctgtttctgatgctttgttcgcccgcgaatacaatgaagcgttggttcatcagctggtaaatgcctacttggcaaacgcccgctctggtaaccgtgctcaaaaaacccgtgccgaagtaaaacactcaaccaaaaaaccatggcgtcaaaaaggtaccggccgcgcccgttccggtatgacttcatctccgctgtggcgtaaaggtggtcgcgcgttcccgaacaaacccgacgaaaacttcactcaaaaagtaaaccgcaaaatgtaccgtgccggtatggcgactattctgtcccaattgactcgtgacgagcgtttgtttgcgattgaggcgttgactgctgaaactcctaaaaccaaagtttttgctgaacaagtgaaaaatctgggtctggagcaagtgttgtttgtaaccaaacagctcgacgagaatgtttacttggcttcacgcaacttgccaaacgtgttggttttggaagctcaacaagttgatccttacagcttgctgcgttacaaaaaagtaatcatcactaaagatgcagttgcacaattagaggagcaatgggtatga

SEQ ID NO: 29441 - DNA, 645 bp, Neisseria meningitidis
atgactttaggtctggttggacgcaaagttggtatgacccgcgtgttcgacgaacagggtgtttctgttccggtaaccgttttggatatgtctgccaaccgcgttacacaagtaaaatccaaagatactgacggctatactgccgttcaagttacctttggtcagaaaaaagccaatcgtgtcaacaaagccgaagccgggcactttgcaaaagcaggtgttgaagccggtcgcggtttgattgagtttgctttgactgaagaaaaactggctgaattgaaagctggtgacgaaatcaccgtttctatgtttgaagtcggtcaactggtcgatgtaaccggtacctctaaaggtaaaggtttctccggcacgatcaaacgtcataacttcggtgcccaacgtacttcccacggtaactcccgttctcaccgtgttccaggctctatcggtatggcgcaagacccgggtcgcgtgttccccggtaaacgcatggccggccaatacggcaacaccaaagcaactgttcaaaaattggaagttgtccgtgttgatgcagaacgccaactgctgttggttaagggtgctgttccgggtgcggtcaacagcgatgttgtagttcgtcccagcgtgaaagtaggtgcgtaa

SEQ ID NO: 29442 - DNA, 1056 bp, Neisseria meningitidis
atgatgttttattctcaagtaaataaaggaaagatgatgagcttacttaatgtctttaaagatattttaaacaacaaagaattgaattcggaagaacggcatgatttggagcgggcggttaagatcttgcaggatacgcatgtcaatattttgattaccggagccaccggttgcggaaaatcatccaccatcaatgccttgttcagcatagatcaggcaacgggaaagagtgatggactagtaaaggaagtcgcaaaagtaggcgtgggtgtagatcctgaaactatggatattgccaaatatgaattggagaatatgacgatttgggatagtccgggcttgggcgacggagagaaggcagaccaaaagcaccggcgcaatatcatcaataagctgctggagaaagacagtaacggcaatgccgtcatcgacttggttttggtgctgcttgacggcggctccagagacttggggacatcatacgaactgattaacaatgtaatcatcaatacattgaagaagagtggggaaggccgtacagaccggttgctggttgcgattaatcagtgtgatatggcgatgaaggggcggaattgggatgcggaagccggccgtccgaacgccgccttggaaaactttttggaggagaaagtgtgttcgacacgcaagcgcattcaggaagctaccggcgttacggtcaatccgatttatttttcagcaggctttaagagtgaggatgaggagcagcgtccctataacataacccgcctgttgcgttacatcattacggctatgccgtctgaaaaacgggtgattgtggcagagaagattaatgtggaagaaatcgaacgagataccagccgccgcaaacaggaggagcggcaagaaatcgacagtagtatcggcagtgcgctggagaaaatattgggggctgcgggaggcgtggttaaagatgttgtttcaacgatagcaagcggtgtcgggacgctgatcggcggtgctgcaaaagcgattggaggggcgattagcacggttgcttctttttttggctggtag

SEQ ID NO: 29443 - DNA, 312 bp, Neisseria meningitidis
atggcaaaccaaaaaatccgtatccgcctgaaagcttatgattacgccctgattgaccgttctgcacaagaaatcgttgaaactgcaaaacgtaccggtgcagttgtaaaaggcccgattcctttgccgaccaaaatcgaacgtttcaacattctgcgttctccgcacgtgaacaaaacttcccgtgaacaattggaaatccgcacccacttgcgcctgatggacatcgtggattggaccgacaaaactaccgatgcgctgatgaagctggatttgccggccggtgttgatgtagaaatcaaagtccaataa

SEQ ID NO: 29444 - DNA, 1185 bp, Neisseria meningitidis
atggctaaggaaaaattcgaacgtagcaaaccgcacgtaaacgttggcaccatcggtcacgttgaccatggtaaaaccaccctgactgccgctttgactactattttggctaaaaaattcggcggtgctgcaaaagcttacgaccaaatcgacaacgcacccgaagaaaaagcacgcggtattaccattaacacctcgcacgtggaatacgaaaccgaaacccgccactacgcacacgtagactgtccggggcacgccgactacgttaaaaacatgattaccggcgcagcacaaatggacggtgcaatcctggtatgttccgcagccgacggccctatgccgcaaacccgcgaacacatcctgctggcccgtcaagtaggcgtaccttacatcatcgtgttcatgaacaaatgcgacatggtcgacgatgccgagctgttggaactggttgaaatggaaatccgcgacctgctgtccagctacgacttccccggcgacgactgcccgatcgtacaaggttccgcactgaaagccttggaaggcgatgccgcttacgaagaaaaaatcttcgaattggctgctgcattggacagctacatcccgactcccgagcgtgccgtggacaaacctttcttgttgcctatcgaagacgtattctctatttccggtcgtggtacagtagtaaccggtcgtgtagagcgcggtatcatccacgtcggtgacgagatcgaaatcgtcggtctgaaagaaactcaaaaaaccacttgtaccggtgttgaaatgttccgcaaactgctggacgaaggtcaagcaggcgacaacgtaggcgtattgctgcgcggtaccaaacgtgaagacgtagagcgtggtcaagtattggctaaaccgggtacaatcactcctcacaccaagttcaaagcagaagtatacgtactgagcaaagaagagggcggccgccataccccgttcttcgccaactaccgtccccaattctacttccgtaccaccgacgtaaccggcgcggttactttggaagaaggtgtggaaatggtaatgccgggcgagaacgtaaccatcaccgtagaactgattgcgcctatcgctatggaagaaggtttgcgctttgcgattcgcgaaggcggccgtaccgtgggtgccggcgtggtttcttctgttatcgcttaa

SEQ ID NO: 29445 - DNA, 2106 bp, Neisseria meningitidis
atggctcgtaagaccccgatcagcctgtaccgtaacatcggtatttccgcccatatcgatgcgggtaaaaccacgacgacagaacgtattttgttctataccggtttgacccacaagctgggcgaagtgcatgacggtgcggctactaccgactacatggaacaagagcaagagcgcggtattaccattacctccgctgccgttacttcctactggtccggtatggcgaaacaattccccgagcaccgcttcaacatcatcgacaccccgggacacgttgactttaccgtagaggtagagcgttctatgcgtgtattggacggcgcggtaatggtttactgcgcggtgggcggtgttcaaccccaatctgaaaccgtatggcggcaagccaacaaataccaagtgccgcgcttggcgtttgtcaataaaatggaccgtcagggtgccaacttcttccgcgttgtcgagcaaatgaaaacccgtttgcgcgcaaaccctgtacctatcgtcattccggttggtgcggaagacaacttcagcggtgtggttgatttgttgaaaatgaaatccatcatttggaatgaagccgataaaggtacaacctttacctatggcgatattcctgccgaattggtcgaaactgccgaagaatggcgtcaaaatatgattgaagccgcagccgaagccagcgaagaactgatggacaaatacttaggcggcgacgagctgaccgaagaagaaatcgtaggcgcgttgcgtcaacgtactttggcaggcgaaattcagcctatgctgtgtggttctgcatttaaaaacaaaggtgttcaacgtatgttggacgcagttgtagaattgctgccagctcctaccgatattcctccggttcaaggtgtcaacccgaataccgaggaagccgacagccgtcaagccagcgatgaagagaaattctctgcattggcgttcaaaatgttgaacgacaaatacgtcggtcagctgacctttatccgcgtttactcaggcgtagtaaaatccggcgataccgtattgaactccgtaaaaggcactcgcgaacgtatcggtcgtttggtacaaatgactgccgcagaccgtactgaaatcgaagaagtacgcgccggcgacatcgcagccgctattggtctgaaagacgttactaccggtgaaaccttgtgtgcggaaagcgcgccgattatcttggaacgtatggaattccccgagccggtaatccatattgccgttgagccgaaaaccaaagccgaccaagagaaaatgggtatcgccctgaaccgcttggctaaagaagacccttctttccgtgtccgtacagacgaagaatccggtcaaaccattatttccggtatgggtgagctgcacttggaaattattgttgaccgtatgaaacgcgaattcggtgtggaagcaaatatcggtgcgcctcaagtggcttaccgtgaaactatccgcaaagccgttaaagccgaatacaaacatgcaaaacaatccggtggtaaaggtcaatacggtcacgttgtgattgaaatggaacctatggaaccgggtggtgaaggttacgagtttatcgatgaaattaaaggtggtgtgattcctcgcgaatttattccgtctgtcgataaaggtatccgcgatacgttgcctaacggtatcgttgccggctatcctgtagttgacgtacgtatccgtctggtattcggttcttaccatgatgtcgactcttcccaattggcatttgaattggctgcttctcaagcgtttaaagaaggtatgcgtcaagcatctcccgccctgcttgagccgattatggcagttgaagtggaaaccccggaagaatacatgggcgacgtaatgggcgacttgaaccgccgtcgcggtgttgtattgggtatggatgatgacggtatcggcggtaaaaaagtccgtgccgaagtacctctggcagaaatgttcggttattcgaccgacctgcgttctgcaacccaaggccgcgctacttactctatggagttcaagaaatattctgaagctcctgcccacatagctgctgctgtaactgaagcccgtaaaggctaa

SEQ ID NO: 29446 - DNA, 471 bp, Neisseria meningitidis
atgccaagacgtagagaagtccccaagcgcgacgtactgccagatcctaaattcggcagcgtcgagttgaccaaattcatgaacgtattgatgattgacggtaaaaaatccgttgccgagcgtatcgtttacggtgcgttggaacagattgagaaaaaaaccggcaaagtagcaatcgaagtatttaacgaagccattgcaaacgccaaacctatcgtggaagtgaaaagccgccgtgtaggtggtgcaaactaccaagttcctgttgaagttcgtccttcacgccgtttggctttggcaatgcgctgggttcgcgatgcggcccgcaaacgtggtgagaaatccatggacctgcgtttggcaggcgaattgattgatgcgtccgaaggccgtggcggtgcgttgaaaaaacgtgaagaagtacaccgtatggctgaagccaacaaagcattctctcacttccgtttctaa

SEQ ID NO: 29447 - DNA, 372 bp, Neisseria meningitidis
atgccaactatcaaccaattggtacgcaaaggccgtcaaaagcccgtgtacgtaaacaaagtgcccgcactggaagcctgcccgcaaaaacgcggcgtgtgcacccgtgtatacacgactacccctaaaaaacctaactctgcattgcgtaaagtatgtaaagtccgcctgaccaacggttttgaagtcatttcatacatcggcggcgaaggccacaacctgcaagagcacagtgtcgtattgattcgcggcggtcgtgtaaaagacttgccaggtgtgcgttaccacactgtacgcggttctttggatactgcaggtgttaaagaccgtaaacaagcccgttccaaatacggtgctaagcgtcctaaataa

SEQ ID NO: 29448 - DNA, 4176 bp, Neisseria meningitidis
atgaatttgttgaacttatttaatccgttgcaaactgccggcatggaagaagagtttgatgccatcaaaatcggtattgcctctcccgaaaccatccgctcatggtcttatggcgaagtcaaaaaacctgaaaccatcaactaccgtacgttcaaacctgagcgtgacggtttgttctgtgccaaaatctttggcccggtcaaagactacgaatgcttgtgcggaaaatacaaacgcttgaaatttaaaggtgtaacttgtgaaaaatgcggcgtggaagtaaccctgtccaaagtgcgccgcgaacgcatgggccatatcgaattggctgcgcccgtcgcacatatttggttcttaaaatccctgccttcccgcttgggtatggtgttagacatgactttgcgcgatatcgaacgcgtattgtactttgaagcatttgtggtaaccgatcccggtatgactccgctgcaacgccgccaattgctgactgaagacgattactacaacaagctggacgaatacggcgacgatttcgatgccaaaatgggtgcggaaggtatccgcgaattgctgcgtaccctgaatgtagcgggcgaaatcgaaatcctgcgccaagagttggaatcgaccggttccgacaccaaaatcaaaaaaatcgccaaacgcttgaaagtattggaagctttccatcgttccggtatgaaactggaatggatgattatggatgtgctgccggtattgccgcctgatttgcgtccgttggttccattggatggtggtcgttttgccacttccgatttgaacgatttgtaccgccgcgttattaaccgtaacaaccgtctgaaacgtctgttggaactgcatgctcctgacatcatcgtccgcaacgaaaaacgtatgttgcaagaagcagttgactcgctgttggataacggccgtcgcggtaaagccatgaccggcgccaacaaacgcccgctgaaatcattggcagacatgattaaaggtaagggtggccgcttccgtcaaaacctgctgggcaaacgtgtggactactccggccgttccgtgattaccgtaggcccgtacctgcgtctgcaccaatgcggtttgccgaaaaaaatggctttggaactgttcaaaccgttcattttccacaaattggaaaaacaaggtttggcctctaccgttaaagcagcgaaaaaattggtagagcaagaagtaccggaagtatgggacatcttggaagaagtcatccgcgaacatccgattatgctgaaccgtgcgccgaccctgcaccgtttgggtattcaagcgttcgaacctatcttgattgaaggtaaagcgattcagttgcacccattggtgtgtgctgcgttcaacgccgactttgacggcgaccaaatggcggtacacgttccattgagcttggaagcacaaatggaagcacgcacgctgatgctggcttcaaacaacgtattgtctcctgccaacggcgaaccgattatcgtaccttcccaagacatcgtattgggcctgtactacatgacccgcgaccgtatcaatgccaaaggcgagggcagcctgtttgccgatgtgaaagaagtgcatcgcgcataccataccaaacaggttgaactgggtacgaaaattaccgtacgtctgcgcgaatgggtgaaaaacgaagcaggtgagtttgagcctgtcgttaaccgttacgaaacaaccgtcggccgtgcattgttgagcgaaatcctgccgaaaggcctgccgtttgaatatgtcaacaaagcgttgaagaaaaaagaaatttctaaactgattaacgcatcgttccgcctgtgcggcttgcgcgatacggttatctttgctgaccacctgatgtacaccggtttcggatttgcggcaaaaggcggtatttccattgccgttgacgatatggaaattccaaaagaaaaagcggccttgctggctgaagccaatgccgaggttaaagaaatcgaagaccaataccgtcaaggtttggttaccaacggcgaacgctacaacaaggtggtcgatatttggggtcgtgccggcgataagattgctaaagcgatgatggacaacttgtccaaacaaaaagttatcgaccgtgacggcaacgaagtcgatcaagagtcattcaactccatttatatgatggcggactccggtgcccgtggttctgcagctcagattaaacagttgtccggtatgcgtggcttgatggcaaaacctgacggctcgattattgaaacgccgattacctcaaacttccgtgaaggtctgaccgtattgcaatactttattgcgacccacggtgcgcgtaagggtttggcggataccgcattgaaaaccgcgaactccggttacctgactcgtcgtctggtagacgtaactcaagatttggtcgttgttgaagacgattgcggtacttcagacggctttgtcatgaaggcagtggtacaaggcggtgatgtgattgaagcattgcgcgatcgtattttgggtcgtgttaccgcgtctgacgttgtcgatccgtcaagtggcgaaaccttggttgaagccggtacgttgctgactgaaaaactggtggatatgatcgaccaatccggtgtcgatgaagtcaaagtccgtacgccgattacttgtaaaacccgtcacggcctgtgtgcacactgttacggtcgtgacttggcacgcggcaaactggttaacgccggtgaggcagtcggtgtgattgctgcacaatccattggcgaaccgggtacccagttgaccatgcgtacgttccacatcggtggtgcggcatcccgtgcggcagcagccagccaagtggaagccaaatccaacggtacggcacgattcagcagccagatgcgctacgttgccaacaacaaaggcgagttggttgtcatcggccgttcttgtgaagtcgtgattcacgacgatatcggccgtgaacgcgaacgccacaaagtaccttacggtgccatcctgctggtacaagacggtatggccattaaagccggtcaaaccttggcaacctgggatccgcatacccgtccgatgattaccgaacacgcaggtatggtgaaattcgaaaacgtggaagagggcgttaccgttgccaaacaaaccgatgatgtaaccggtttgtccactttggtggtgattgacggtaaacgtcgttcctctagtgcttccaaactgctgcgtccgactgtgaaactcttggacgaaaacggcgtggaaatctgtattcccggtacgtccactccggtttcgatggcattccccgttggtgcggtgattaccgtacgcgaaggtcaggaaatcggtaaaggcgacgtattggcgcgtatcccgcaagcctcttccaaaacccgcgacattaccggtggtctgccgcgcgttgccgaattgtttgaagcacgcgtgccgaaagatgccggtatgttggcggaaattaccggtaccgtttccttcggcaaagagaccaaaggcaagcaacgtctgattgttactgacgtggacggtgtagcatacgagaccttgatttccaaagagaaacaaattctggtacacgacggtcaagtggtaaaccgcggtgaaaccatcgtggacggagctgttgatccgcatgatattctgcgtttgcaaggtatcgaagcactggcacgctacattgtccaagaggtgcaagaggtttaccgtctgcaaggtgtgaagatttctgataaacacatcgaagtcatcatccgtcaaatgttgcgccgtgtgaacattgcggatgccggcgaaaccgggttcattaccggagagcaggtcgaacgcggcgatgtgatggcggccaatgaaaaagctttggaagaaggcaaagagccggcacgttacgaaaacgtattgctgggtattaccaaagcctccctgtccaccgacagtttcatttctgccgcatcgttccaagaaacgacccgtgttctgaccgaagccgcgattatgggcaaacaagacgaactgcgcggtttaaaagagaacgtcatcgtcggccgcctgattcctgccggtaccggtttgacttatcaccgcagccgtcatcagcaatggcaaggggtagagcaggagactgctgaaacccaagtaacggatgaataa

SEQ ID NO: 29449 - DNA, 4179 bp, Neisseria meningitidis
atgagctattcgtttaccgagaaaaaacgtatccgtaagagttttgcaaagcgggaaaatgttttggaagttcctttcttgctggcaacccaaattgattcttatgcgaagtttttgcagctggaaaatgcttttgacaaacgtaccgatgacggtctgcaggcggcatttaattctattttcccgattgtgagccataacggttatgcgcgattggagtttgtgcattacacattgggcgagcctttgttcgatattcccgaatgtcagttgcgcggaatcacttatgcagcccccttgcgcgcgcgtatccgtttggtgattttggataaggaagcatctaaaccgacggtaaaagaagttcgtgaaaacgaagtgtatatgggcgaaattccgttgatgaccccgagcggttcttttgtgattaacggcacagagcgtgtgattgtttcccagttgcaccgttcgcccggcgtgtttttcgagcatgacaaaggtaagacgcactcttccggcaaattgttattctccgcccgcatcattccctaccgtggttcatggttggattttgaatttgatccgaaagatttgctgtatttccgtatcgaccgccgccgtaaaatgccggtaacgattttgttgaaggctttgggctacaacaatgagcaaatcttggatattttctacgacaaagaaacgttctatttgtcttcaaacggtgttcaaaccgatttggtcgcaggccgtctgaaaggcgaaactgccaaggtcgatatcttggataaagaaggcaatgtattggttgccaaaggtaagcgcattactgcgaaaaatatccgtgatattaccaatgcaggcctgacccgtttggatgtagaaccagaaagcctgctgggcaaagcattggctgccgacctgattgattcggaaaccggcgaggtattggcttctgccaatgatgaaattacagaagagttgttggccaaatttgatatcaacggcgtaaaagaaattacgaccctttacatcaatgagttggatcagggtgcttatatctccaataccttgcgtacggatgagactgccggccggcaggcggcgcgtgttgcgatttaccgtatgatgcgtccgggcgaaccgcccactgaagaggcggtcgagcaattgtttaaccgcttgttcttcagtgaagacagctacgatttgtcccgcgtaggccgtatgaaatttaatacgcgcacatacgaacaaaaactgtccgaagcccaacaaaactcttggtacggccgcctgctgaacgaaacgtttgccggtgctgccgacaaaggcggttatgtcctgagcgtcgaagatattgtcgcctcgattgcgactttggtcgagttgcgtaacggccatggcgaagtggacgatatcgatcacttgggcaaccgccgagtacgttcggtaggcgagctgactgaaaaccaattccgtagcggtttggcccgtgtggaacgtgccgtaaaagaacgtttgaatcaggcggaatcagaaaacttgatgccgcacgatttgattaatgcaaaacctgtttctgctgctattaaagaattcttcggctccagccaattgagtcagtttatggatcagaccaatcccttgtctgaagtaacccataaacgccgcgtatccgcattgggtccgggcggtttgacccgcgaacgtgcaggatttgaggtgcgggacgtgcatccgacccactacggccgcgtatgtccgattgaaacgcctgaaggtccgaacatcggtttgatcaactcactgtccgtttatgcgcgcaccaatgattacggtttcttggaaacgccttaccgccgcgttatcgacggcaaagtaaccgaggaaatcgattacttgtctgccatcgaagaaggccgctatgtgattgcacaggcgaatgccgatttggattcagatggcaatctgattggcgatttggttacctgtcgtgaaaaaggcgaaaccattatggcaacgcccgaccgcgtccaatatatggacgtggcaaccggccaggtggtatccgttgcggcatccctgattccgttcttggaacacgatgacgcgaaccgcgcattgatgggtgccaacatgcaacgtcaggcagtgccttgcctgcgtcctgaaaaaccgatggtcggtaccggtatcgagcgttccgttgccgttgactctgccactgcgatcgttgcccgccgaggcggtgtggttgagtatgtcgatgccaaccgcgtcgtcgttcgtgttcatgatgatgaagcgactgctggcgaagtgggtgtcgatatttacaacttggttaaattcacccgttccaaccaatctaccaacatcaaccaacgtccggccgtcaaagccggcgatgtgttgcaacgcggcgacttggtggccgacggtgcgtctaccgacttgggcgaattggctttgggtcaaaacatgaccatcgccttcatgccatggaacggttacaactatgaagactcgattctgatttcagaaaaagtggctgcggatgatcgttacacttcgattcacattgaggaattgaatgtcgttgcccgcgataccaagctgggtgcggaagacattacccgcgatattccgaacttgtccgagcgtatgcaaaaccgcttggacgaatccggtatcgtttacatcggtgcagaagtagaagccggcgatgtgttggtaggcaaagtaacgcctaaaggcgaaacccagctgacgccggaagaaaaactgttgcgcgccatcttcggcgaaaaagcgtctgacgtaaaagatacttcattgcgtatgcctaccggtatgagcggtacggttatcgacgttcaagtcttcactcgtgaaggtattcaacgcgacaaacgcgcccaatccattatcgattccgagttgaaacgctaccgtttggatttgaacgaccaattgcgtattttcgacaacgacgcattcgaccgtatcgaacgtatgattgtgggtcaaaaagccaatggtggtccgatgaagctggctaaaggcagcgaaattactaccgaatatttggcgggtctgccgagcaggcacgattggttcgatatccgtctgaccgatgaagatttggccaagcagttggaactgattaaagtgagcctgcaacaaaaacgcgaagaagcggacgagttatacgaaatcaagaagaaaaaactgacccaaggcgacgaattgcaacccggcgtacaaaaaatggtgaaagtttttatcgccatcaaacgccgtctgcaagccggcgacaaaatggcgggccgccacggtaacaaaggcgtggtatcgcgcattctgccagtggaagacatgccttacatggcggacggccgtccggtagacatcgtactgaacccattgggcgtaccttcccgtatgaacatcggtcagattttggaagttcacttgggttgggcagcaaaaggtatcggcgagcgtatcgaccgtatgctgaaagagcaacgcaaagcaggcgagttgcgcgagttcttgaacagactctacaacggcagcggtaagaaagaagatttggatgccctgactgatgaagaaatcatcgaactggcctccaacctgcgcaaaggtgcatctttcgcctctcctgtattcgacggtgcgaaagagtctgaaatccgcgaaatgctgaacttggcttatccgagcgacgatcctgaggttgaaaaactgggcttcaacgacagtaaaacccaaatcacgctgtatgacggccgttcaggcgaagcatttgaccgcaaggttacagtaggtgtgatgcactatctgaaactgcaccacttggttgacgaaaaaatgcacgcccgttctaccggtccgtacagtctggttacccagcagcctttgggcggtaaagcccagttcggcggccaacgtttcggcgagatggaggtttgggcattggaagcatacggcgcggcatacacgctgcaagagatgttgactgtgaagtctgacgacgtgaacggtcgtaccaaaatgtacgaaaacatcgtcaaaggcgaacacaaaatcgatgccggtatgcccgagtccttcaacgtattggtcaaagagattcgctcactgggcttggatatcgatttggaacgctactga

SEQ ID NO: 29450 - DNA, 372 bp, Neisseria meningitidis
atggctattactaaagaagacattttggaagcagttggttctttgaccgtaatggaattgaacgacttggttaaagcttttgaagaaaaattcggtgtttctgctgctgctgttgcagttgcaggtcctgctggtgccggtgctgccgatgctgaagaaaaaaccgaatttgatgtcgttttggcttctgccggtgatcaaaaagtcggcgtgattaaagttgtccgtgcaattaccggtttgggtctgaaagaagctaaagacatcgttgacggtgcacctaaaaccattaaagagggtgtttctaaagctgaagccgaagacatccaaaaacaactggaagaagccggcgctaaagtcgaaatcaaataa

SEQ ID NO: 29451 - DNA, 501 bp, Neisseria meningitidis
ttgagtctcaatattgaaaccaagaaagtggcggtcgaggaaattagcgcggcaattgctaatgctcaaaccctcgtagtcgctgaatatcgcggtatcagtgtttccagtatgactgagcttcgtgcgaatgcacgtaaagaaggcgtttatttgcgcgttctgaaaaatactttggctcgtcgtgcagtgcaaggtacttcatttgcagaattggccgatcaaatggttggtccgttggtttacgctgcttctgaagatgctgttgctgctgctaaagtgttgcaccaattcgcgaaaaaagatgacaaaattgtcgttaaagccggttcttacaatggcgaagtaatgaatgctgctcaggttgctgagttggcttctattccgagccgcgaagagctgttgtccaaactgttgttcgttatgcaagctcctgtatcgggctttgcgcgcggtttggctgctttggcagagaaaaaagccggcgaagaagccgcttaa

SEQ ID NO: 29452 - DNA, 696 bp, Neisseria meningitidis
atggctaaagtatctaaacgcttgaaagctcttcgctcttctgtggaagccaataaattatatgcaattgatgaagcaattgctttggtaaaaaaagcagcgactgctaaatttgacgagtctgttgacgtatctttcaacttgggcgttgatccgcgtaaatctgaccaagttatccgtggttcagtcgttctgcctaaaggcaccggtaagataactcgcgtagctgtatttactcaaggtgcaaatgcagaagctgctaaagaagctggtgcagatatcgtcggtttcgaagatttggctgctgaaatcaaagcaggcaatctgaactttgatgtcgttattgcttctcccgatgcaatgcgtattgttggtcagttgggtactattttgggtcctcgaggcttgatgccaaaccctaaagtaggtactgttactcctaacgttgctgaagcagtaaaaaatgcaaaagcaggtcaagtacaataccgtacagataaagcaggtatcgttcatgcaacgattggtcgtgcttctttcgctgaagctgacttgaaagagaactttgatgcgttgctggatgctatcgttaaagccaagcctgctgccgctaaaggtcagtatctgaaaaaagttgctgtgtctagcaccatgggtttgggtattcgcgttgatacatcaagcgtaaataactaa

SEQ ID NO: 29453 - DNA, 435 bp, Neisseria meningitidis
gtggcaaagaaaattatcggctatattaaactgcaaattcctgcaggtaaagccaatccatctcctccggttggtcctgctttgggtcagcgcggtttgaatattatggaattttgtaaggcatttaatgctgcaacccaaggtatggagcctggcttaccgattccggttgtgattactgcatttgcagataaatcattcacatttgtgatgaaaaccccgccagcttctatcttgttgaaaaaggctgccggtttgcaaaaaggtagttctaatcctctgaccaacaaagtgggtaaattgacccgtgcccagttggaagaaattgctaaaactaaagagcctgatttgactgctgctgacttggatgcggctgtccgtactatagcaggttctgctcgctcaatgggcttggatgtggagggtgttgtataa

SEQ ID NO: 29454 - DNA, 537 bp, Neisseria meningitidis
atgtcgaaaaaatggtatgttgtacaggcgtattcggggtttgagaagaatgtccaacgaatattggaagagcgcattgcccgtgaggagatgggagattatttcggacaaattctggtgcctgtagagaaagttgttgatatccgcaatggtcgtaagactattagtgaaagaaagtcatatcctggttatgtgctagttgagatggaaatgacagatgactcttggcatcttgtaaaaagcaccccccgtgtttccggttttattggagggagggctaatagacctacgccgattagtcagagagaggctgaaattattttacagcaggttcagaccggcatagagaagccgaaaccaaaagttgaatttgaggtcggtcaacaggttcgtgtaaatgaagggccgtttgcggattttaacggggtggttgaggaggtcaattatgaacggaataagttacgcgtgtctgttcagatatttggtagagaaacacccgttgagctggagttcagccaggttgaaaagattaactga

SEQ ID NO: 29455 - DNA, 279 bp, Neisseria meningitidis
atgacagaacatacgcctgaaaaaaagaacgttaaagtggatcaactggttgttcaagataaagaatctgcatctaattccggtaaggaagggttttttgcatatttctcaaattcttggttcgaattcaaaaaggtggtttggcctaagcgtgaagatgctgtcagaatgactgtatttgttatagtgtttgttgctgtgctttctatatttatctatgcggcagatacagcaatttcgtggttattttttgatgtattgctgagaagggaaggttga

SEQ ID NO: 29456 - DNA, 1185 bp, Neisseria meningitidis
atggctaaggaaaaattcgaacgtagcaaaccgcacgtaaacgttggcaccatcggtcacgttgaccatggtaaaaccaccctgactgccgctttgactactattttggctaaaaaattcggcggtgctgcaaaagcttacgaccaaatcgacaacgcacccgaagaaaaagcacgcggtattaccattaacacctcgcacgtggaatacgaaaccgaaacccgccactacgcacacgtagactgtccggggcacgccgactacgttaaaaacatgattaccggcgcagcacaaatggacggtgcaatcctggtatgttccgcagccgacggccctatgccgcaaacccgcgaacacatcctgctggcccgtcaagtaggcgtaccttacatcatcgtgttcatgaacaaatgcgacatggtcgacgatgccgagctgttggaactggttgaaatggaaatccgcgacctgctgtccagctacgacttccccggcgacgactgcccgatcgtacaaggttccgcactgaaagccttggaaggcgatgccgcttacgaagaaaaaatcttcgaattggctgctgcattggacagctacatcccgactcccgagcgtgccgtggacaaacctttcttgttgcctatcgaagacgtattctctatttccggtcgtggtacagtagtaaccggtcgtgtagagcgcggtatcatccacgtcggtgacgagatcgaaatcgtcggtctgaaagaaactcaaaaaaccacttgtaccggtgttgaaatgttccgcaaactgctggacgaaggtcaggcgggcgacaacgtaggcgtattgctgcgcggtaccaaacgtgaagacgtggaacgcggtcaggtattggccaaaccgggtactatcactcctcacaccaaattcaaagcagaagtgtacgtactgagcaaagaagagggcggccgccatactccgttcttcgccaactaccgtccgcaattctacttccgtaccaccgacgtaaccggcgcggttactttggaagaaggtgtggaaatggtaatgccgggtgagaacgtaaccattaccgtagaactgattgcgcctatcgctatggaagaaggcctgcgctttgcgattcgcgaaggcggtcgtaccgtgggtgccggcgtggtttcttctgttatcgcttaa

SEQ ID NO: 29457 - DNA, 252 bp, Neisseria meningitidis
atgtcgctttttattaccgacgagtgcatcaactgcgacgtatgcgaacccgaatgccccaatgatgccatttcccaaggcgaggaaatttacgaaatcaaccccaacctctgcacgcagtgcgtcggacactacgatgagccgcagtgccagcaggtttgcccggtggactgcatcctgattgacgaagaatatcccgaaacccatgacgagttgatggcgaaatacgaaaagattatccagtttaaataa

SEQ ID NO: 29458 - DNA, 2307 bp, Neisseria meningitidis
atggcgaaaaacctattaatcgtcgaatccccgtccaaagccaaaaccctgaaaaaatatttgggcggcgattttgaaatccttgcatcctacggacacgtccgcgacctcgtccccaaaagcggcgcggtcgatcccgacaacggctttgcgatgaaataccaactcatcagccgcaacggcaaacacgtcgatgccatcgtcgccggtgccaaagaagctgaaaacatctacctcgccaccgacccggatagggaaggcgaagccatttcctggcatcttttggaaatcctcaaatccaaacgcggcttgaaaaacatcaagccgcagcgtgtcgtgttccacgaaatcaccaaaaacgccgtgctcgatgccgtcgccaatccgcgcgaaatcgaaatggacttggtcgatgcgcaacaagcccgtcgcgctttggactatttggtcggctttaacctttcgccattgttatggaaaaaaatccgccgcggtttgagcgcgggtcgtgtgcaaagtcccgctttgcgcctgatttgcgaacgcgaaaacgaaatccgcgcgtttgaagcgcgggaatattggacggtgcatctcgacagccacaaaggccgcagcaagttcaccgccaaactcgcccaatacaacggcgcgaaactcgaacaattcgacctgccgaacgaagccgcgcaagccgacgtgttgaaagaactcgaaggcaaagaggccgtcgttaccgccattgaaaagaaaaagcgcagccgcaatcccgccgcgccgttcaccacttctaccatgcagcaggatgctgtgcgcaaactcggcttcaccaccgaccgcaccatgcgtaccgcccaacagctttatgaaggtatagacgtagggcagggcgcgatcggtctgattacctatatgcgtaccgacagcgtgaatttggcggatgaagcgttaaccgaaatccgccattacatcgaaaacaaaatcggcaaagaatatctgccgagtgccgccaaacaatacaaaaccaaatccaaaaacgcccaagaagcgcacgaagccatccgtccgacttccgtgtaccgcacgcccgaaagcgtcaaacccttcctgagcgcagaccagttcaaactctatcaaatgatttggcagcgtaccgtcgcctgtcagatgacgcctgccaaattcgaccaaaccaccgtcgatattaccgtcggcaaaggcgtattccgcgtaaccggacaagtgcaaaccttcgcaggcttcttgagcgtttatgaagaaagcagcgacgatgaagaaggcgaagacagcaaaaaactgcccgaaatgagcgaaggcgataaattgcccgtggacaaactctacggcgaacaacactttaccactccgccgccgcgctacaacgaagccacgctggttaaagccctcgaagaatacggcatcggccgcccctcgacctacgccagcatcatctccacgctcaaagaccgcgaatacgttacccttgagcaaaaacgcttcatgcccaccgacacaggcgacatcgtcaacaaattcctgaccgaacacttcgcccaatacgtcgattaccacttcaccgccaaactcgaagaccagcttgacgaaattgccgacggcaaacgccaatggattcccttgatggacaaattctggaaaccgttcatcaagcaagtggaagaaaaagaaggcatcgaacgcgccaaatttaccacgcaggaacttgatgaaacctgcccgaaatgcggcgaacacaaactgcaaatcaaattcggcaaaatgggtcgttttgttgcgtgtgccggttatcccgagtgcagctacacgcgcaatgtcaacgaaaccgccgaagaggccgccgagcgcatcgccaaagccgaagccgaacaggccgaactcgacggacgcgagtgcccgaaatgtggcggtcgcctagtgtacaaatacagccgcaccggcagcaaattcatcggctgcgccaactatccgaaatgcaaacacgtcgagccgctggaaaaaccgaaagataccggcgtccagtgtccgcaatgcaaaaaaggcaacctcgtcgagcgcaaatcccgctacggcaaactgttttacagttgcagcacctatcccgactgcaactacgccacttggaacccgcccgttgccgaagaatgcccgaactgccattggccggtcttgaccatcaaaaccaccaaacgctggggcgtcgaaaaagtctgcccgcaaaaagaatgcggctggaaagaacagattgaaccgcccgcgccgaaggagtaa

SEQ ID NO: 29459 - DNA, 2121 bp, Neisseria meningitidis
atgcgccgttttctaccgatcgcagccatatgcgccgtcgtcctgttgtacggactgacggcggcaaccggcagcaccagttcgctggcggattatttctggtggattgttgcgttcagcgcaatgctgctgctggtgttgtccgccgttttggcacgttatgtcatattgctgttgaaagacaggcgcgacggcgtattcggttcgcagattgccaaacgcctttccgggatgtttacgctggttgccgtactgcccggcgtgtttctgttcggcgtttccgcacagtttatcaacggcacgattaattcgtggttcggcaacgatacccacgaggcgcttgaacgcagcctcaatttgagcaagtccgcattgaatctggcggcagacaacgcccttggcaacgccatccccgtgcagatagacctcatcggcgcggcttccctgcccggggatatgggcagggtgctggaacattacgccggcagcggttttgcccagcttgccctgtacaatgccgcaagcggcaaaatcgaaaaaagcatcaacccgcacaagctcgatcagccgtttccaggtaaggcgcgttgggaaaaaatccaacaggcgggttcggtcagggatttggaaagcataggcggcgtattgtacgcgcagggctggctgtcggcaggtacgcacaacgggcgcgattacgccttgtttttccgtcagccggttcccaaaggcgtggcagaggatgccgtcttaatcgaaaaggcaagggcgaaatatgctgagttgagttacagcaaaaaaggtttgcagacctttttcctggcaaccctgctgattgcctcgctgctgtcgatttttcttgcactggtcatggcactgtatttcgcccgccgtttcgtcgaacccgtcctatcgcttgccgagggggcgaaggcggtggcgcaaggcgatttcagccagacgcgccccgtgttgcgcaacgacgagttcggacgcttgaccaagttgttcaaccacatgaccgagcagctttccatcgccaaagaagcagacgagcgcaaccgccggcgcgaggaagccgccagacattatctcgaatgcgtgttggaggggctgaccacgggcgtggtggtgtttgacgaacaaggctgtctgaaaaccttcaacaaagcggcggaacagattttggggatgccgcttacccccctgtggggcagcagccggcacggttggcacggcgtttcggcgcagcagtccctgcttgccgaagtgtttgccgccatcggcgcggcggcaggtacggacaaaccggtccatgtgaaatatgccgcgccggacgatgccaaaatcctgctgggcaaggcaaccgtcctgcccgaagacaacggcaacggcgtggtaatggtgattgacgacatcaccgttttgatacacgcgcaaaaagaagccgcgtggggcgaagtggcaaaacggctggcacacgaaatccgcaatccgctcacgcccatccagctttctgccgaacggctggcgtggaaattgggcgggaagctggacgagcaggacgcgcaaatcctgacacgttcgaccgacaccatcatcaaacaagtggcggcattaaaagaaatggtcgaggcattccgcaattacgcgcgttccccttcgctcaaattggaaaatcaggatttgaacgccttaatcggcgatgtgttggcattgtacgaagctggtccgtgccggtttgcggcggaacttgccggcgaaccgctgatgatggcggcggatacgaccgccatgcggcaggtgctgcacaatattttcaaaaatgccgccgaagcggcggaagaagccgatgtgcccgaagtcagggtaaaatcggaagcggggcaggacggacggattgtcctgacagtttgcgacaacggcaaggggttcggcagggaaatgctgcacaatgccttcgagccgtatgtaacggacaaaccggctggaacgggattgggactgcccgtggtgaaaaaaatcattgaagaacacggcggccgcatcagcctgagcaatcaggatgcgggcggcgcgtgtgtcagaatcatcttgccaaaaacggtagaaacttatgcgtag

SEQ ID NO: 29460 - DNA, 1260 bp, Neisseria meningitidis
atgagtatggcacttgcccaaaaacttgccgccgacagcattgcggcggttgccgaaggacgcaaccttcaggacgtgttggcgcaaatccgcaccgcgcatcccgaccttacggcgcaggaaaacggcgcgttgcaggacatcgcctacggctgccagcgttatttgggcagtttgaaacatatgctcgcgcagatgctgaaaaagccgattggcaatccgcagctcgaaagtctgcttttggcggcgttgtaccaactgcattacacgcgcaacgcgccgcatgctgtggtcaacgaagctgttgaaagcatcgccaaaatcggacgcgggcagtaccgttcgtttgccaacgcgattttgcgccgctttttgcgcgaacgcgacaagcttgcggcttcctgcaaaaaagacgatgtggcgaaacacaacctgccgctgtggtgggtggcttacttgaaaaaccattatccgaaacactggcacaacatcgccgccgcgctgcaatcccatccgccgatgacgttgcgcgtcaaccgccgacacggcaacgccgaaagctatttggaaaaactggctgcggaaggcattgcggcaaaggcgttggacgaatatgcggttacgttggaagaagccgtgccggtgaaccgcctgcccggtttttcagacggcattgtttcggtacaggacttcggcgcgcagcaggcggcgtatctccttaacccgaaagacggcgaacggattttggacgcgtgcgccgcgccgggcggcaagacggggcatatcttggaactggcggattgccgcgttaccgccttggacattgatgcaggccgtctgaagcgtgtggaggacaatatcgcccgtttgggctttcagacggcatcggcggcgtgtgccgatgcgcgggatttggcggcgtggtatgatggaaagcctttcgacacaatccttgccgacgtgccatgcaccgcttccggcgtggcgcggcgcaatcccgacgtgaaatggctgcgccgtccgaccgacgcgctcaaaaccgcccgccagcaggaagccctgctggacgcactttggcagacgctgaaacagggcggcagaatgctgcttgccacctgttccgtgttcgtcgaagaaaacgacgggcaattgcaaaaattcctcaaccgccatgccgatgccgaaccgatcgaatcgcgggtgcttttaccgaacaaacaccaagatggcttttattacgcgcttattcaaaagcattaa

SEQ ID NO: 29461 - DNA, 1218 bp, Neisseria meningitidis
atgcaacgtcgtattataaccctgctctgcgcggcaggtatggcattctcaacacaaactttggcggcaaatttggaggtgcgcccgaacgcgccggaacgctacacggtcaaacagggcgacaccctgtggggcatttcgggcaaatacctgtacagcccgtggcaatggggccgcctgtgggacgcgaaccgggatcaaatccacaatcccgacctgatttatctggaccaggtattggtgttgcgccacgttgacggcgaaccgcgcctcggcttggaacagacagacggcatccccgtcgtcaaaatgagtccggataaggaagtgtccggatacggtattcccgccatcgatgtcaacttctaccgcatctttatgcggcacccgcaaatcgtttcccgcaaagaaaccgctgccgcgccgcgcctgctctcgggcccggaaggcaggctgctgtacaccaaaggcaccagggtttacaccaaaggcctgaaagagccgggccgctacctgacctaccgaatcaataaaaacatcaccgatccggatacgggtaaattcctcgggcaggaagtcgcattcagcggcatcgtgcgctccctcgactataccgactctgtcctcgaacaacgctcgaaacaggctggagaacggccgaaagacaacgaataccatacccgcacccatcctttgattaccccgctgcgcaccccttcgatacagccgctggtggtcgaaaccgccatttccgaaatacagcagggcgactacctgatgaaaatgccggaagacaccgaccgcttcaacatgatgccgcacgaaccgtcccgcccggttcaggctaaaatcgtttccgtgtttgaaggcacaaggattgccggccagtttcaaaccatcaccatcgacaaaggcgaggcggacggtttggacaaaggcacggttttgagcctctacaaacgcaagaaaacgatgcaggtcgacctctccaacaatttcaaaagcagggataccgtcgagctgatttccactcctgccgaagaagtgggcttggcaatggtttaccgcacctccgaacacctgtcgtccgccatcattttggaaaacatctccgatatttccgtaggcgacaccgccgccaatccgggacgcgatttggacaatataccggatcagggccgcagccgcgtgaagtttggcttcaaccgctccgaataa

SEQ ID NO: 29462 - DNA, 1473 bp, Neisseria meningitidis
atgaaccagacaagccgcgatctgacccgcatcagccacaacactaaaatcgtcgccacccttgggccgggcagcaacaacgtcgaactgttggaagacatgatccgcgtcggcggtctgaacgtcgtccgcttcaacttcagccacggcacgcccgaattccatcaggaaaacgcccgcatcgtgcgcgaggcggcaaaacgcaccggacaggaaatcgccatcattgccgacctgcagggcccgaaaatccgcgtgggcaaaatcgccggcggcggcatcgaattgaacaaaggcgaaacgctgggactggatgccgcgctcgaaggcgaaggcacgcgcgaggcggtcggtttggactaccgcgacctgcccgacgacgttgccgcaggcgatgtcttgtggctggacgacggcctgctgaccctgaccgtggaatccgtcgaaggcagcaggattatcacaagggtggaaaacagccacgtcctgaaaagcaacaagggcatcaacaaacgcggcggcggtctgtccgcaggcgcgttgaccgaaaaagacttccgcgacctgaaaaccgcgattgccatcggttgcgactatctcgccatcagctttgtgaaatccgccgaagatttgcacatcgcgcgcgccaaagtcgaagaagaaatgaaaggcagtacggccgtgcgccccggtttggtttccaaaatcgaacgcgtagaagcgattgaaaaccttgatgaaatcatcctcgccggcgacggcattatggttgcacgcggcgacttggcggtcgaagtcggacacgccgccgtccccgccctgcaaaaacggatgatccgccgcgcccgcgagttgcgccgcttcagcattacggcgacgcaaatgatggaatcgatgattaccaaccccgtgccgacccgcgcggaagtcagcgatgtggcaaacgcggtattggacggcaccgatgcggtgatgtgttccgccgaaaccgccgtcggcgcgtatccgtttgaaaccgtcagccaaatggcgattatctgcgcggctgcggaaaaagagcaggattcgctcaacggcgttgccgaacaggtcgagtatcccgaagcggtcagcaccaacctggcggttgccggcggtgcggtcagcgtggcgcgcgcggttcacgccaaagccatcgtcgccctgaccgaaagcggttcgaccgcctttgaaatcagccgccacaacatcaccctgccgattttcgcgctgaccccgagcgtttccgcccaacgccgtatggcgatgtaccggggcgtgcgcccgctgattttggcaaccagcaccgaccacgacacggcgttaaacgaagtcgaaaccatgctggtggaacacaacatcctgcattccggcgaccaatacatcattaccagcggctcgcaaatgcgcgaatccggttcgaccaatacgctggaagtgctgcgcgtcaaataa

SEQ ID NO: 29463 - DNA, 1395 bp, Neisseria meningitidis
atgaccccttccgcactgaaaaaaaccgtcctactgctcggcactgcctttgccgccgcatccgcacaagcctccggctaccacttcggcacacagtcggtcaacgcgcaaagcacggcaaatgccgccgccgcagaagccgccgacgcatcgaccatcttctacaaccctgccggcctgaccaaactcgacagcagccagatttccgtcaacgccaacatcgtgctgcccagcattcattatgaggcggattccgccaccgactttaccgggcttcccgtccaaggttcgaaaagcggcaaaatcaccaaaaccacggtcgcgccccacatctacggcgcatacaaagtcaacgacaatctgaccgtaggcttgggcgtgtacgtccccttcggttctgccaccgaatacgaaaaagattccgtgttgcgccacaacatcaacaaactcggtctgaccagcatcgccgtcgaacctgtcgccgcgtggaaactcaacgaacgccattccttcggcgcaggcatcatcgcccaacatacttccgccgagctgcgcaaatatgccgactgggggattatggaaaaagcgaaagcactaaaagaaacaccccccaatccaactaaagccgcccaaatcaaagccgacggacacgccgatgtcaaaggcagcgattggggcttcggctaccaactggcgtggatgtgggacatcaacgaccgtgcgcgcgtgggcgtgaactaccgttccaaagtctcacacacgctcaaaggcgatgccgaatgggcggcagacgacgcaatggcgaaacagttatgggatgcaaacaaactcgcactgctcggctacacgccaagcgaaaaagcccgcgttaaaatcgttacgcccgagtctttgtccgtacacggtatgtacaaagtgtccgacaaagccgacctgttcggcgacgtaacttggacgcgccacagccgcttcgataaggcggaactggtttttgaaaaagaaaaaaccatcgtcaacggcaaatccgaccgcaccaccatcacccccaactggcgcaacacctacaaagtcggcttcggcggttcttatcaaatcagcgaaccgctgcaactgcgcgccggcatcgcttttgacaaatcgcccgtccgcaacgccgactaccgcatgaacagcctgcccgacggcaaccgcatctggttctccgccggcatgaaataccatatcggcaaaaaccacgtcgtcgatgccgcctacacccacatccacatcaacgacaccagctaccgcacggcgaaggcaagcggcaacgatgtggacagcaaaggcgcgtcttccgcacgtttcaaaaaccacgccgacatcatcggcctgcaatacacctacaaattcaaataa

SEQ ID NO: 29464 - DNA, 2274 bp, Neisseria meningitidis
atgaacattactcaaattctttcccaagaactctccgcgactgccgcgcaaatcaccgccgccgtcgagcttttggacgacggcgcgaccgtgccgtttatcgcccgctaccgcaaggaagcgacgggcgggttggacgatacgcagttgcgccggcttgccgagcggctgcaatatctgcgcgagttggaagagcgcaaagccgttgttttaaaaagcattgaagagcaaggcaagctttcagacgacctcagggcgcaaatcgaagccgccgataacaaaaccgcgctggaagacctgtatctgccctacaaacccaaacgccgcaccaaagcgcaaatcgcgcgcgaacacggtttgcagccgctggcggacgtgttgcttgccgagcagtcgcaggacgtggaagccgccgcacaaggctacctgaacgaaaacgtccccgatgccaaagccgcgttggacggcgcgcgtgcgattctgatggagcagtttgccgaagacgcggaactcatcggcacgctgcgcgacaagctgtggaacgaagccgaaatccacgcgcaagttgttggaggcaaagaaaccgaaggcgaaaaattcagcgattattttgaccaccgcgaacctattcgtgcgatgcccagccatcgtgcgctagcggttttgcgcggacgcaacgaaggcgtgttgaacatcgcgctcaaatatcagcccgacgacacgccgattacgcagcaaagcgaatacgagcaaatcatcgcccgccgcttcaaagtttcagacggccacaaatggctgcgcgacaccgtgcgcctgacttggcgcgcgaaaatctttttgtcgttggaacttgaagctctcaatcgtttgaaagaagccgccgacaccgacgcgattaccgtgttcgcccgcaatctcaaagacttgctgcttgctgcgcccgccggacggctgaccacgctgggtctcgaccccggctaccgcaacggcgtgaaatgcgccgtggtggacgacaccggcaagctgctggataccgtcatcgtctatttgcatcaagaaaacaatatgttggcaacgctgtcgcgcctgattaaacagcacggcgtgaagctcatcgccatcggtaacggcaccgccagccgtgaaaccgacaaaatcgcgggcgaactggtgcgtgaaatgtcgaaaatggggctgcataaaatcgtcgtgtccgaagccggcgcgtcgatttattccgcgtccgaactggcggcgcgcgagttccccgacttggacgtttccctgcgcggcgcggtgtccatcgcccgcaggctacaagacccgcttgccgagttggtcaaaatcgaccccaaatccatcggcgtggggcagtatcagcacgacgtgaaccaaagccagctcgccaaatcgctggacgcggtggtcgaagactgcgtgaacgccgtcggcgtggacgtgaacaccgcctccgccccgctcttggcgcgaatttccggtttgaatcaaacccttgcccaaaacatcgttgcctaccgcgatgaaaacggcgcgttcgacagccgcaaaaaattgctgaaagtaccgcgtttgggcgaaaaaaccttcgagcaggcggcaggctttttgcggattaacggcggtaaagagccgttggacgcgagcgccgtccaccccgaagcctatcccgtcgtcgccaaaatgctggcgcaacaaggcattagcgccgccgaactcatcggcaaccgcgagcgcgtgaagcaaatcaaagcgtccgacttcaccgacgaacgcttcggcctgccgaccattttggacatcctgtccgaactggaaaaacccggccgtgatccgcgcggcgagtttcagacggcatcgtttgccgaaggtatccacgaaatcagcgacttgcaagtcggtatgatactcgaaggcgtggtttccaacgtcgccaacttcggcgcgttcgtggacatcggcgtccatcaggacggcttggtgcacatctccgccctgtccaacaagttcgtccaagacccgcgcgaagtggtgaaagctggcgacgtggtgaaagtgaaagtgctggaagtcgatgctgcacgcaaacgcatcgcgctgaccatgcgcttggatgacgaaccgggcggcgcaaaacataaaatgccgtctgaaaaccgcagccgcgaacggacagccggccgcaaaccccaacgcaacgaccgcgccccagccaattcggcgatggcggatgcgtttgcgaagctgaagcggtaa

SEQ ID NO: 29465 - DNA, 651 bp, Neisseria meningitidis
atgatttcagttgaacacgtttccaaacgctatctgacccgccaaggttggcggacagtcttgcacgatattagcttcaaaatggagaagggcgagaaaatcggtattctcggccgcaacggtgcaggtaaatcgacgctcatccgtttgatcagtggcgttgagccgccgaccacgggtgaaatcaagcggacaatgagtatttcttggcctttggcattctccggtgcgtttcaaggcagtctgaccggtatggacaatttgcgtttcatctgccggatttacaatgtcgatatcgattatgtgaagaactttaccgaagagttttccgagttggggcaatatctttacgagccggtcaagcgttattcttcaggtatgaaggcgcgtttggcatttgctttgtcgttggcggtagagtttgattgctatttgattgacgaagtgattgcagttggtgactcgcgttttgccgataaatgtaagtacgagttgtttgaaaagcgcaaagaccgttccatcatcttggtgtcgcacagccacagcgccatgaagcaatattgcgataatgcgatggtgctggaaaaagggcatatgtaccagtttgaagatatggacaaagcctacgaatattataattcgctgccttaa

SEQ ID NO: 29466 - DNA, 1119 bp, Neisseria meningitidis
atgaaagtcttaaccgtctttggcactcgccctgaagctattaaaatggcgcctgtaattctagagttacaaaaacataacacaattacttcaaaagtttgcattactgcacagcatcgtgaaatgctagatcaggttttgagcctattcgaaatcaaagctgattatgatttaaatatcatgaaacccaaccagagcctacaagaaatcacaacaaatatcatctcaagccttaccgatgttcttgaagatttcaaacctgactgcgtccttgttcacggagacaccacaacaacttttgcagctagccttgctgcattctatcaaaaaatacctgttggccacattgaagcaggcctgagaacttataatttatactctccttggccagaggaagcaaataggcgtttaacaagcgttctaagccagtggcattttgcacctactgaagattctaaaaataacttactatctgaatcaataccttctgacaaagttattgttactggaaatactgtcatagatgcactaatggtatctctagaaaaactaaaaataactacaattaaaaaacaaatggaacaagcttttccatttattcaggacaactctaaagtaattttaattaccgctcatagaagagaaaatcatggggaaggtattaaaaatattggactttctatcttagaattagctaaaaaatacccaacattctcttttgtgattccgctccatttaaatcctaacgttagaaaaccaattcaagatttattatcctctgtgcacaatgttcatcttattgagccacaagaatacttaccattcgtatatttaatgtctaaaagccatataatattaagtgattcaggcggcatacaagaagaagctccatccctaggaaaaccagttcttgtattaagagatactacagaacgtcctgaagctgtagctgcaggaactgtaaaattagtaggttctgaaactcaaaatattattgagagctttacacaactaattgaataccctgaatattatgaaaaaatggctaatattgaaaacccttacgggataggtaatgcctcaaaaatcattgtagaaactttattaaagaatagataa

SEQ ID NO: 29467 - DNA, 417 bp, Neisseria meningitidis
atggcaaagctgacagaacaagatattttgaattggaacgggccggaagacgattatatgaatgacgagcatttggcttttttccgcgaattgctggtaaaaatgcaagacgaactcatcgaaaatgcttccgctacgacagggcatctccaagaacacgaatcagcccccgatcctgccgaccgtgccacacaggaagaagagtacgcattggaactccgtacccgcgatcgggaacgaaaacttctcagtaaaatacaggcgaccatccgcaatattgatgaaggggattatggattctgtgctgatacgggagagcctatcggtctgaagcggctgctggcacgcccgacagccactttatctgttgagtcccaagaacgccgagagaggatgaaaaaacagtttgccgactga

SEQ ID NO: 29468 - DNA, 687 bp, Neisseria meningitidis
atgacggtgttgcaagaacgttattgtgaggtgtccgaccgtatcggaaaattggttctgcaggcgggaaggaagccgcattccgtcagcctgattgccgtcggtaagactttcccttcagacggcatccgcgaagtttacgccgccggacagcgtgatttcggcgagaactatattcaggagtggtacgataaaacggaagagttggcggatttgaccgacattgtgtggcacgtcatcggcgatgtgcagtccaacaaaaccaaatttgtcgccgaacgcgcgcattgggtgcataccatatgccgtctaaagaccgccgtccggctgagcaggcagcgtccttcctcaatgccgcctttgcaggtgtgtattgaggtgaacattgcgggcgaggcggtgaagcacggtgtcgcgcccgaagaagcagtcgcgcttgctgtggaagtggcgaagctgccgaatatcgtcgtacgcggactgatgtgtgttgccaaagccaacagcagtgaaacggagttgaaggtgcaatttcaaacgatgcggaaactgcttgccgacctcaatacggctggcgttaaggcagacgtgctgtctatggggatgtcggacgatatgcctgccgccattgagtgcggtgcgacacacgtccgtatcggcagcgcgattttcgggaaaaggggctga

SEQ ID NO: 29469 - DNA, 1044 bp, Neisseria meningitidis
atgcagattaccgacttactcgccttcggcgctaaaaacaaagcatccgaccttcacctgagttcgggcatatcccctatgattcgggttcacggcgatatgcggcgcatcaaccttcccgaaatgagcgcggaagaggtcggtaatatggtaacttcggtgatgaacgaccaccagcggaaaatctaccagcaaaacttggaagtcgacttctcgttcgaactgcccaacgtcgcccgattccgcgtcaacgccttcaacaccggccgcggtcccgccgccgtattccgcaccattcccagcaccgtcttatcgctggaagaattgaaagccccgagcattttccaaaaaatcgcagaatcgccgcgcggcatggtattggttaccggccctaccggttcgggcaaatcgaccacgcttgccgcgatgatcaactacatcaacgaaacccagccggcacacatcctgaccatcgaagacccgatcgaattcgtccaccaaagcaaaaaatccctgattaaccagcgcgagctgcaccagcacaccctcagcttcgccaacgcgctgagttccgcattgcgcgaagaccccgacgttatccttgtcggcgagatgcgcgacccagaaaccatcggcttggctctgaccgccgccgaaaccggacacttggttttcggcacgctgcacacgaccggcgcagcaaaaaccgtcgaccgtattgtggacgtattcccggcgggagaaaaagaaatggtgcgctctatgctgtccgaatcgctgaccgccgtcatctcccaaaacctgctaaaaacgcacgacggcaacggccgtgtcgcctcgcacgaaatcctgattgccaaccccgccgtccgcaacctcatccgcgaaaacaaaatcacgcagattaactccgtcctgcaaaccgggcaggcgagcggtatgcagacgatggaccaatcgctgcaatcgctggtgcgccaagggctgatcgcaccggaagtcgcacgcagacgcgcgcaaaacagcgaaagtatgagtttctga

SEQ ID NO: 29470 - DNA, 2151 bp, Neisseria meningitidis
atgaaaaccccacccctcaagcctctgctcattacctcgcttcccgttttcgccagtgtctttaccgccgcctccatcgtctggcagctgggcgaacccaagctcgccatgcccttcgtactcggcatcatcgctggcggcctggtcgatttggacaaccgcctgaccggacggctgaaaaacatcatcgccaccgtcgccctgttcaccctctcctcacttgtcgcgcaaagcaccctcggcacaggtttgccattcatcctcgccatgaccctgatgactttcggctttaccatcatgggcgcggtcgggctgaaataccgcaccttcgccttcggcgcactcgccgtcgccacctacaccacacttacctacacccccgaaacctactggctgaccaacccctttatgattctgtgcggaaccgtactgtacagcaccgccatcatcctgttccaaatcatcctgccccaccgccccgttcaagaaaacgtcgccaacgcctacgaagcactcggcagctacctcgaagccaaagccgactttttcgatcccgacgaagccgaatggataggcaaccgccacatcgacctcgccatgagcaacaccggcgtcatcaccgccttcaaccaatgccgttccgccctgttttaccgccttcgcggcaaacaccgccacccgcgcaccgccaaaatgctgcgctactacttcgccgcccaagacatacacgaacgcatcagctccgcccacgtcgactaccaagagatgtccgaaaaattcaaaaacaccgacatcatcttccgcatccaccgcctgctcgaaatgcagggacaagcctgccgcaacaccgcccaagccctgcgcgcaagcaaagactacgtttacagcaaacgcctcggccgcgccatcgaaggctgccgccaatcgctgcgcctcctttcagacagcaacgacaatcccgacatccgccacctgcgccgccttctcgacaacctcggcagcgtcgaccagcagttccgccaactccagcacaacggcctgcaggcagaaaacgaccgcatgggcgacacccgcatcgccgccctcgaaaccggcagcctcaaaaacacctggcaggcaatccgtccgcagctaaacctcgaatcaggcgtattccgccatgccgtccgcctgtcccttgtcgttgccgccgcctgcaccatcgtcgaagccctcaacctcaacctcggctactggatactactgaccgcccttttcgtctgccaacccaactacaccgccaccaaaagccgcgtccgccagcgcatcgccggcaccgtactcggcgtaatcgtcggctcgctcgtcccctactttaccccctccgtcgaaaccaaactctggatcgtcatcgccagtaccaccctctttttcatgacccgcacctacaaatacagcttctcgacatttttcatcaccattcaagccctgaccagcctctccctcgcagggttggacgtatacgccgccatgcccgtacgcatcatcgacaccattatcggcgcatcccttgcctgggcggcagtcagctacctgtggccagactggaaatacctcacgctcgaacgcaccgccgcccttgccgtatgcagcaacggcgcctatctcgaaaaaatcaccgaacgcctcaaaagcggcgaaaccggcgacgacgtcgaataccgcgccacccgccgccgcgcccacgaacacaccgccgccctcagcagcaccctttccgacatgagcagcgaacccgcaaaattcgccgacagcctgcaacccggctttaccctgctcaaaaccggctacgccctgaccggctacatctccgccctcggcgcataccgcagcgaaatgcacgaagaatgcagccccgactttaccgcacagttccacctcgccgccgaacacaccgcccacatcttccaacacctgcccgaaaccgaacccgacgactttcagacagcactggatacactgcgcggcgaactcgacaccctccgcacccacagcagcggaacacaaagccacatcctcctccaacagctccaactcatcgcccggcagctcgaaccctactaccgcgcctaccgacaaattccgcacaggcagccccaaaacgcagcctga

SEQ ID NO: 29471 - DNA, 1008 bp, Neisseria meningitidis
atgagcaccttcttccaacaaaccgcgcaagccatgattgccaaacacatcgaccgtttcccgctattgaagttggaccaggtgattgattggcagccgatcgagcagtacctgaaccgtcaaaaaaaccgttaccttagagaccaccgcggccgtcccgcctacccgctgttgtccatgttcaaagccgtcctgctcggacaatggcacagcctctccgatcccgaactcgaacacagcctcattacccgcatcgatttcaacctgttttgccgtttcgacgaactgagcatccctgattacagcaccttatgccgctaccgcaactggctggcgcaagacgacaccctgtccgaattgctcaaactgattaaccgacaactgaccgaaaaaggtttaaaaatagagaaagcatccgccgctgtcgttgacgccaccattattcagaccgccggcagcaaacagcgtcagaccatagaagtcgatgaagaaggacaagtcagcggccaaaccacaccgagtaaggacagcgatgcccgttggatcaagaaaaacggcctctacaaactcggttacaaacaacatacccgtaccgatgcagaaggctatatcgagaaactgcacattactcccgccaatgcccatgagtgcaaacacctgtcgccgttgttggaagggttacccgaaggtacgaccgtctatgccgacaaaggctacgacagtgcggaaaaccggcaacatctggaagagcgtcagttgttggacggcattatgcgcaaaacctgccgcaaccgtccgctgtcggaggcgcaaaccaaacgcaaccggtatttgtcgaagacccgttatgtggttgaacaaagcttcggtacgctgcaccgtaaattccgctatgcgcgggcagcctatttcggactgattaaagtgagtgcgcaaagccatctgaaggcgatgtgtttgaacctgttgaaagcggccaacaggctaagtgcgcctgtttgcgcctaa

SEQ ID NO: 29472 - DNA, 1104 bp, Neisseria meningitidis
atggaagccgaagtaatcaaccagctcaacaataccctgaatgatttggaaaagcgcagcgaagacatccgagtttatatggattatcagggtaagaaagaccgattggaagaagttatcggtctttccgaagaccccgaactttggaacgacccgaaacgcgcccaagaaatcggcaaagagcgcaaaatcctcgaaggcatcgtgttgacgctcgacaacatcgcgacgggcatcgaagacaaccgcatgctgattgaaatgaccgtcgaagaaaacgacgaagaaggttttgccgccgtgcaggaagatgtggcggggctggaaaaacagatggcggatttggagttcaaacggatgttcaaccagcccgccgacccgaacaactgctttatcgacatcaccgcaggcgcgggcggtacggaagcggaagactgggcgggtatgctgttccgtatgtacagccgctacgccgagcgcaaaggcttcaaaatcgaaatcctcgaagaagacgacggcgaaatcgcgggcatcaaccgcgcgactatccgagtggaaggcgaatacgcctatggtttgctgcgtaccgaaaccggcgttcaccgcttggtgcgctattcaccgtttgactcgaacaacaaacgccatacttcgtttgcctccgtgttcgtttaccctgaaatcgatgattccattgaaatcgaaatcaaccccgccgatttgcgtatcgacacctatcgcgcatcgggcgcgggcggtcagcacatcaacaaaaccgactccgccgtgcgtattacccacgagccgacggggattgtggtgcaatgtcaaaacgaccgttcgcaacacgccaacaaagccgccgcgatggaaatgttgaagtccaaactgtatgaattggaaatgcgcaaacgcaacgaagagaaacaggcgttggaagaaggtaaatccgatgtaggttggggcagccaaatccgttcgtacgtcttggactcctcacgcattaaagacttgcgcacaggctacgaagtcggcaacaccaaagccgtattggacggcgacttggacggctttatcgaagccagcctgaaacagggcgtgtag

SEQ ID NO: 29473 - DNA, 843 bp, Neisseria meningitidis
atgattcaacacgcaggcttgggctaccgccgcgacttggcggaagactttctctcgctttccgaaaacagcccgatatgctttatcgaagccgcaccggaaaactggctgaaaatgggcggctgggcacgcaaacagtttgaccgtgtggcggaacggctgccgctggcgttgcacggattgtctatgtcgctgggcgggcaagcaccgctggatactgatttgatagacggcatcaaagaaatgatgcgccgttacgattgcacgtttttctccgaccatttgagctactgccacgacggcggtcatctttacgatttgttgccgctgccctttaccgaggaaatggtgcatcatacggcgcggcgtatccgcgaagtgcaagaccgtttgggctgccgcatcgccgtggaaaacacgtcctactatctgcattccccgcttgccgagatgaacgaggtcgagttcctcaacgcggttgcacgtgaggccgattgcggcattcatctggacgtgaacaatatctacgtcaacgccgtcaatcacggcctgttgtcgccggaggcttttttgaaaaacgttgacgcagatcgcgtgtgctatatccatattgccggacatgacgtggaaacgccggaattgttgattgatacacatggcgcggcagttttgccgactgtttgggacttgctcgaacttgcctatgccaagctgccgacgattccgcccaccctattggaacgcgattttaatttcccgccttttgccgaactcgaagccgaggtcgccaaaattgccgactatcaaacgcgtgccggaaaggaataccgccgtgcagcctga

SEQ ID NO: 29474 - DNA, 750 bp, Neisseria meningitidis
atgaaagcactggtcgcagtaaagcgcgtagtggactacaacgtcaaagttcgtgtaaaagccgatggttcggatgtggatatcggcaatgtcaaaatgtcgatgaatccgtttgacgaaatcgctgtggaagaagctgtccgtttgaaagaagccggaaaagtaagcgaaatcgtagcggtttctttgggtgagaaaaaatgcgaagaaaccttgcgtacagctttggcgatgggtgccgaccgtgccattcatgttgaaaccgatactaaactggagtctctggccgttgctaagttgctgaaagccgttgcggacaaagaaaatccgcaaattttctttttgggcaaacaagcgattgatgatgatgccaatcaagtggcgcaaatgctggcagctttgctgaatgcggcgcaaggtacgtttgcttcaaaagtacacattgaaggtggtgaagtacagattgtgcgcgaaattgatggcggcgaagaaaccatagcattaaaactgcctgctgttatcagtgctgatttgcgtttgaacgagccgcgctttgtcaaactccccaatattatggcggcaaagaaaaaacctctggaaaaactggcgcctgccgatttggctaccgatattttacctcgtctgaaaacggtgaaatttgccgaacctaaggcgcgtcaggcaggcgtaaaagtagcaagcgttgccgaattggttgaaaaattgaaaaacgaagccaaagtgatttga

SEQ ID NO: 29475 - DNA, 969 bp, Neisseria meningitidis
atgaaaattttgcttgtccgcttgtctagtatgggcgatttaattcacactttgcccgcaatcgaagatttggcgcgacaatgtcctgatgtagaactgcattggctatgtgaggctggatttgcagatattgcgcgcctgcatccgtttgtaaaaaaaatccatgtgatgaaatggcggcaatggcgcaaacatctctttcaggctgaaacttggcgggaaatgggtcatctgaaacagactttgcggcaggaagcatttaattttgtattggacagtcaaggtctgattaaaagcgcgtgtttcgctaaaatggcgaaatcccctatttatggtttggataaaaatagcgcgcgcgagggactggctgcgctggcgtatgcgaaaacatacgctgtaccgaaagggaaaaatgctgtttggcgcaatcgtgagctgttcgcccaagtatttgggtatgcgatgcctgaaacgcaggtatttggcttgactgttcctgaggcaggccgtctgaaaaatttagcgcagccgtattatgcggctttgcatgcgaccagtcgggacagtaagttatggcctgtggaaaactggcggtcgttgctgcaaaagttgaatgaagaacagcaatgcaatatttacctgccttggggaaatgaagatgaaaaaacgcgtgccaaacaaattgcagacggactgccgtttgctattgtgtgcgataaaatgaatttattgcaggcagcgtatctgctgaaacacgcggtcggaattgttggcgtggataccggtttgctgcatttggcaaacgccttggaaaaacctgtggtcggcatttataccgataccgatccgattaaaacaggcgttcaggtttcgccaattgcaaaaaatttgggcaatatcgggcagattccgaccgcagatttggtttatcaaacgttgatggattgtgttgcagcagacaaaggctaa

SEQ ID NO: 29476 - DNA, 681 bp, Neisseria meningitidis
atgacttacaccatcgtccctatcgccaccgcccgatcgccctacaaacagaaattcggcatcgcccgccagcccggtttagtctccgccgcagaagtatgcatcgagctgaatcccgaatttaccgcagacagcgtgcgcgggctggaagatttcgattatgtgtggataagttttatttttcacggcgtattggatgaaggctgggcacaaatggtgcgcccgccacggctcggcggcaaacaaaaaatgggcgtattcgccacgcgcagcccccaccgccccaaccatctcggactatcactcttaaaactcaaccgcatcgaaaccggcaaacccgtccgcctttattgcagcggcgcagacctgctcgacggcacgccgattgtggacatcaagccttatatcccctttgtcgaatccaaacccgatgccgcatctggtttcgtcagcggcaaacccgtagagttggaagtcgtttggcaggaaaacatcggcgcggaaaatttatctgcaaacaccaaaaaccttatcagccaaagcattgcccaagatccgcgccccgcctatcagaatattcccgaacggatttatgtgatgaatattgcggattacgaaatcagatttcaaatcgaggaaaaccgtgcaaccgttattgatctttccccaaccccgctttaa

SEQ ID NO: 29477 - DNA, 1005 bp, Neisseria meningitidis
atgagcattaaagtagcgattaacggtttcggccgcatcggccgcctcgcattgcgtcaaattgaaaaagcccatggcatcgaagtcgtcgctgtcaacgacctgacccctgccgaaatgctgctgcaccttttcaaatacgacagcacgcaaggccgtttccaaggtactgccgaattaaaagacgatgccatcgtggtaaacggcaaagaaatcaaagttttcgccaatccgaatcccgaagaattgccttggggcgagttgggtgtggatgtcgtcctcgaatgtaccggcttctttaccaataaaaccaaagccgaagcacacatcagggccggcgcgcgcaaagtcgtgatttccgcacccggcggcaatgatgtgaaaaccgtcgtatatggcgtaaaccaagacattttggacggcagcgaaaccgttatctccgctgcttcctgcaccaccaactgccttgccccgatggcggcagtcctgcaaaaggaattcggcgtagtcgaaggcctgatgaccaccatccacgcctacaccggcgaccaaaacacccttgacgcgccgcaccgcaaaggcgatttgcgccgcgcccgcgccgccgcgctcaacatcgtgcccaacagcaccggtgccgccaaggccatcggtctggttatccctgaattgaacggcaaactcgacggctccgcccaacgcgtccctgttgccaccggctcgctgaccgaattggtttccgtcctcgaacgccctgtaaccaaagaagaaatcaacgccgcgatgaaagccgccgccagcgaatcttacggctacaacgaagatcaaattgtttcttccgacgttgtcggcatcgaatacggttcgctcttcgatgcgacccaaacccgcgtgatgaccgtgggcggcaaacaattggtgaaaactgttgcctggtacgacaacgaaatgtcctacacctgccaactcgtccgcactttggaatacttcgcaggcaaaatctaa

SEQ ID NO: 29478 - DNA, 2595 bp, Neisseria meningitidis
atgtccaaatccgccgtttccccaatgatgcagcaatacctcggcatcaaagcgcaacataccgacaaactggtgttttaccgtatgggcgatttttacgagatgtttttcgacgatgcggtagaagcggcaaaacttttggatattaccctgaccacgcgcggacaggtggatggcgagccggtcaaaatggcaggcgtgccgtttcacgccgccgaacaatatctggcgcgcctggtcaagttgggcaaaagcgtggcgatttgcgaacaggtcggcgaagtcggcgcgggcaaagggcctgtggagcgcaaagtcgtgcgcatcgtaacgcccggcacgctgaccgattccgcattgctggaagacaaggaaaccaaccgtatcgttgccgtgtcccccgacaaaaaatacatcggtttggcgtgggcatcgctgcaaagcggcgaattcaaaaccaagctgacaactgtggataaattggacgacgaactggcgcgcctgcaggcggcggaaattctgttgccggacagtaaaaacgcaccgcaacttcagacggcatcgggtgttacgcgcctgaacgcgtggcagtttgccgccgacgcgggggaaaaactgctgacggaatatttcggctgccaggatttgcgcggcttcggtttggacggcaaagaacacgccgttgcgattggcgcggcaggtgcactgttgaactatatccgtctgacgcaaaacctgatgccgcaacatttggacggcctgtcgctcgaaaccgacagccaatatatcggtatggatgctgccacgcgccgcaatctcgaaatcacgcaaaccctctccggcaaaaaatcgccgaccctgatgtccacgctcgacctttgcgctacccatatgggcagccgcctcttggctctctggctgcaccaccctttacgcaaccgcgcccacatccgagcgcgccaagaagccgttgccgcgctggaaagccaatacaaacccctccaatgccgtctgaaaaacattgcggacattgaacgcattgctgcccgcatcgccgtcggcaacgcccgcccgcgcgatttggcatctttacgcgacagtctgttcgagttggcacaaatcgacttgtccgcaaacggcagcagcctgttggaaaccctcaaagccgttttcccggaaaacctatccacagccgaacagctccgccaagccattttgcccgaaccttccgtctggctgaaagacggcaatgtcatcaaccacggttttcatcccgaactggacgaattgcgccgcattcaaaaccatggcgacgaatttttgctggatttggaagccaaggaacgcgaacgtaccggtttgtccacactcaaagtcgagttcaaccgcgttcacggcttttacattgaattgtccaaaacccaagccgaacaagcacctgccgactaccaacgccggcaaaccctcaaaaacgccgaacgcttcatcacgccggaactgaaagcctttgaagacaaagtgctgactgctcaagagcaagccctcgccttagaaaaacaactctttgacggcgtattgaaaaaccttcagacggcattgccgcagcttcaaaaagccgccaaagccgccgccgcgctggacgtattgtccacattttcagccttggcaaaagagcggaacttcgtccgccccgagtttgccgactatccggctatccacatcgaaaacggtcgccatcccgttgtcgaacagcaggtacgccacttcaccgccaaccacaccaaccttgaccacaaacaccgcctcatgctgctcaccggccccaatatgggcggcaaatccacctacatgcgccaagtcgcgctgattgttttattggcacacaccggctgttttgtgcctgccgatgccgccacaatcgggcccatcgatcaaatcttcacccgcatcggcgcatcggacgacctcgcctccaaccgctccactttcatggtcgaaatgagcgaaaccgcctacatcctgcatcacgccaccgaacaaagccttgttttaatggacgaagtcggacgtggcacttccactttcgacggcctcgccctcgcgcacgccgttgccgaacacctgctgcaaaaaaacaaatccttcagcctgtttgccacccactatttcgagctgacctacctgcccgaagcccacgccgccgccgtcaatatgcacctttccgcgctcgaacagggacaggacatcgtgtttctgcaccaaatccaacccggtcccgccggcaaaagctacggcatcgccgttgccaaactcgccggcctgcctgtacgcgcattgaaatccgcccaaaagcatttgaacggactggaaaaccaagccgccgcgaaccgtccccaactggatattttcagtaccatgccgtctgaaaaaggagatgaaccgaatgtgggcaactttgtggataaagcagaggaaaaacattttgaaggtatattggcagcagccttggaaaaactcgatcccgacagcctgaccccgcgcgaagcattgtcagaactgtaccgtctgaaagatttgtgcaaatccgtatcttaa

SEQ ID NO: 29479 - DNA, 492 bp, Neisseria meningitidis
atgaattccctctttgtggacaatactgttttcattacacggctgaaagccgggcatatcggcaggttggttcaggcgttgtttgaggagtggcacggatttgaaccgtggtcttctgtggataagattcgtgcctattacggcagatgtttgaaagatgacgaactgccgctggcttttgcggctgtggatgatttcggaaccctgttgggttcggctgcggtcaagcggcatgatatgaaaagtttcccacagtatgaatattggttgggggatgtctttgttttacctgaatatcgcggaaaaggcattggcaggaggctggtcgcccattgcataggcgcagcgcgttcgctggggataaagttcttgtatctttatacgcctgatgtgcaaatattttatgaatcattcggctgggcggttgtcgggcgacatttccataacggtgaatgggttacggttatgcgtttggatatggataaggtttaa

SEQ ID NO: 29480 - DNA, 1395 bp, Neisseria meningitidis
atgaccgtcaaaacccgtttcgcccccagccccaccggctacctgcacattggcggcgttcgcaccgccttgttttcgtgggcgtttgcccgccatcataaaggcgaatttttattgcgcatcgaagacaccgacttggcgcgttctaccgccgaatccgtcaacatcatcctcgacggcatgaaatgggtcggcctgaactacgacaacgccgacaatgtcgtgtaccaaacccgccgtttcgaccgctacaaagaagtcattgccgaacttttagaaaaaggccatgcctactactgctattgcagcaaagaagagctggaagcgatgcgcgagaaagccgaaaaagaaggcacggcgacttacgaccgccgctggcggccggaagcgggcaaaaccctgcccgaaattcccgccggcgtgcaacccgtcgtccgcttcaaaacgcctttggacggtgtaacccggtgggcggacttggtcaaaggcgaaatttccatccccaatgaagccctcgacgacctgattatcgcccgatccgacggctcgccgacctacaacttctgcgtcgtggtggacgactacgacatgggcgttacccacgttatccggggcgacgaccatgtgaacaacaccccgaaacaaatcaacatattaaaagccatcggcgctaccctgcctgaatacggccacttgcccatgattcttaacgaacaaggcaaaaaaatctccaaacgcagcggcgataccgttgccattaccgatttcggcgcaatgggcatcctgcccgaagccatgctcaactatctggcacgcttgggctgggcgcacggcgacgacgagttctttacgatggaacaattcatcgaatggtttgatttgaaagacgtttccccgtccccaagccgtatggatttgaaaaagctctattggatcaacggcgaacacatcaaaatcacgcccaacggcaaactcgccgaactcgtcaaaccgcgtctcgctctgcgcgatatccatgaaactgaaaaacctgcattggaagacgtgttggcactggtcaaagaccgcgcccaagacctgaacacacttgccgacgagtgcctctacttctacgtcaaacaaacgcctactgaagcggacgtgcagaaacactgggacgatgaagccgccgcccgtatgctgcgctttgccgaacgcctcgaagggctggaagactggaatgccgaagccatccacgacctcttcaaacccttctgcgacgaagaaggcattaaaatgggcaaactcggcatgcccctgcgccttgccgtctgcggtacggcgaaaacccccagcgtcgatgctgtgttggcattaatcggcaaagaagaagtgttgaaacgcatccgcgcttaa

SEQ ID NO: 29481 - DNA, 1179 bp, Neisseria meningitidis
atggcatttttaaaactgaccgaacaaaacgtgcagggcaaaaccgtcctcatccgcgccgatatgaacgtgccgttcaaagacggcaaaatcagcgacgacacccgtatccgcgcctcgattgcgtccgttaaatactgcgtggacaacggcgcgtccgtcattgtgatgacccacttgggccgcccgaccgaaggcgaattccatcccgaagacgacgttgcgcccgttgccgcacacttgggcagcctgttgggcaaagacgtgaaagtattgaacgactggcgcgaaaacaaaccggctttgaacgcgggcgatgtcgtgatgctgcaaaacgtgcgtatcaacaaaggcgagaagaaaaacgatttggaactgggcaaagcctacgcttctttgtgcgacgtgttcgtcaatgacgcgttcggcaccgcgcaccgcgcccaagcctcgaccgaagccgtcgctcaagccgcgcccgttgcctgcgccggcgtattgatggcgggcgaactcgacgctttgggcaaagccctgaaacagcctgcacgcccgatggttgccatcgttgccggcagcaaagtgtccaccaagttgaccattctcgaatcgctggcggacaaagtcgaccaactcatcgtcggcggcggcatcgccaacaccttcctgttggcagaaggcaaagccatcggcaaatctttggcggaacacgatttggtggaagaatccaaaaaaattatggcgaaaatggcggctaaaggcggctccgtaccgctgccgaccgatgtcgtcgttgccaaagcctttgccgccgatgccgaagcggtcgtgaaagacattgccgacgttgccgaagacgatatgattttggacatcggcccgaaatccgccgccgcgcttgccgatttgcttaaagccgccgacacggtcgtttggaacgggccggtcggcgtgttcgagtttgaccaattcgcaggcggtacgaaagcccttgccgaagccattgcccaaagcaaagcgttctcgattgcgggcggcggcgacacgctggcagcgattgccaaattcggcgttaccgaacaaatcggctacatctccaccggaggcggcgcgttccttgagttcttggaaggcaaagagctgcctgccgtagctgctttggaaaaacgcggcgcgtaa

SEQ ID NO: 29482 - DNA, 1254 bp, Neisseria meningitidis
gtggataaactgaaaatctccgcaaacggcccgctcaacggggaaataacggtctcgggcgcgaaaaacgcggcattgccgctgatgtgcgcgggtttgctgacatcgggtacgttgcgcctgaaaaatgtgcctatgctggcagatgtgaaaaccacgcaaaagctgcttcaggggatgggcgcgcgcgtcctgaccgacaatatcagcgaatttgaaatcaacggcggtacggtaaacaatacctgcgcgccgtatgagctggtcagaactatgcgcgcctcgattttggtgcttggcccgacgctggcgcgtttcggcgaggcgcaagtcagcctgccgggcggctgcgccatcggttcgcgccccgtcgatcagcatttgaaaggcttggaagcgatgggggcggaaatcgtcatcgaacacggttacgtcaaagccaaaggcaaactcaaaggtacgcgcgtggcgatggatgtcgttaccgtcggcggcacggaaaacctgctgatggcggcgacgctggcggaaggtacgacggttttggaaaactgcgccatcgagcctgaagtggtcgatttggcggaatgcctggtcaaaatgggcgcgaaaatcagcggcatcggtacgtccacaatgattgtggaaggtgtggacgagctgcacggctgcgaacacagcgttgtccccgaccggattgaagcggggacgttcctgtgtgcggtggcgataaccggcggcagggtggttttgcggaatgctgcgccgaaaacgatggaagtggtgttggacaaactggttgaggcaggtgcggtgattgaggcgggcgacgattggatcgccatcgatatgcggcagcgtccgaaggcggtggacatccgcacggtcgtccaccccggcttccccacggatatgcaggcgcagtttatggcattgaatgccgtggcggagggaagctgccgcgtggtggaaacgatttttgaaaaccgctttatgcacgtccccgagttgaaccggatgggggcgaacattacaaccgagggcaatacggcatttgtgcagggtgtggaacggctttccggcgcagtcgtcaaggcgacggatttgcgtgcgtccgcaagcctcgttatcgccggtttggcggcgcgcggcgaaaccgtggtcgaacagatttaccacttggatcgcggttatgaaaatattgaaaaaaaactcggcagcgtcggcgcgaaaatcgagcgcgtatccggctga

SEQ ID NO: 29483 - DNA, 975 bp, Neisseria meningitidis
atgacagaatatcccggcatcgggtcgccgttgttttacggcgttttttttgcggcagtgctggtcatgattgccttggatatgttttcgctgaagaaaaacggcagccataaagtcggcgtcaaagaagccttggcatggagcggcttgtgggttgccgtatcctgcctgttcgcgggctggctgtattttgaactcgccggcaatctcggctacggcgcggcagtcgcaaaagaaaaagtattggaattctttaccggctacattttggaaaaatcgttggcagtcgacaatattttcgtgttcctgatgatattcggctacttcaaagtcgcaccgcagtttcagcaccgcgtgctgctgtacggcgtattgggcgcattggtattgcgcaccgtcatgattttcgtcggcgcggcactggttcggcagtttgagtggattctgtatctgtttggcgcgttcctgctctatactggtatacacatgatgaagcccgaaggcgatgagaaagaggatttggcaaacagcaggctgctgaatgccgtcaagaaagtcgttccggtcggcacggaatttcacggcgagaaattttttaccgtcgaaaacggcaaaaaaatcgccacgccgctgtttttggtgctggtcatgattgaattgagcgatgtcgtgtttgctgtggacagtattcccgccgtctttgccgttaccaccgatccgtttatcgtgctgacttccaatattttcgctattttgggtttgcgggcgatgtatttcctactggcggatgtggcggaacgctttatcttcctgaaatacggcttggcattcgtgttgagttttatcggtgtgaaaatgctggtaatgcattgggtgcatatcccgatttccgtttcactgtcggtcgtgttcggcgcgttgggtgcatcgatactgacctcgttaatttatacgaaaaaacagcctgataaataa

SEQ ID NO: 29484 - DNA, 1449 bp, Neisseria meningitidis
atgaaaggcgatattggcgtaatcggtttggcggttatggggcaaaacctgattttgaatatgaacgattgcggatttaaggttgtcgcctacaaccgaacaatcggtaaggtggacgaatttttaaacggcgcggcaaaagggaccggtattatcggcgcgtactccctgcaagacttggtcgataagctggcaaaaccaagaaaaatcatgatgatggttcgcgcaggttcggtggttgacgactttatcgaacaactgcttccgctgttggaagaaggcgacatcattattgacggcggcaatgccaattactccgacacgacacggcggacacattaccttgccggaaaagggattttatttgtcggcgcgggcgtatccggcggcgaagaaggcgcgcggcgcggcccgtccattatgccgggcggggataaacgcgcttgggaagccgtcaaaccgatttttcaggcgattgccgccaaaacgccgcagggcgaaccgtgttgtgactgggtcggcagggacggcgcggggcattttgtcaaaatggtgcataacggcatcgaatacggcgatatgcagttgatttgcgaagcgtaccagtttatgaaagacggcttggggctgtcttacgacgaaatgcaccgcgtgtttgccgagtggaacaaaaccgagctggattcttatctgattgaaatcactgcggcaattttgggctataaggacgaaggcggtgaaccgctggtcgagaaaatcctcgatacggcagggcaaaaaggcacgggcaaatggacgggcatcaatgccttggatttgggtattccgttgacgctgatttccgaagcggtattcgcccgctgcgtttcgtcgttcaaagaacagcgcgtgcagaccggcaagctgttcgcccgaaccgttacgcccgtcgaaggcggcaaacaagaatgggtcgaggcgttgagacagaccctgcttgcatctaaaatcatttcctacgcacaaggctttatgctgatccgcgaagcgggcgaaagctacggctgggatttggactacggcaacactgcgctgctgtggcgcgaggggtgcatcattcgcagcgcattcttaagcaatatccgcgatgcctatgaaaacaatcccgatttggtgttcttgggtacggatccgtatttcaaaaatattttggaaaactgcctgccggcgtggcgcaaggtggttgccaaggcggtcgaatgcggcatccctatgccctgcatggcttcggcgattacgttcttggacggctacacgaccgaacgtctgcctgccaacctcttgcaggcacagcgcgactacttcggcgcgcacacttacgagcgcaccgacaaaccgcgcggcgagtttttccataccaactggacgggcaagggcggagataccgcttcgacaacctacgatatttga

SEQ ID NO: 29485 - DNA, 924 bp, Neisseria meningitidis
atgctgcaaagaactttggcgaaatccatcagcgttaccggagtcgggctgcattcgggcgaacgcgtcgcgctgaccctgcaccccgcgcctgaaaacagcgggatttccttccgccgtaccgatttggacggcgagatgggcgaacaaatcaagctgaccccttatttgatcaacgatacccgcctttcctccaccatcgttaccgacaaaggcgtgcgcgtcggcacgatcgaacacattatgtccgcgctgtccgcctacggcatcgacaacgcgctgattgagctgaacgcgcccgaaatcccgattatggacggctccagcctgccgtttatttaccttttgcaagatgcgggcgtggtcgatcaaaaggcgcaaaagcgttttttgaaaatcctcaagcctgtcgaaatcaaagaagcgggcaaatgggtgcgctttacgccgtatgacggctttaaggtaacgctgaccatcgaattcgaccatccggttttcaaccgcagctcgcccacttttgaaatcgatttcgccggcaaatcctacatcgacgaaatcgcgcgcgcgcgcactttcggctttatgcacgaagtggaaatgatgcgcgcccacaatctgggtttgggcggcaatttgaacaacgccatcgtgattgacgacacggatgtcctgaatcctgaaggcttgcgctatcccgatgagtttgtgcgccacaaaatccttgatgccatcggcgatttgtatatcgtcggacacccgattatcggtgcgtttgaaggctacaaatcgggacacgccatcaacaacgcactcttgcgcgcggttttggcagacgaaacggcttacgaccgggtggaatttgccgacagcgatgatttgcccgacgcatttcacgagctgaacatcagaacttgtggataa

SEQ ID NO: 29486 - DNA, 342 bp, Neisseria meningitidis
gccgccggcgtggcatccaccgccaccgacatcaaaggaaaatatgttgagaaagttgaagtcgcaaaaggcgtcattaccgccgaaatgaaatcaagcggcgtaaacaaagaaatccaaggcaaaaaactctccctgtgggccaagcgtcaagccggttcggtaaaatggttctgcggacagccggttacgcgcgacgccaacgccaccaacgacgacgtcaaagccgccaccgacaccgccaagaagatcgacaccaagcacctgccgtcaacctgccgcgatgattcatctgtcgtttgcatagaaacaccacctacggctttctataaaaatacctaa

SEQ ID NO: 29487 - DNA, 2058 bp, Neisseria meningitidis
atgacacgcaaaatcctcgttacctccgccctgccctatgccaacggcagcatccacctcggccacatggtcgaacacatccaaaccgacgtttgggtgcgctttcaaaaactgcgcggcaacgaatgccactactgctgcgccgacgacacccacggcacgcccgtgatgcttgccgcgcaaaaacaaggcatcgcgcccgaagacatgattgccaaagtgcgcgaagagcacctcgccgactttactggctttttcatcggttacgacaattattacagcacccattcccctgaaaacaaacagttttcccaagacatttaccgcgcgctgaaagccaacggcaagattgagagccgcgtcatcgagcagcttttcgaccccgaaaaacaaatgttcctgcccgaccgcttcgttaaaggcgaatgcccgaaatgccacgcccaagaccaatacggcgacaactgcgaagtctgcggcacgacctattccccgaccgaactgattaacccgtattccgccgtttccggcgcgaaacccgaattgcgcgaatccgaacacttcttcttcaaactgggagaatgcgccgacttcctcaaagcatggacttccggcaacaacccgcacgacggcaagccccatctgcaagccgaagccctcaacaaaatgaaagaatggctgggcgaaggtgaagaaaccaccctgtccgactgggatatttcccgcgacgcgccgtatttcggttttgaaatccccgacgcgccgggcaaatacttctacgtctggctggacgcgcccgtcggctacatggcgtcgtttaaaaacctgtgcgaccgcatcggcgtcgattttgacgaatacttcaaagccgacagccaaaccgagatgtaccacttcatcggcaaagacatcctctatttccacgccctgttctggcctgccatgctgcatttctccggccaccgcgccccgaccggcgtgtacgcacacggctttttgaccgtagacggacaaaaaatgtccaaatcgcgcggcacgtttatcaccgccaaatcctatctggaacaaggtttaaaccccgagtggatgcgctactacatcgccgccaaactcaacagcaaaatcgaagacatcgatttgaacctgcaagactttatcagccgcgtcaacagcgacctcgtcggcaaatacgtcaacatcgccgcccgcgcgtcaggttttatcgccaaacgctttgaaggccgtctgaaagacgttgccgacagcgaattgctggcaaaactgactgcgcaaagcgaagccattgccgaatgctacgaaagccgcgaatacgcccgcgccctgcgcgacatcatggccttggcagacattgtcaacgaatacgttgatgccaacaagccgtgggaactggcgaaacaagaaggccaagacgcacgcctgcacgaagtatgcagcgaactcatcaacgcctttaccatgctgaccgcctacctcgcccccgtcttgccgcaaaccgccgcaaacgccgccaaattcctgaatttggaagccatcacttgggcaaatacacgcgaaaccttgggcaaacacgccatcaacaaatacgaacatttaatgcaacgagtggagcaaaaacaagtggacgatttaatcgaagccaacaaacaaagcattcagacgacccccgcacctgccgccgaagaaagtcaatacgaaaaagttgccgaacaggcaagcttcgacgacttcatgaaaatcgatatgcgcgtcgccaaagtattgaactgcgaagccgtcgaaggcagcaccaaactcttaaaattcgacctcgatttcggttttgaaaaacgcattatcttctccggcatcgccgcgtcttatccaaatcctgctgaattgaacggccgcatggtcatcgccgtcgccaacttcgccccgcgcaaaatggcaaaattcggcgtatccgaaggcatgattctctccgctgccacggcagacgggaaactgaagctcttggatgtggatgcaggcgcgcaaccgggcgacaaagtcggttaa

SEQ ID NO: 29488 - DNA, 1839 bp, Neisseria meningitidis
atgtgcggtatcgtcggcgccatccgcgcccatcacaacgtcgtcgattttctgaccgacggtctcaaacgcctcgaataccggggttatgactcatcaggcattgccgtcaacaccgacggcaaaatcaaacgcgtgcgccgcgtcggacgcgtgcagcttatggaagacgcagcacgcgaaaaaggcatcagcggcggcatcggcatcgggcatacgcgctgggcgacacacggcggcgttaccgagccgaacgcccacccacacatcagcggcgggatgattgcggtcgtccacaacggcatcatcgaaaactttgaaagcgaacgcaaacgcttggaaggtttgggataccgttttgaatcgcaaacggataccgaagtcatcgcacacagcatcaatcacgaatacgcgcaaaacggcggcaaattgtttgaagctgtgcaggaagcggtcaaacgtttccacggcgcatacgccatcgcggttattgcccaagacaagcctgatgaattagttgtggcgcgtatgggctgcccgcttttggtcgctttgggcgacgatgaaacctttatcgcttcggacgtatccgccgtcatcgcctttacgcgccgcgtggcgtacctcgaagacggcgacatcgcgctgctggcttcagacggcatcaaaaggctgaccgataaaagcggcctgcccgccgaacgcaaagtcaaggtatccgaactctcgctcgcctctttggagctggggccgtacagccactttatgcaaaaggaaatccacgagcagccgcgcgcgattgcggacacggcggaagttttcctcgacggcggcttcatccccgaaaacttcggcaaaaacgccaaaagcgtgtttgaaagcatccgcagcgtcaaaatccttgcctgcggcacgtcctattacgccgcgctgaccgccaaatattggttggaatccatcgccaaaatcccgtccgatgtcgaaatcgccagcgaataccgataccgcagcgtgattgccgatccggaccaactggtcattaccatttcccaatccggcgaaacgctggacacgatggaggcgttgaaatacgcaaaatccttgggacaccgccacagcctctccatctgcaacgtgatggaatccgccctgccgcgcgaaagcagcctcgtgctttatacccgtgccggtgcggaaatcggcgtcgcctcaaccaaagcatttaccacgcagctggttgcgctgttcggtttggcggtaacgctggcgaaagtgcgcggtttggtttccgaagaagacgaagcacgttacaccgaagaactccgccagcttcccggcagcgtgcagcacgctttaaacctcgaaccgcaaattgccgcctgggcgcaacagtttgccaagaaaaccagcgcgctgtttttggggcgcggcatccattacccgattgccctcgaaggcgcgttaaaactgaaggaaatcacctacatccacgccgaagcctatcctgccggcgaactgaagcacgggccgcttgccttagtggacgaaaacatgcccgtcgtcgtcatcgcgcccaacgacagcctgttggacaaagtcaaagccaatatgcaggaagtcggcgcgcgcggcggcgaacttttcgtctttgccgacctcgacagcaattttaatgctaccgaaggcgtgcacgttatccgcgcaccgcgccatgtcggagaattatcccccgtcgtgcatactatccccgtgcagctcctttcctaccatgtcgccctcgcacgcggtactgatgtggacaaaccgcgcaacctggcgaaatccgttacggtcgaataa

SEQ ID NO: 29489 - DNA, 840 bp, Neisseria meningitidis
atgctggtcgcttttttaattatgttgcgcgagggtatcgaagccgcgctcatcgtcggcatcgttgccggttttctgaaacagtccggacattccaaactgatgcctaaggtctggttcggggtcgtccttgcttctttgatgtgtttggggctggggtacggcatccattcggcaacaggcgagattccccagaagcagcaggagtttgtcgtcggcatcatcggtttggttgccgttgccatgctgacttatatgattttatggatgaaaaaggcggcgcgttcgatgaagcagcagcttcaggattctgtacaggcggctttgaaccgtggcagcggtcaaggatgggccttggttggtatggcgtttcttgccgtggcgcgcgaaggtttggagagcgtttttttcctgcttgctgtattcaaacagagcccgacgtggcagatgccggccggtgcggtagcgggggttttggctgccgccgtgattggcgcgttgatttatcagggtgggatgcgcctgaatctggcgaagtttttccgttggacgggggcgtttttgattgtcgttgccgccggcctgcttgccggctcgctgcgcgcgctgcacgaagcaggcatttggaacgcgcttcaggacattgtgttcgactcatcaaaatatttgcacgaagacagtccgttaggtgtgctgctcggcggatttttcggctataccgaccatccgacgcagggcgaggccttggtttggctgctgtaccttattcccgtcatgacttggtttttgtgcggcagcaggccgtctgaaactttaacccgtaaagaggagctgaaatga

SEQ ID NO: 29490 - DNA, 1266 bp, Neisseria meningitidis
atgagcaaaaaccaacccgcacaaccgaccaggcgcactctttttaaaaccgcgatcgcagctggagcagtcggcgcaatcggaggttatctcggcggcaaaaaacggggcgaaaccgccgaacgcaccgccgaaagccaacactcgccccaagcctatccctgctacggcgaacatcaggcaggcatcgttacgccgcagcaggcgttttcgattatgtgcgccttcgacgtaaccgcgcaaagtgccaagcagctggaaaacctgttccgcacgctgaccgcccgcatcgagtttctcacccaaggcggcgaataccaagacggcgacgacaaacttccgccagccggcagcggcattttgggcaaagccttcaaccccgacgggttgaccgttaccgtgggggtgggcagcagcctgtttgacggccggttcggactcaaagacaaaaaaccgattcatttgcaggaaatgcgcgacttctccaacgataagctgcaaaaaagctggtgcgacggcgatttgagcctgcaaatctgtgccttcacccccgaaacctgccaagccgccctgcgcgacatcatcaaacacaccgtccaaaccgccgttatccgctggagtatcgacgggtggcagcctaaatccgaacccggcgcgatggcggcgcgcaacctgttgggcttccgcgacggcacgggcaaccccaaagtttccgaccccaaaactgccgacgaggttttgtggacgggggtggccgccaacagcctcgacgaaccggagtgggcgaaaaacggcagctatcaggcagtccgccttatccgccactttgttgagttttgggacaggacgccgcttcaagagcaaaccgacattttcgggcggcgcaaatacagcggcgcgccgatggacggcaaaaaagaagccgaccaaccggattttgccaaagaccccgaggggaataccacgcccaaagacagccatatacgcctggcgaatccgcgcgatcccgagttccttaaaaaacaccgcctcttccgccgcgcctacagctattcgcgcggactcgcctcaagcggacagcttgatgtcgggctggtgttcgtctgctatcaggcaaaccttgccgacggattcatcttcgtgcaaaacctcctcaacggcgaaccgctggaagaatacatcagccccttcggcggcggctatttcttcgtcttgcccggcgtggaaaaaggcggctttttggggcaagggctgctgggcgtataa

SEQ ID NO: 29491 - DNA, 1371 bp, Neisseria meningitidis
atgccgcaaaacactttaaacatcgtcatcctcgccgccggcaaaggcacgcgcatgtattccaaaatgcccaaggttttgcacgaaatcggcggcgaaacaatgctcgggcgcgttatcgacaccgccgccgcgctgaatccgcaaaacatctgcgtcgtcgtcggccacggcaaagagcaagttttggacaccgtcaaacgcgatgtcgtctgggttgaacaaaccgaacagctcggcaccggccacgccgtcaaaaccgccctgccccaccttgccgccgaaggccgcacgctggtgttgtacggcgacgttcctttaattgacgttgaaaccctcgaaaccctgctcgaagccgcaggcaacgaagtcgggctgttgaccgacgtgcccgccgacccgtcaggtttggggcgcatcatccgcgacagcagcggcagcgtaaccgccatcgtcgaagaaaaagatgccgacgccgcccaaaaagccgtgaaagaaatcaacacaggcatcctcgtcctgcccaacgccaaactcgaagcctggttgaacagcctttccagcaacaatgcccaaggcgaatattatttaaccgacctcattgccaaagccgttgccgacggcatcaaaattcatcccgtccaagtccgctcctcccatctggccgccggcgtgaacaacaaactccagctcgccgaactcgaacgcatcttccaaactgaacaggcgcaagaattgctcaaagcaggcgtaaccctgcgcgacccggcacgtttcgatttacgaggccgtctgaaacacgggcaagatgtcgtaattgatgtgaactgtatctttgaaggcaaaatcgaactcggcgacaacgtcgaaatcggtgccaactgcgtcatcaaaaacgctaaaatcggcgcaaacagcaaaatcgcccccttctcccacctcgaaggctgcgaagtcggcgaaaacaaccaaatcggcccctatgcccgcctgcgtccgcaagccaaactggctgacgatgtacacgtcggcaacttcgtcgaaatcaaaaacgccgccatcggcaaaggcaccaaagccaaccacctcacctacatcggcgatgccgaagtcggcagcaaaaccaacttcggcgcaggtacgattattgccaactacgacggcgtgcacaaacacaaaaccgtcatcggcgacgaagtgcgcatcggttcaaactgcgtcttggtctcccccgtcaaaatcggcaacaaagtaaccaccggcgcgggcagcacgattacccgcaatgtcgaagacggcaaactcgccctcgcccgctcccgccaaaccatcatcgacggctgggtgaggcctgaaaaaaacaaacaataa

SEQ ID NO: 29492 - DNA, 1002 bp, Neisseria meningitidis
atgaaacggaaaatttggctgctgccgctgctggcggtttcggcatacctgcaggcgcagacggaagtcaggctggcggtgcataagtcgttcagcctgcccaaagggctgattgcgcgtttcgagcgggcaaacgatgcgaaagtgtcgattattcaggcgggcggcgcgaacgaaatgctcaacaaactgattttgagccgcgccaacccgattgccgacgcggtgtatggtttggacaacgccaatatcggcaaggcgcgggaaatgggcattttggcggcggcgcaacccgaatccgcccccgtcgcggtcgggctgccttcggctttggcggtcgattacggctatgtgtccatcaattacgacaaaaaatggtttgaaggcaaaaagcttcctctgccgcaaaccctgcaggatttgacccgccccgaatataaaaacctattggtcgtgccgtcccccgccacgtcgtccccggggctgggcttcctgatggcgaacatcagcggtctgggcgaagaaggcgcgttcaaatggtgggcacagatgcggcagaacggcgtgaaggtcgccaaaggctggagcgaggcgtattacaccgacttttcgcacaacggcggcgcgtatccgctggtggtcggttatgccgccagcccggcggcggaagtgtatttttccaaaggcaaatacagcgagccgccgacgggcaacctgtttttaaaaggcggcgtattccgccaggtcgaaggcgcggcagtcttgaagggcgcgaaacagccgaagctggcggcaaaactggtgcaatggctgcaaagtcgggaagtgcagcaggcggttccgtccgaaatgtgggtttaccccgccgtcaaaaacacgcgcctgcccgacgtgttccgcttcgcccaagccccgacgcacaccaccgcccccgcgcagcgcgatattgatgcgaaccagcgcggatgggtttcccgttggattagaacggttttgaaataa

SEQ ID NO: 29493 - DNA, 849 bp, Neisseria meningitidis
atggacttcaaacaatttgattttttacacctgataagtgcttccggctgggagcatctggctgaaaaggcgtgggcgttcgggctgaaccttgccgccgcgctgcttatttttttggtcggaaaatgggcggcgaaacgcattgtcgccgtgatgagggcggcgatgacgcgcgcgcaggtcgatgccacgctgattagttttttgtgtaatgttgccaatatcggcttattgattttggtgattattgccgcattgggcagattgggcgtttccacaacatccgtaaccgccttaatcggcggcgcgggtttggcggtggcgttgtccttgaaagaccagctgtccaattttgccgccggcgcgctgattatcctgttccgcccgttcaaagtcggcgattttatccgcgtcggcggttttgaaggatatgtccgagagattaaaatggtgcagacttctttgcggacgaccgacaacgaagaagtcgtgctgcccaacagcgtggtgatgggcaacagcatcgtcaaccgttccacactgccgctgtgccgcgcccaagtgatagtcggcgtcgattacaactgcgatttgaaagtggcgaaagaggcggtgttgaaagccgccgtcgaacaccccttgagcgttcaaaacgaagagcggcaggccgccgcctacatcaccgccttgggcgacaatgccatcgaaatcacattatgggcttgggcaaacgaagcagaccgctggacgctgcaatgcgacttgaacgaacaagtggtcgaaaacctccgcaaagtcaatatcaacatcccgttcccgcaacgcgacatacacatcatcaattcttaa

SEQ ID NO: 29494 - DNA, 1266 bp, Neisseria meningitidis
atgttcagcttcttccgtcgcaagaaaaaacaggaaacgccggctctcgaggaggctcaaattcaggaaaccgcagcaaaagcagagtccgaaaccgctcaagtaattgaaaatattaaagaagatgctgaatctttagcagaaagcgtcaaagggcaggtcgaatcggctgttgaaaccgtcagcggtgcggttgaacaagtaaaggaagccgttgccgagatgctgtctgaagcagaggaagcggcggaaaaagcagcggaacaagtcgaagcggcaaaagaagccattgccgaaaccgtcggcgaggctgtcgggcaagttcaagaagccgttgcaacaactgaagaacacaagctcggttgggcggcgcgtttgaaacaaggtttgaccaaatcgcgcgacaaaatggcgaaatcgctggcgggcgtgttcggcggcggacaaatcgacgaagatttgtacgaagagctggaaaccgtgctgattaccagcgacatgggcatggaagccaccgaatacctgatgaaagacgtgcgcgaccgcgtcagcctcaaagggctgaaagacggcaacgaattgcgcggcgcgctgaaagaagccttgtacgacctgattaagcctctagagaaaccgctggttttgcccgaaaccaaagagccgtttgtcatcatgcttgccggcatcaacggcgcgggcaaaaccacatccatcggcaaactcgccaaatatttccaagcgcagggcaaatctgtgctgcttgccgccggcgatactttccgcgccgccgcgcgtgagcagcttcaagcttggggcgaacgcaacaacgttaccgtgatttcgcaaaccacaggcgattccgccgccgtttgttttgatgccgtccaagccgccaaagcgcgcggcatcgacattgtgcttgccgacaccgccggccgcctgcccacgcagcttcatttgatggaagaaatcaaaaaagtgaaacgcgtgctgcaaaaagccatgcccgacgcgccgcacgaaatcatcgtcgtgcttgatgccaacatcgggcaaaacgccgtcaaccaagtcaaagcctttgacgacgcattagggctgaccggtttaatcgtgaccaaactcgacggcacggcaaaaggcggcatcctcgccgcgcttgcttccgaccgccccgtccccgtccgctatatcggcgtgggcgaaggcatagacgatttgcgcccgtttgacgcgcgcgcgtttgtggacgcactgctggattga

SEQ ID NO: 29495 - DNA, 4116 bp, Neisseria meningitidis
atgccgtctgaacaccgccctaccccgccggcaaaaaaacgccgcccgctgctgaagctgtcggcggcactgctgtctgttctgattttggcagtatgtttcctcggctggctcgccggcacggaagcgggtttgcgcttcgggctgtaccaaatcccgtcttggttcggcgtaaacatttcctcccaaaacctcaaaggcacgctgctcgacggcttcgacggcgacaactggtcgatagaaaccgagggggcagaccttaaaatcagccgcttccgcttcgcgtggaaaccgtccgaactgatgcgccgcagcctgcacattaccgaaatttccgccggcgacatcgccatcgttaccaaaccgactccgcctaaagaagaacgcccgccgctcagccttcccgacagcatagacctgcctgccgccgtctatctcgaccgcttcgagacgggcaaaatcagcatgggcaaagcctttgacaaacaaaccgtctatctcgaacggctggatgcttcataccgttacgaccgcaaaggacaccgcctcgacctgaaggctgccgacacgccgtggagcagttcgtcggggtcagcctcggtcggcttgaaaaaaccgtttgccctcgataccgccatttacaccaaaggcggactcgaaggcaaaaccatacacagtacggctcggctgagcggcagcctgaaggatgtgcgcgccgaactggcgatcgacggcggcaatatccgcctctcgggaaaatccgtcatccacccgtttgccgaatcattggataaaacattggaagaagtactggtcaaagggttcaacatcaatccgtccgccttcgtgccttccctgcccgatgccgggctgaatttcgacctgaccgccatcccgtcgttttcagacggcatcgcgctggaaggctcgctcgatttggaaaacaccaaagccggctttgccgaccgcaacggcatccccgtccgtcaggttttaggcagctttgtcatccggcaggacggcacggtgcatatcggcaatacgtccgtcgccctgctcggacggggcggcatcaggctgtcgggcaaaatcgacaccgaaaaagacatcctcgatttaaatataggcatcaactccgtcggcgcggaagacgtactgcaaaccgcgttcaaaggcaggttggacggcagcatcggcatcggtggcacgaccgcctcgcccaaaatctcttggcaactcggcatcggcacggcgcgcacggacggcagcctcgccattgcaagcgaccccgcaaacggacagcggaaactggtgctcgacaccgtcaacatcgccgccgggcaaggcagcctgaccgcgcaaggctatctcgagctgtttaaagaccgcctgctcaagctggacatccgttcccgcgcattcgacccttcgcgcatcgatccgcaacttccggcaggcaatatcaacggctcaataaaccttgccggcgaactggcaaaagagaaattcacaggcaaaatgcggtttttacccggcacgttcaacggcgtaccgattgccggcagtgccgacattgtttacgagtcccgccaccttccgcgtgccgccgtcgatttgcggctggggcggaacattattaaaacagacggcggcttcggcaaaaaaggcgaccggcttaacctcaatatcaccgcacccgatttatcccgtttcggtttcggactcgcggggtctttaaatgtacgcggacacctttccggcgatttggacggtggcatccgaacctttgaaaccgacctttccggcgcggcgcgcaacctgcacatcggcaaggcggcagacatccgttcgctcgatttcacgctcaaaggttcgcccgacacaagccgcccgatacgcgccgacatcaaaggcagccgcctttcgctgtcgggcggagcggaggttgtcgataccgccgacctgatgctggacggcacgggcgtgcagcaccgcatccgcacacacgccgccatgacgctggatggcaaaccgttcaaattcgatttggacgcttcaggcggcatcaacagggaacttacccgatggaaaggcagcatcggcatcctcgacatcggcggcgcattcaacctcaagctgcaaaaccgtatgacgctcgaagccggtgcggaacgcgtggcggcaagtgcggcaaattggcaggcaatgggcggcagcctcaacctgcaacacttttcttgggataaaaaaaccggcatatcggcaaaaggcggcgcacacggtctgcatatcgccgagttgcacaatttcttcaaaccgcccttcgaacacaatctggttttaaacggcgactgggatgtcgcctacgggcgaaacgcgcgcggctacctcaatatcagccggcaaagcggcgatgccgtattgcccggcgggcaggctttgggtttgaacgcattttccctgaaaacgcgctttcaaaacgaccgtatcggaatcctgcttgacggcggcgcgcgtttcgggcggattaacgccgatttggacatcggcaacgccttcggcggcaatatggcaaatgcaccgctcggcggcaggattaccgcctcccttcccgacttgggcacattgaagccctttctgcccgccgccgcgcaaaacattaccggcagcctgaatgccgccgcgcaaatcggcggacgggtcggctctccgtccgtcaatgccgccgtcaacggcagcagcaactacgggaaaatcaacggcaacatcaccgtcgggcaaagccgctctttcgataccgcgcctttgggcggcaggctcaacctgaccgttgccgatgccgaagtattccgcaacttcctaccggtcggacaaaccgtcaaaggcagcctgaatgccgccgtaaccctcggcggcagcatcgccgatccgcacttgggcggcagcatcaacggcgacaaactctattaccgcaaccaaacccaaggcatcatcttggacaacggctcgctgcgttcgcatatcgcgggcaggaaatgggtaatcgacagcctgaaattccggcacgaagggacggcggaactctccggtacggtcggtatggaaaacagcggacccgatgtcgatatcggcgcggtgttcgacaaataccgcatcctgtcccgccccaaccgccgcctgacggtttccggcaacacccgcctgcgctattcgccgcaaaaaggcatatccgttaccgggatgattaaaacggatcaggggctgttcggttcgcaaaaatcctcgatgccgtccgtcggcgacgatgtcgtcgtattaggcgaagtcaaaaaagaggcggcggcaccgctccccgtcaatatgaacctgactttagacctcaatgacggcatccgcttcgccggctacggcgcggacgttaccataggcggcaaactgaccctgaccgcccaatcgggcggaagcgtgcggggcgtgggcacggtccgcgtcatcaaagggcgttataaggcatacgggcaggatttggacattaccaaaggcacggtctcctttgtcggcccgctcaacgaccccaacctcaacatccgcgccgaacgccgcctttcccccgtcggtgcgggcgtggaaatattgggcagcctcaacagtccgcgcattacgctgacggcaaacgaaccgatgagtgaaaaagacaagctctcctggctcatcctcaaccgcgccggcagtggcagcagcggcgacaatgccgccctgtccgcagccgccggcgcgctgcttgccgggcaaatcaacgaccgcatcgggctggtggatgatttgggctttaccagcaagcgcagccgcaacgcgcaaaccggcgaactcaaccccgccgaacaggtgctgaccgtcggcaaacaactgaccggcaaactctacatcggctacgaatacagcatctccagcgcggaacagtccgtcaaactgatttaccggctgacccgcgccatacaggcggttgcccgtatcggcagccgttcgtcgggcggcgagctgacatacaccatacgtttcgaccgcttctccggttcggacaaaaaagactccgccggaaacagcaaaggaaaataa

SEQ ID NO: 29496 - DNA, 720 bp, Neisseria meningitidis
atgacacagcaaatcaaatacaaacgcgtattactgaaactctccggcgaatccctgatgggttccgatccgttcggcatcaatcacgacaccatcgtccaaaccgtcggcgaaattgccgaagtcgttaaaatgggcgtacaggtcggcatcgtcgtgggcggcggcaatattttccggggcgtatccgcccaagcaggcagcatggaccgcgccactgccgattacatgggtatgatggcgaccgtgatgaacgccttggcactcaaagacgcatttgaaactttaggcatcaaagcgcgcgtacaatccgcactgtctatgcagcaaatcgctgaaacttacgcccgtcctaaagccatccaatatttggaagaaggcaaagtcgtgatttttgccgccggtaccggtaacccgttcttcacgaccgacactgccgccgcattgcgcggtgcggaaatgaactgcgacgtgatgctcaaagccaccaacgtcgacggtgtatacaccgcagatccgaaaaaagacccgtccgccacacgctacgaaaccattacttttgacgaagccttgttgaaaaacctcaaagtcatggacgcgaccgctttcgccctctgccgcgaacgcaagctcaatatcgtcgtcttcggcatcgccaaagaaggctcgctcaaacgcgtcattaccggcgaagacgagggaacgctggttcactgctga

SEQ ID NO: 29497 - DNA, 855 bp, Neisseria meningitidis
atggcagaaattactgcaaaaatggttgccgacctgcgcgccgctaccggcctgggcatgatggaatgcaaaaaagccttggttgaagccgaaggcaacttcgacaaagccgaagaaatcctgcgtatcaaatccggtgcgaaagccggtaaactggccggccgtaccgctgccgaaggcgtattggcttacgcgatcaacggcaatgtcggcgcattggtcgaagtaaactgcgaaaccgacttcgttgctaaagacgcgggcttcgtagaatttgccaacttcgttgcgaaaactgctgccgagaaaaaaccggcttctgttgaagaactgagcgaactggttgaagcagaacgcaaagccatcatcgccaaattgggcgagaatatgtctgtccgtcgcttccaagtgatcgacactgccaaccaactggttgcctacatccacggcgcattggcgaccgaaggcgtattggttgagtacaaaggctctgaagacgtagcacgcaaaatcggtatgcatattgttgccgctaaaccacaatgcgtaagcgaagccgaagtagatgccgaaaccgttgaaaaagaacgccacatctacaccgagcaagccatcgcttccggcaaacctgccgacatcgccgctaaaatggttgaaggccgcatccgtaaattcttggctgaaatcactctgaacggccaagcattcgtgatgaaccccgatcaaactgttgcccaattctctaaagaaaacggcactgaagtgatcagcttcgtacgctacaaagtaggcgatggtattgagaaaaaagccgtcgattacgcagccgaagttgctgccgctgctaaagtgtaa

SEQ ID NO: 29498 - DNA, 729 bp, Neisseria meningitidis
atgtctcaaattactatgcgtcagatgattgaagccggtgtccacttcggccaccaaacccgtttctggaacccgaaaatggcacaatacattttcggcgcgcgcaacaaaatccacatcgtcaacctggaaaaaaccctgccgatgttccaagacgcgcaagaagccgtacgtcgtttggttgccaacaaaggtacagtattgttcgtaggtaccaaacgccaagcccgcgacatcatccgcgaagaagcgacccgcgccggtatgcctttcgtcgattaccgctggttgggcggtatgctgaccaactacaaaaccgttaagcaatccatcaaacgcctggaagaaaaaaccgcagccttggaaaatgctgccgaaagcggtttcagcaaaaaagaaattctggaaatgcaacgcgatgttgaaaaactggaacgttctttgggcggtatcaaaaacatgaaaggcctgcctgacgcgattttcgttatcgataccggctaccaaaaaggtactctggttgaagctgaaaaattgggcatccctgttatcgccgtagtcgataccaacaacagccccgacggcgtgaaatacgttatccccggcaacgacgactccgccaaagccatccgcctgtactgccgcggcatcgctgacgcagttttggaaggcaaaaaccaagcgctgcaagaaaccgtagccgctgcccaagaagccgctgccgagtaa

SEQ ID NO: 29499 - DNA, 582 bp, Neisseria meningitidis
atgaggaacgaggaaaaacacgccttgcgccgagagttgcgccgcgcccgcgcgcagatggggcatcaagggcggttggcggcggggcaaacgattaaccgcctgctcaaacgttatatcaagcgtggtcggaaaatcggcgtgtattggccgatgggcaaggaattgcgtttggacggctttgtccgcgcggcgcaaaaacgcggtgcaaaactttatctgccttatatcgaaccgcgttcgcggcggatgtggtttacgccgtatcctgaaagcggaatggaacgggagcgcatacggggcagggcgaagttgaacgtgccgcagtttgcagggcgcaaaatccgcgtgcacggtttgtcggtattgctcgtcccgcttgtcggcatagaccgcgagggctaccgcttaggacaggcaggcggctattacgatgcgacgcttgcggcgatgaaataccgtttgcaggcaaaaaccgtgggcgtgggctttgcctgccagtttgtggacaggctgccgcgcgaaccgcacgatctgctgctggacggttttgtgtcggaggcggggatattgtgcttttag

SEQ ID NO: 29500 - DNA, 1467 bp, Neisseria meningitidis
atggctgaagcgacagacgttgtcttggtgggcggcggcattatgagcgcgactttgggcgttttgctcaaagaactcgaaccgtcttgggaaatcaccctgattgaacgcttggaagatgtggcgttggaatcgtcaaacgcgtggaacaacgccggcacggggcattccgcgctgtgcgaattgaactatgcgccgttgggtgcaaatgggattatcgatccggcgcgcgccctcaatattgccgaacagtttcatgtcagccgccagttttgggcgacgttggtcgcggaaggcaagttggaagacaattccttcatcaatgccgtgccgcatatgtctttggtgatgaatgaagaccattgttcttatcttcaaaaacgttatgacgcgtttaaaacccaaaaactttttgaaaatatggaattttccaccgatcggaacaaaatttccgattgggctccgctgatgatgcgcggccgggacgaaaaccaacccgtcgccgccaactactccgccgaaggcacggatgtcgatttcggacggctgacgcgccaaatggtgaaatatttgcagggcaagggcgtaaaaaccgagttcaaccgccacgtcgaagacatcaaacgcgaatccgacggcgcgtgggtgctcaaaaccgccgatacccgcaaccccgacgggcagctcaccctccgtacccgcttcctcttcctcggcgcgggcggcggcgcgctgaccctgctgcaaaaatccggcatccccgaaggcaaaggctacggtggctttcccgtgtccggcctgttcttccgcaacagcaaccccgaaaccgccgaacaacacaacgccaaagtgtacgggcaggcttccgtcggcgcgccgccgatgtccgtcccgcacctcgacacacgcaacgtggacggcaaacgccaccttatgttcggcccttacgcaggcttccgttccaacttcctcaagcaaggctcacttatggatttgccgctgtccatccatatggacaacctctatcctatgctgcgcgccggctgggcgaatatgccgctgaccaaatacctgctgggcgaattgcgtaaaaccaaagaagaacgcttcgcctccctgctggaatactaccccgaggcaaaccccgacgactgggaactcatcaccgcagggcaacgcgttcaaatcattaaaaaagactccgaaaaaggcggcgtgttgcagtttggtacggagattgtcgcacacgccgacggctcgctcgccgcattgctgggcgcgtcgccgggcgcatcgaccgccgtgccgctgatgatccggctgatgcaccaatgcttccccgaacgcaccccgtcttgggaaggccgtctgaaagagctggtaccgggttacggcatcaagttgaacgaaaaccccgaaagggcggatgaaattatcgcctataccgcgaaagtgttggatatttaa

SEQ ID NO: 29501 - DNA, 876 bp, Neisseria meningitidis
atgtttcagaaacatttgcagaaagcctccgacagcgtcgtcggagggacattatacgtggttgccacgcccatcggcaatttggcggacattaccctgcgcgctttggcggtattgcaaaaggcggacatcatctgtgccgaagacacgcgcgttaccgcgcagcttttgagcgcgtacggcattcagggcaaactcgtcagcgtgcgcgaacacaacgaacggcagatggcggacaagattgtcggctatctttcagacggcatggttgtggcacaggtttccgatgcgggtacgccggccgtgtgcgacccgggcgcgaaactcgcccgccgcgtgcgtgaggtcgggtttaaagttgtccctgttgtcggcgcaagcgcggtgatggcggctttgagtgtggctggtgtggcgggatccgatttttatttcaacggttttgtaccgccgaaatcgggcgaacgtaggaaattgtttgccaaatgggtgcgggtggcgtttcccgtcgtgatgtttgaaacgccgcaccgcatcggggcgacgcttgccgatatggcggaactgttccccgaacgccgattaatgctggcgcgcgaaatcacgaaaacgtttgaaacgttcttaagcggcacggttggggaaattcagacggcattggcggcggacggcaaccaatcgcgcggcgagatggtgttggtgctttatccggcgcaggatgaaaaacacgaaggcttgtccgagtccgcgcaaaacatcatgaaaatcctcacagccgagctgccgaccaaacaggcggcggagcttgccgccaaaatcacgggcgagggaaaaaaagctttgtacgatctggcactgtcttggaaaaacaaatga

SEQ ID NO: 29502 - DNA, 1155 bp, Neisseria meningitidis
atgaaattcatcgacgaagcaaaaatcgaagtcgccgcaggcaaaggcggtaatggcgcaaccagtttccgccgcgaaaaattcgtaccgcgcggcggcccggacggcggcgacggcggcaaaggcggcagcgtttgggcagaagccgacgaaaacaccaacaccctcgtcgaataccgcttcgtcaaacgctaccaagccaaaaacggcgaaaaaggccacggttccgaccgttacggcgcaggtgcggacgacatcgtcctcaaaatgcccgtcggcacccttatccgcgacctcgacaccggcgaaaacgttgccgacctcacttatcacggacagcgcgtctgccttgccaaaggcggcaaaggcggcttgggcaacatccacttcaaatcgtccgtcaaccgcgccccgaaacaatccacccccggcgaagaaggcgaagcccgttccctgcaactcgaactcaaagtcctcgccgatgtcggcttattgggtatgcccaacgccggcaaatccaccctgattaccgccgtatccgccgcacgccccaaaatcgccaactaccccttcaccaccctgcatccaaacttaggcgtggtacgcatcgacgaaaaccacagcttcgtgatggccgacatccccggcctgattgaaggcgcggcagaaggcgcaggcctcggccatcgtttcctcaaacacttatcacgtaccggcctgctgctgcacgtcgtcgatttggccccgtttgacgaaaccgtcaaccccgccgaagaagccctcgccatcatcaacgaattgcgcaaatacgacgaagaactctacggcaaaccacgctggctggtgctgaacaaactcgacatgctcgatgaagaagaagcccgggcgcgaacagccgccttcctcgaagccgtcggctgggactacccgaaaccagacgaccgcttccaattcgacatggaaaccccgcgcctcttccaaatcagcgcgctgacccaccaaggcacgcaggaattggtacaccaaatcaaccaatacctgatcgagaaaaaacgtatcgaagctgaaaaagcggaggcggagcgggcagcgacaaatgttgagattgccgagcaacagcctaaaacggatacgggcgtgtttaagccggagtga

SEQ ID NO: 29503 - DNA, 2100 bp, Neisseria meningitidis
atgactacaatcacagaaaagagattaacctttgcttttcctgaagattattacgttaccaagtatgacgaatgggaacattataaaatttttcagaacagttgtaatttacgtaataaaattgatacaaatgaaaagggaaagaacgggataaatcaaagtgtagatgacgataatggcagctcaggtgtagatataatagcccttcatgagtcgacactttggctaatcgaaattaaagattattaccgacttgggcttgagccaaatgcccaatcaatagatgaaaaactttctgacctaccatatttaatcgcaagaaaaattcgagattcattggcaggattggtttctgctaaatttaaagcagaaaaacaggaagaaaaagatttttctcgcttggctttagattgtaacgaaataaaaatagtccttcatattgaaatgcctagtataagaagtaaactttatccctcgtcatcagatttagcaaacttattaaaagataagtttaaattatcagaatttacaaaaaattttgcaaactgttatgcagaaccaattttcacaaatatcagccatattaataatccgcaactacgtaatgttccttggtccgtatctacaggaacagaacagaaattatcatccgagcaacaaagattaatccataatcccatgaccaccatctacaacacccttacccgccaaaaagaaccctttgcccccatcgaccctaaaaacgtgcgtatgtacgtttgcggcatgactgtttacgactattgccacttaggccatgcccgtgtgatggtggtgtttgacatgattgcccgctggttgcgcgagtgcggttatccgctcacttatgtgcgcaacatcaccgacatcgacgacaaaatcattgcccgcgcggctgaaaacggcgagactatcggcgaactgaccgcgcgtttcattcaggcgatgcacgaagatgccgatgctttgggcgtgttgcgtccggacatcgaaccgaaggcaacggaaaacatcccgcaaatgattgccatgattgaaaccctgattcaaaacggtaaggcctatcctgccgcaaacggcgacgtttactacgccgtgcgcgagttttccgcttacggacaattatcgggcaaatcattggacgacctgcgcgcgggcgaacgtgtggaagtggacggtttcaaacgcgatccgcttgattttgtgttgtggaaagcggcgaaagcaggcgagccggcgtgggaaagcccttggggcaacggccggccgggttggcacattgaatgctccgccatgagtgaaaacctgttcggcaataccttcgacatccacggcggcggcgcggatttgcagtttccgcaccacgaaaacgaaattgcccaaagcgtcggcgcgacggggcatacctgcggccatcatcacgcgcaaacccaccacggtcaaagcattgccagccacgtcaaatactggttgcacaacggctttatccgcgtggacggcgaaaaaatgtccaaatcgttgggcaacttcttcactatccgcgaagtgttgaaacaatacgaccccgaagtcgtgcgtttcttcatcctgcgcgcccactaccgcagcccgttgaattactccgacgcacatttggacgacgcaaaaggtgcgctgacccgcctgtacactacattgaaaaacacaccagcggctgagtttgacttatctgaaaacgtcaacgactacacccgccgtttctacgccgccatgaacgacgattttggtacggtcgaagcggttgccgtgttgttcgaactggcaggcgaagtgaacaaaaccaatgacgcacagctcgccggctgcctgaaagccttgggcggcatcatcggactgctgcaacgcgatccgaccgagttcctgcaaggcggcgcggcttcagacggtctctccaacgaagaaatcgaagacttgatcgcccggcggaaacaggcgcgcgccgataaaaactgggcggaatccgaccgcatccgcgaccttctgaacgaacacaaaatcattttggaagacaacgccggcggcacgacttggcggcgcggttaa

SEQ ID NO: 29504 - DNA, 1116 bp, Neisseria meningitidis
atgaaagtaggtttcgtcggctggcgcggtatggtcggttcggttttgatgcagcgtatgaaagaagaaaacgacttcgcccacattcctgaagcgtttttctttaccacttccaacgtcggcggcgcagcccctgatttcggtcaggcagccaaaacattgttggatgccaacgatgttgccgaattggcaaaaatggacatcatcgttacctgtcagggcggcgattacaccaaatccgtcttccaacccctgcgcgacagcggctggaacggctactgggttgacgcggcgtcatccctgcgcatgaaagacgatgcgattatcgtcctcgacccggtcaaccgcaacgtcatcgacaacggcctcaaaaacggcgtgaaaaactacatcggcggcaactgtaccgtttccctgatgctgatggctttgggcggtctgttccaaaacgatttggtcgaatgggcaaccagcatgacctaccaagccgcttccggtgcgggtgcgaaaaacatgcgcgaactcatcagcggcatgggcgcgattcacgccaaagtagcggacgagcttgccgatccttccagcgcgattctcgacatcgaccgcaaagtgtccgatttcctgcgcagcgaagactatccgaaagccaacttcggcgtaccgctcgccggcagcctgattccgtggattgacgtggatttgggcaacggtcaatctaaagaagaatggaaaggcggtgtggaaaccaacaaaatcctcggccgcagcgacaatccgaccgtaatcgacggcttatgcgtacgcatcggctctatgcgctgccacagccaagccctcaccctgaagctgaaaaaagacctgcctgtttccgaaatcgaagcgattttggcaggtgcaaacgactgggtgaaagtcatccctaacgaaaaagaagccagcatacacgagctgactcctgccaaagttaccggcacactgtctgttcctgtcggccgtatccgcaaactggagatgggcggcgaatacatcagcgcgttcactgtcggcgaccaactcttgtggggggctgccgagccgttgcgccgcgtgctgcgtatcgtgttgggcagcctgtaa

SEQ ID NO: 29505 - DNA, 507 bp, Neisseria meningitidis
atggttgacgcttggtctgttcctgattttgaatcgaaaatctgtccgcccgaggcgttggcggcgcgtttggcgttgttgccgcgcccgctggtgtttaccaacggctgtttcgacatcctccacagggggcacgttacttatctggcgcaggcgcgttcgatggggggcgcgttggtgctggcgttgaataccgatgcttcggtgcggcgtttgggcaagggcggcgaccgcccgattaatcctttggagaaccgtgccgccgttgccgccgcgttggaaagtgtggatttggtaacgtggtttgacggggatacgccggcggcgttgattgaggcggtcaaacctgagattttggtcaagggcggcgattgggctgcggataagattgtcggtgcggcagaaacgttggcgcgcggcggtcaggtgttttcaattccgtttctgcaccagacttcgacaacgaagactttggcaaaaatccgtgcggcagagggcggaaaatga

SEQ ID NO: 29506 - DNA, 789 bp, Neisseria meningitidis
atgctcaccctgtacagcgaaactttcccttcgcggctgctgctcggcacagccgcctacccgacccctgaaatcctcaaacaatccgtccgaaccgcccggcccgcgatgattaccgtctcgctgcgccgcgcgggatgcggcggcgaggcgcacggtcaggggttttggtcgctgcttcaagaaaccggcgttcccgtcctgccgaacacggcaggctgccaaagcgtgcaggaagcggtaacgacggcgcaaatggcgcgcgaagtgtttgaaaccgattggattaaactcgaactcatcggcgacgacgacaccttgcagccggatgtgttccaacttgtcgaagcggcggaaatcctgattaaagacggcttcaaagtgctgccttattgcaccgaagacctgattgcctgccgccgcctgctcgacgcgggctgtcaggcgttgatgccgtgggcggccccgatcggcacgggtttgggcgcggttcacgcctacgcgttgaacgtcctgcgcgaacgcctgcccgacacgccgctgattatcgacgcgggcttgggtttgccctcacaggcggcacaagtgatggaatggggctttgacggcgtgcttttgaatactgccgtttcccgcagcggcgatccggtcaatatggcacgcgccttcgcactcgccgtcgaatccggacggctggcatttgaagccggaccggtcgaagcacgcgacaaagcgcaagccagcacgccgacagtcggacaaccgttttggcattcggcggaatattga

SEQ ID NO: 29507 - DNA, 618 bp, Neisseria meningitidis
atgaccttcctgccactcaaatccccgctcaaattctacgccgtcgtccccaccgccgattgggtcgagcgcatggtcgaagcaggtgccgacacggtgcaactgcgctgcaaggccctgcacggcgatgaattgaaacgcgaaatcgcccgctgtgtcgccgcctgtcagggcagccatacgcagcttttcatcaatgaccactggcgcgaggcaatcgaagcaggcgcgtacggcgtgcatctcggacaagaagacatggacaccgccgaccttgccgccatcgccgccgccggtttgcgcttgggtttgagtacgcactccgttgccgaactcgaccgcgccctgtccgtacaccctagctacatcgccagcggcgcgattttcccgaccacgaccaagcaaatgcccaccgccccgcaaggcttggacaaactgcgcgaatacgtcaaacaggcaggcggcacgcccgtcgtcgccattggcggcatcgatttgaacaacgcccgagccgtactcgccaccggcgtttcctcactcgccgccgtccgcgccgtaaccaaagcggcaaatcccgaagcggtggttaaagcgtttcaggctttgtgggatggataa

SEQ ID NO: 29508 - DNA, 822 bp, Neisseria meningitidis
atgacgtttgataaatggttgggcttgtcaaaactgcctaaaaatgaagcaagaatgctgctgcaatatgtttcggaatatacgcgcgtgcagttgttgacgcggggcggggaagaaatgccggacgaagtccgacagcgggcggacaggctggcgcaacgccgtctgaacggcgagccggttgcctatattttaggtgcgcgcgaattttatggcagacgctttacagtcaacccgagcgtgctgattccgcgccccgaaaccgaacatttggtcgaagccgtattggcgcgcctgccggaaaacgggcgcgtgtgggatttggggacgggcagcggagcggttgccgtaaccgtcgcgctcgaacgccccgatgcgtttgtacgcgcatccgacatcagcccgcccgcccttgaaacggcgcggaaaaatgcggcagatttgggcgcgcgggtcgaatttgcatacggttcgtggttcgacaccgatatgccgtctgaagggaaatgggacatcatcgtgtccaacccgccctatatcgaaaacggcgataaacatttgtcgcaaggcgatttgcggtttgagccgcaaatcgcgctgaccgacttttcagacggcctaagctgcatccgcaccttggcgcaaggcgcgcccgaccgtttggcggagggcggttttttattgctggaacacggtttcgatcagggcgcggcggtgcgcggcgtgttggcggagaatggtttttcaggagtggaaaccctgccggatttggcgggtttggacagggttacgctggggaagtatatgaagcatttgaaataa

SEQ ID NO: 29509 - DNA, 771 bp, Neisseria meningitidis
atgaccacgaccgaacacgacaacgacgatgcattcctgctgcggtacagccgccacatcctcttggacgaaattggcatcgaagggcagcagaaactttccgccgcgcatattttggtcgtcggctgcggcggtttgggtgccgccgccctgccctatctcgccgcttccggcatcggcacgctgaccatagccgattccgacacggtcgagctgcacaacctgcaacgccaagtcgcatttgacgagggcgatgtcggcaaactcaaaaccgaagccttggcagaccgtctgcgccatatcaaccatactgtcgatgtccgcaccatcaacgaaaaacttgacggctgccgcctgaccggtttggttcaagccgccgacatcgttttagactgctgcgacaactacgccacgcggcaggcggtcaaccgtgcctgcgtgcaggcgaaaacaccgctggtttcaggggcggcggtacgctttgaagggcagcttgccgtgtaccgtcccgacttgcccgactcgccgtgttacgcctgcctgtttgacggcggatcggcttcagacggcatctgttccctcttcggcgtattctcgccgctggtcggcatcatcggcagtacccaagcggcggaggctctgaaaatcctgctggatgcgggcgaaccgtcgcacggcaggctggcggtttaccgtgccttggaagggggctggcaatatttcgacctgccgcgcaaccccgaatgcccggtttgcggcgcggaacggtaa

SEQ ID NO: 29510 - DNA, 990 bp, Neisseria meningitidis
atgaaaattaccgttatcggcgcaggttcgtggggtacggcgctcgccctgcacttttcccaacacggcaaccgcgtatccctgtggacgcgcaacgcagaccaagtccgccaaatgcaggaagcgcgtgaaaacaaacgcggactgcccggcttttcctttcccgaaaccttggaagtgtgtgcggatttggcagacgcgctcaaagacagcggacttgtccttatcgtaacctccgttgccggattgagaagcagcgcagagctgctcaaacagtacggcgcgggacacctccccgtcctcgccgcctgcaaaggattcgagcaggatacagggctgctgacctttcaagtattgaaagaagtattgcccgacaataaaaaaatcggcgtactctccggcccgagttttgcacaggaactcgccaaacaactgccctgtgccgtcgtcctcgcttccgaaaaccaagaatgggtcgaggaacttgtcccacaactcaacacttcggtcatgcggctttacggcagcacggatgtcatcggcgtggcggttggcggcgcggtaaaaaatgttatggcgattgccaccggattgtccgacggtctagagtacgggcttaacgcccgtgccgcactggttacgcgcggattagctgaaatcacccgccttgcctccgcaatgggcgcacagcccaaaaccatgatggggctggcaggcatcggcgacctcatcttgacctgcactggcgcactctcacgcaaccgccgcgtcggcttgggtttggcagaaggcaaggaactgcatcaggtgctggtcgaaatcggacacgtttccgaaggggtcagcacgatagaagaagtcttcaatactgcctgtaagtaccaaatcgatatgccgattacccaaaccctgctgcaactcatccgtaaggaaatgacccctcagcaggtcgtcgaaaggctgatggaacgtagcgcgcgttttgaataa

SEQ ID NO: 29511 - DNA, 432 bp, Neisseria meningitidis
atgaaaaccttttcagcgaaaccccacgaggtgaagcgcgaatggttcgtcatcgatgcccaagacaaagtcttgggtcgcgttgcggccgaagtcgccagccgtctgcgtggcaaacacaaacctgaatacaccccccacgtcgataccggcgattacatcattgttatcaatgcggacaaactgcgtgtaaccggtgccaaattcgaagataaaaaatacttccgccattccggtttcccaggcggtatctacgaacgcaccttccgcgaaatgcaagagcaattcccgggccgcgctttggaacaagctgtaaaaggtatgctgcccaaaggtcctctgggttacgccatgattaaaaaactgaaagtgtatgcgggtgcggaacacgcccatgctgcgcaacaacccaaagttttggaactgaaataa

SEQ ID NO: 29512 - DNA, 393 bp, Neisseria meningitidis
atgaacggtaaatactactacggcacaggccgccgcaaaagttcagtggctcgtgtattcctgattaaaggtacaggtcaaatcatcgtaaacggtcgtcccgttgacgaattcttcgcacgggaaaccagccgaatggttgttcgccaacccttggttctgactgaaaacgccgaatctttcgacatcaaagtcaatgttgttggcggcggcgaaaccggccagtccggcgcaatccgccacggcattacccgtgccctgatcgacttcgatgccgcgttgaaacccgccttgtctcaagctggttttgttacccgcgatgcccgcgaagtcgaacgtaaaaaaccgggtctgcgcaaagcacgccgtgcaaaacaattctccaaacgttaa

SEQ ID NO: 29513 - DNA, 438 bp, Neisseria meningitidis
atgatagggcttttaatcatcacacacgaaaccataggcgaagcctaccgcaagctggcacatcatttttttccgggcggactgcctgaaaacgtccgcatactcggcgtgcaaccgacggaagaccaagacgacatcatcaacaacgccattgccgcgcttcaggagtttcccgacaacgacggcgtgctaattatgaccgatattttcggcgcgaccccctgcaatgcagcccgccgcctcgtgcgcgaaaacaaatcggcgattttgaccgggctgaacgcgccgatgatggttaaggccgtccaatattcgccggcggcggaagaccttgccgcctttaccgaatgcgtcagggaggcggcggtaaaaggcattttcgccatcacgtccgcgcccgaagatttggtgtgccggcgcagcggcgatgccgtctga

SEQ ID NO: 29514 - DNA, 270 bp, Neisseria meningitidis
atgctcaaacaatccatcgaaatcatcaacaaactcggactccacgcccgcgcgtccaacaagttcacccaaaccgcgtcccaattcaaaagcgaagtctgggttacgaaaaacgacagccgcgtcaacggcaaaagcattatggggctgatgatgctcgccgccgccaagggtacggtcatcgaactggagacggacggcgcggacgaggcggaagcgatgcgcgccctgaccgacttaatcaacggctacttcggcgagggcgaataa

SEQ ID NO: 29515 - DNA, 1776 bp, Neisseria meningitidis
atgagtatcgtgctgcacggcgtggcggcgggcaaaggcattgccgtcggttgcgcccacctgattgcgcgcggtacggaggaagtgccgcagtatgatgttgcggaggcggacaccgatgccgaagccgaacgtttcgatgccgccgtcaaagccacgcgcaaagagttggaacagctccgcagcgcgattcccgaaaacgccccgaccgagttgggcgcgttcatctcgctgcacctgatgctcttgaccgatgttaccttgtcgcgcgaacccgtcgatattttaagggaacaaaaaatcaacgccgagtgggcattgaagcagcagagcgacaaactcgccgcccaattcgacaatatggacgatgcctatttgcgcgaacgcaagcaggatatgctgcaagtcgtccgccgcatccacaacaacctgatcgggcagggcaacgagttggaagttgccgacaacctgtttgacgaaaccgttctgattgcaaacgacctttcgcccgccgacacggttttgtttaaagagcagcgcattgccgccttcgttaccgatgccggcggccccaccgggcatacggcgattttgggcaggagcttggacatcccgtccgtcgtcgggctgcacaacgcgcgcaaactgattaccgagggcgaaacggtcattgtggacggtatcaacggcgtgttgattatcgcgccggatgagtcggtgttgaacgaataccgccgccgtgcccgcgaataccgcagccacaaacgcgatttgaacaagctcaaaaaaaccgccgccgccaccgctgacggggtctgcatcgagcttgtgggcaatatagaatccgccgaagacgtgaaaccgctgcacaacctcggcgcagacggcatcgggctgttccgcagcgagtttctttacctgaaccgcgatacgatgccgtctgaagacgagcagtacgaagtgtacagcgcgattgtcaaaaaaatgaaaggcaaaagcgtaacgatacggacagtcgatttgggtgtggacaaaaacccgcgctggttcgggaaaaacagcacgcccaacggcagcctcaaccccgcgctgggcatgaccggcatccgcctgtgccttgccgaaccggtcatgttccgcacccagatgcgcgccatcctccgcgccgccgcccacggccccgtgcggatgatgtggccgatgattacctccgtatccgaagtgcgccagtgcctcatccacctcgacaccgcgcaacgccagcttgccgaacgcggcgatgccttcggtaaagtcggcatcggctgtatgattgaaattccgtctgccgcgctgaccgtcggcagtattttgaaactggtcgatttcatctccgtcggtaccaacgacctgattcaatacatcttgtccgtcgatcgcggcgacgacagcgtcagccacctctaccagcccggccatcccgccgtgctgaaaatgctgcaacacgtcatccgtaccgccaaccgcatggacaaagacgtatccgtatgcggcgagatggcgggcgataccgcgtttacccgcgttttattgggtatggggctgcgccgtttttccatgaaccccaacaacatcctgcccgtcaaaaacatcattctgcacagcaatgtcggacagctcgaaagcgatattgtgaaagtcatccgctgcgaagacgaagagaagtcggaaaagctgatcaaacagatgaacagcgtgtctgtcgaggaagaagccgacttcaaggggcggaaataa

SEQ ID NO: 29516 - DNA, 318 bp, Neisseria meningitidis
atggtagtacgcggcggaatctatctagtctccttagacccgaccgtaggaagcgaaatcaaaaagacacgtccttgtgtcgtagtatctcctcctgaaatacacaactatctcaagactgtgctgatcgttcccatgacgagcggaagccgtcctgccccgttccgcgtcaatgtccgctttcaggataaagacggtttgcttttgcccgaacagattagggctgtggataaagccggattggtcaaacatcttggaaatttagacaacagtacggctgaaaaactgtttgcagtattgcaggagatgtttgcctga

SEQ ID NO: 29517 - DNA, 798 bp, Neisseria meningitidis
atggataccgcacaaaaacaacgctgggcaataaccctatcctatgacggcagccgcttttacggctggcagaaacaggctgacggcgtaccgaccgttcaggcggcattggaaaccgcgctcgcccaaatagcaggggaagcggtttccaccaccgttgccggcaggaccgacaccggcgtgcatgccaccgcccaagtcgtccacttcgacacaactgccgcccgtccccaacaggcatgggtgcgcggcgtaaatgcccacctgcccgaaggcattgccgttttgcacgcccgacaggtcgcccccgaatttcatgcacgatttgacgcatacggacggcactaccgctacctgctcgaatccgcccccgtccgttcccccctgctcaaaaacagggcaggctggacacacctcaaactcgacatcgaaccgatgcgtcgggctgccgcctatttgatcggcgaacaagacttctccagcttccgcgccgccgaatgccaagcaaaatcccccgtcaaaaccatctaccgcgccgaccttacccaaagcgcaggactcgtccgcctcgatttgcacggcaacgcctttttgcaccacatggtacgcaacatcatgggcgcgctcgtctatgtcggcagcggcagactcagcgtcgaaggcttcgccgcactgattcaagaacgcagtcgcctcaaagccccaccgacctttatgcccgacgggctttacctgaccggcgtcgactatcccgaggcatacggcatcatccgcccccaaatccccgaatggctttaa

SEQ ID NO: 29518 - DNA, 744 bp, Neisseria meningitidis
atgctcatcatccgcaacctgatttactggctgatactctgttccaccctgattttcctctttccctttatgctgctcgcctcgcctttccgagacggggcgcacaagatggcgcgggtctgggtcaaaatcctcaacctctcgctcaaacacatcgtcgggctcaaataccgcatcatcggcgcggaaaacatccccgaccgccccgccgtcatctgcgccaaacaccaaagcggctgggaaacgctcgcccttcaggacatttttccgccgcaggtttacgttgccaaacgcgagttgttcaaaatcccctttttcggctggggcttgaaactggtcaaaaccataggcatagaccgcaacaaccgccgcgaagccaacgagcagctcataaaacaggggttggcgcgcaaaaacgaaggctattggattaccattttccccgaaggcacacgccttgcgcccggaaaacgcggcaaatacaaactcggcggcgcgcgcatggcgaaaatgtttgagatggacatcgtccccgtcgccctcaacagcggcgaattttggccgaaaaactcctttctgaaatatccgggggaaatcaccgtcgtcatctgtccgaccatcccgcacgcaagcggcagcgaagccgaattgatgggaaaatgcgaacacctcatcgaaacgcagcagccgctcatttccggcgcaggcccgtttgccgccaaaatgccgtctgaaaccgcatga

SEQ ID NO: 29519 - DNA, 471 bp, Neisseria meningitidis
ttgaacatcaccgttttggcagtcggcaccaaaatgccgcgctgggttgatgaggccgtcgccgaatacgccaaacgcttcggacgcgacgtcgcctacgcactcaaagaaatcaaacccgaaaaacgcggcgcgggcgtgaatgccgcccaaggtatggcggcggaagaaaaacgcatccttgaagccattccgcaaggcgcgttcctcgtcgttcttgacgaacgcggcaaagcaccgacctccgtcgagctggcggaacacctcaaaagctggcggcaaaacggcgaacacgtctgcttcgtcatcggcggcgcggacggcatgaccgaccgcctcaaacagcaggcacgcatgatgatgcgcctgtccagcctgaccctgccgcacggcatggtgcgcgtctttctgaccgagcagctctaccgcgccgtttccatcctgcacaaccatccctatcatcgggaataa

SEQ ID NO: 29520 - DNA, 1647 bp, Neisseria meningitidis
atgtctgaagaaaaattgaaaatgagtttcgagccaaccgtaatcgaacatttgggtgtaaagatgtattcgcacactgttcctgcgattgccgagttgatagcgaatgcctacgatgcatgtgctacggaagtggaagttaggttattcgataaaccggagcataaaatcgttattaaagataatggtataggaatgagcttcgatgaaatcaatgatttttatttgagaatcggtcggaacagaagggaagaaaaacaagcctccccgtgcggaagaattccaacgggtaaaaaaggccttggtaaattggcattattcgggcttggcaacaaaattgaaatttctactatccagggaaacgaaagggttacttttactttggattatgcagagattcgaagaagcaagggtatttatcaaccggagtttcgaaaagaatctgttgaatccaatatcgaaagcgggacaaccataactttaaccgaactgacgaaaaagcaaggatatccgttagataattatgtagagcatctttcccgcttgtttgattttccggctcaggattttaaaatcaaagtaagcttgaacggctctgaacctaaaatcattgatggaaatctaaaatatgatcttgttaccccacaattcgaatgggaataccaggatttagcaaccaatatttcatcgttatcttcaaaattcgaacagtatgaatacagcggattaatacaaggtaagttcattacaacggaaaaacctttaaagaataatatgaaaggtattaccttgtttgccaacggcagaatggtaaatatgcccgagtttttcactgatagcgaatccagccatttctattcatatttgactggatggctgaatgtggactttatagataatgacgatgaagatttaattgctaccgacaggacatcattagactggaagcattcaaaaacctcaaaattacgtgttttccttggggagatcgtccgagccatcgggcaagattggagaaaaagaagaaaaaaagagaaagatgacgaagtgaaaggcgaaagcggagttgatatcgaagattggaaaaacaaattgccagaaaaggaaagggaaccagtagaagttattttgaatcgtttggaagattcggagcttacaaataaagagcaagcggaagtaatctctgccttacatagtattattccagaatatccttactatcattggcggcatttgcatcaggatttgcatactgcctgtaatgatttttacaatgaaaagaaggattatttaagtgctgcaatcgaggcagttaaagttttcgaagataaggttcagaagcaaacaggtcttcatagcatagacggaagagaattgattgaacaagctttcgggagtaaaaattctatacttctattaacgaataacaaaacgaaggcggaacaaaatttagaagatggtcttgaacagcttgcatgcggaacatggactggatttagaaatcctgtacaacatgagttaagagcaaatttatctcctagtatttttaatgataaggatgctttggatttaataagcttggtttcgtatttgttaagaaaagtggaacagacaaaaaaacgatcgaaggtggtatcttccaagtaa

SEQ ID NO: 29521 - DNA, 987 bp, Neisseria meningitidis
gtgcatccgccgtccgtcttgttttcgcgccgaccgcaaccatatagccgccatccgaacaatcagtcagagaaaatcatgaatcaaaccgccatcaaccgcgccgatgtgcgtacccgctttatcttcgacgatatgcccgtgcgcgggctgcacgtccgtctggaaaacgtgtggcagcacattgtaaaacagaaaaactatcccgccgccatccgccgcgccttgggcgagctgttggctgccggtgttctgctgtcgggcaacctcaaaaacgaaggcacgctgattgtgcaggttcaggggcaggggcggctgaaaatgctggttgcggaagcgacttccgaccgtaccgtccgtgcgaccgcgcggtgggacgaaaccgcagaaatagccgatgacgaaagcctcggcgatcttttgggcgagggcggcgtattcgtgctgacgctgcagcctaaagacggcgaaccctggcagggtgtagtgcctttggaaggcgacggtatcgcgcaaatgttggtgaactatatgaaacgttccgaacagcttgatacgcacatcgtcctgtctgcaagcgacgaagcggcgggcggtctgctggtgcagcgtctgcctgaagaggtattggatgaagaggcatgggaacacgtcagtacgctggcgcgcacgctgacggcggaggagctggcaggactggacgcgcaacacgttttataccgcctgttccacgaaacgccgccgcgcgtgttcgagccggaaacgtttgaattttcatgcacctgttcgcgcggcaaagtcagcgatatgctgttgatgctgggcggggaagaagtcggcggcgtggtggtggaacaaggcagcatcgaagtcgattgcgatttctgccacagcaaatatgtgtttgacgaaaccgatgtcaacgcgctgttcggggaggatgtggtcggcgttgccaaagggctgccccggcataccgtccaataa

SEQ ID NO: 29522 - DNA, 1455 bp, Neisseria meningitidis
atgagcatcgaaccaacccctccgaaccttgaaaacgacggtatcgaaaacgatgtagaacgcgtttccgccgatttcgaccgtgtccactccctctgcgaaatcctcgaacctgcttttgaacaaatcgaaaacggtacaccgctcgaagacgcgccgctgcgcgacaagctgaccgagctgaccgtcctcttgagcgagctgcaccctgccgacgtggcggcggtgttggaatcgctgccgccgcgcgaacgcaatatcgtctggattttagtgaaacccgaagacgacggcgaagtattgctggaagtatccgacgcggtgcgcgaaacgctgatcgagtcgatggacaaagacgaattgttggcggcggtcgatgatttggacgcggacgaattggcggagctggcagacgatttgccgcaccaagtggtttatgaagccttacagacgcgcgatgaggaagaacgcgcccaagtcaaggcggcaatgtcctacgaagacaaccaagtcggtgcgattatggacttcgagttggtcagcatccgcgccgatgtcgcctgcgaagtggtgctgcgttacctgcgccgcttcgacagcctgcccgaccataccgacaagatttttgtggtcgatgaaaacgatgtgttgcagggcgtgctgcccatccgcaaacttttggtcgccgatcccgaagatttggtggaaaacgtgatggcgaaagatgtcgtgcgtttccgcgccgaagacgacgtggaagaaacggcgcaggcattcgaacgctatgacttggttaccgcgcccgtcgtcgatgaaaacaaaaagctcatcggcagggtgaccgttgacgaaatggtggacgtgatccgcgaagaatccgaagcggatatgttgaatatggcgggtttgcaagaagaggaagacttattcgcccccgtcttggattccgtcaaaaaccgctggatgtggctcgccgtcaacctctgcaccgccttcctcgccagccgtgttatcggcgcgtttgaaggcagcatcgaaaaaatcgtcgcactcgccgcgctgatgcccatcgtcgccggcataggcggtaactcgggcaaccagacgattaccatgattgtccgcgcgatggcgatggggcagctgacggatatgcaggcggggcgtttgctgaaaaaagaagtcggtgtcgccttggtcaacggcatcatttggggaacggtcatgggcgcagtatcttggctgctttacggcagcctcggcatcgggctggttatgattgccgcgatgacgctcaacctcctgctggcggcaaccgtcggcgtattaattcccgtggtaatggaaaagttcggacgcgatcccgcactgggcagctcggtgctgattaccgccgttaccgactccggcggcttcctgattttcttggggctcgccaccctattcctgctttaa

SEQ ID NO: 29523 - DNA, 3963 bp, Neisseria meningitidis
atgtctgtcgttttgcccttgcgcggcgttaccgccctttccgatttccgtgttgaaaaactcttgcaaaaagccgccgcactcggtctgcccgaagtcaaattaagcagcgaattttggtatttcgtcggcagcgagaaagcacttgatgccgcgactgtcgaaaaactgcaagccttgttggcggcgcaaagcgttgaacaaacgccaaaagcgcgcgagggcttgcatttgtttttggtcacgccccgtttgggtacgatttcgccgtgggcttccaaggcgaccaatatcgcggaaaactgcggtttggcaggcatcgaacgcatcgagcgcggcatggcggtgtggctggaaggtgcgcttaccgatgaacagcaacagcaatgggcggctttgctgcacgaccgcatgactgaatccgtgctgcccgattttcagacggcatccaaattattccaccatctcgaatccgaaaccttttccaccgtcgatgttttgggcggcggtaaagaggctttggtcaaagccaataccgaaatgggtttggcactctccgccgacgaaatcgattatctggttgaaaactatcaggctttgcagcgcaatccgtctgatgtggagctgatgatgttcgcgcaggcaaacagcgaacactgccgccacaaaatcttcaacgccgacttcatcctcaacggcgaaaaacagccgaaatcgctcttcggtatgatacgcgacacgcacaacgcgcatcccgaaggcacagtcgttgcctacaaagacaactcatccgtgatcgaaggcgcaaaagtcgaacgtttctatccaaatgcggcagaaaaccaaggctaccgtttccacgaggaagacacgcatatcatcatgaaagtggaaacgcacaaccacccgaccgccatcgcgccgtttgcgggcgcggcaacgggcgcgggcggcgaaatccgcgacgaaggtgcgacgggcaaaggttcgcgtccgaaagcaggcttgaccggctttaccgtgtccaacctcaacatccccggcctcaaacagccgtgggaacaagattacggcaagccggaacatatttcctcgccgctggacattatgattgaaggccccatcggcggcgcggcgttcaacaacgaattcggccgccccaacctcttgggctacttccgcacttttgaagaaaaatttgacggtcaggttcgcggctaccacaaaccgattatgattgccggcggcttgggcagcattcaggcgcagcagacgcataaagacgaaatccccgaaggcgcgttgctgatccaactgggcggcccgggtatgcttatcggcttgggcggcggcgcggcttcttcgatggataccggcacaaacgacgcgtctttagacttcaactccgtacaacgcggcaaccccgaaatcgaacgccgcgcgcaggaagtgatcgaccgctgctggcagctcggcgacaaaaacccgattatctccatccacgacgttggcgcgggcggcttgtccaacgccttccccgaactcgtcaacgatgccggacgcggcgcggtattcaagctgcgcgaagtgccgctggaagaacacggtctcaacccgctgcaaatctggtgcaacgaatcgcaagagcgttatgtattgtcgattttggaaaaagatttggacatcttccgctccatctgcgaacgtgaacgctgcccgtttgcggtagtcggtacggcgaccgacgacggccatttgaaagtacgcgacgatttgttctccaacaaccctgtcgatttgccgttgaacgtcttgctcggcaaaccgcccaaaaccacgcgtaccgacaaaacggttgcgccgtccaaaaaaccgtttcacgcgggcgatatcgacattactgaagccgcctaccgcgttctgcgcctgcctgccgtagccgccaaaaacttcctgattaccatcggcgaccgcagcgtcggcggcatgacccaccgcgaccaaatggtcggcaaataccaaacccccgtagccgactgcgccgttaccatgatgggcttcaacacttatcgcggcgaagcgatgagcatgggcgaaaaaccgaccgtcgccctgtttgacgcgcctgcttcgggcagaatgtgcgtcggcgaagccatcaccaacatcgcggcagccaatatcggcgacatcggcaacatcaaactctccgccaactggatggcggcgtgcggcaacgaaggcgaagacgaaaaactctaccgcaccgtcgaagcggtttccaaagcctgtcaggcattggatttgagcattcccgtgggcaaagacagcctgtcgatgaaaaccgtgtggcaggacggcgaagagaaaaaatccgtcgtttcgccgttgagcctgattatctccgcgttcgcgccggttcaagacgtacgcaaaaccgttacgcccgaattgaaaaacgtcgaggacagcgtattgctgtttgtcgatttgggcttcggcaaagcgcgtatgggcggctcggcgtttggtcaggtgtacaacaatatgagcggcgacgcgcccgatttggacgatacaagtcgtctgaaagcgttttacaacgtgattcagcagcttgtcgccgaagacaaactcttggcgtatcacgaccgcagcgacggcggcttgtttgccgttttggtagaaatggcgtttgcagggcggtgcggcttggatatagatttaaatttattgcttgcacaaacatttattaccaaccataccgctctgtctcaatcattgcggactgaagaggtaaaagcgttggctgaatggcaagaaaccattgcccgcacattatttaatgaagagttgggtgctgttatccaagttagaaaacaagatgttgccgatattatcaatttattctatcaacaacagctgcatcataatgtctttgaaatcggtacgttaactgatgagaacacgttaatcatccgcgacgggcaaacgcaccttatttctgacaacctaatcaaactgcaacaaacctggcaagaaaccagccatcaaatccaacgcctgcgcgacaaccctgcctgcgccgacagcgagtttgccctgattggcgacaacggacgcagcgcattgtttgccaacctgaaattcgacgtgaacgaagacatcgccgcgccgtttatcaacagcggcgcgaaacccaaaatcgccatcctgcgcgaacagggcgtaaacgggcaaatcgaaatggccgccgccttcacccgtgccggtttcgatgcctacgacgtgcatatgtccgacctgatggcaggccgcgtccaccttgccgacttcaaaatgctggcggcgtgcggcggcttcagctacggcgacgtactcggcgcgggcaaaggctgggcgaaatccatcctgttccaccccgccttacgcgaccagttcgccgccttcttcaccgacccgaacacgctgacattgggcgtgtgcaacggctgccagatggtcagcaacctcgccgaaatcatccccggcacggcaggctggccgaagttcaagcgcaacctgagcgaacagttcgaagcgcgcctgagcatggttcacgtccccaaatcagcctccctgattctgaacgaaatgcaaggctccagcctgcccgtcgtcgtcagccacggcgaaggccgcgccgacttcgcgcttcacggcggcaacatttctgccgatttgggcattgcgttgcaatatgtggacggacaaaaccaaattacccaaacctacccgctcaaccccaacggctcgccgcaaggcatcgccggcgtgaccaacgccgacggccgcgttaccatcatgatgccgcatcctgaacgtgtataccgcgccgcacaaatgagctggaaaccggaagactggacggaattgtccggctggtaccgcctcttcgccggcgcacgtaaagccttgggctaa

SEQ ID NO: 29524 - DNA, 759 bp, Neisseria meningitidis
atgattaccatccgcaacgtcagctaccgcatcggcacgcaccccatcctcgacaacatcagcctcgacatccccgaaggcggcattaccgcgctaatcggcccgaacggcgcaggcaaatccaccctgttttcctttatggcgcggctgcgcccgcttgaaagcggcagcatcgcctaccgcggcaaaaaccttgccggcacccccaccgccgaactcgcccgcacgctctccatcctcacccaagaaaacagcatcatgagccgcatcaccgtgcgcgacctgctgatgttcggccgttacccctaccatcaaggcagaccgactgccgaatgccgccgtatcgttaacggtgcaatcgaagaattccacctgcaagacctctccgaccgctatctgaccgagctctccggcggccaacgccaacgcgccatgattgcgatggtgttctgccaaagcaccgactacgtccttttggacgaaccgctgaacaacctcgatatgtatcacgcccgctcgctcatgcagattctgcaaaagctcacgcgcgaacacaaacgcaccaccgtcgccgtattgcacgacatcaaccaggccgccgcctacgccgaccacgtcgtcgccatgaaaaacggcaaagccgtcctgaccggcacgcccgaagaagtgttcaccgtacacaacatcaaagaactgttcgacatggacgtggacgtactcgactacgaaggcaaaaaactcatcgtccaccacatctga

SEQ ID NO: 29525 - DNA, 969 bp, Neisseria meningitidis
atgactgccaaacctttttccctcaacctgactaacctcctgctgctggcggtgttgtttgccgtcagcctgtcggtgggcgttgccgatttccgctggtcggatgtgttttcgctgtcggacagccagcaggttatgttcatcagccgcctgccgcgcacgtttgcgattgtgttgacgggcgcgtcgatggcggtggcggggatgattatgcagattctgatgcgtaaccgttttgtcgagccttctatggcgggcgcgggtcagagtgcggctttgggtttgcttctgatgtccctgctgctgcctgccgcgccgctgccggtcaaaatgtcggttgccgccgttgccgcgttaatcgggatgttggtgtttatgatgcttatccgccgcctgccgccgacggcgcaactgatggtgcctttggtcgggattattttcggcggcgtggttgaggcggtggccacctttattgcgtatgaaaacgaaatgctgcaaatgctgggcgtgtggcaacagggcgatttttccggcgtgttgctcggacggtatgaactgttgtgggcaacggggattttggctttgtttgcctatttgattgccgaccagctgacgattttgggtttgggcgaaacggtaagcgtgaacttggggctgaaccggacggcgattctgtggtcggggctgattattgtggctttgattacgtcgctggttatcgttacggtcggcaatattccgtttatcgggctggtcgtgccgaacatcatcagccgcctgataggcgacaggctgcgccaaagcctgcctgcggtggctttgctgggtgcgtctttggttttattgtgcgacattatcggacgagtgattgtgtttccgtttgaaattccggtatcgaccgtcttcggcgtattgggtacggcgttgtttttatggcttttgttaaggaaacctgctcatgccgtctga

SEQ ID NO: 29526 - DNA, 1347 bp, Neisseria meningitidis
atgtcggataacgttccaacgattgcggcagtcgctaccgcaccagggcgcggcggcgtgggcgtgatacgcatatcggggaaaaacctgctgccgatggcgcaggctttgtgcggtaaaacgcccaagccgcgcgtggcaacctatgctgattttacggacgaggacggtcaggcaatcgacagcgggctgctactgttttttgccgcaccggcaagttttacgggcgaagatgtcatcgagcttcagggacacggcgggccggtggtgatggatatgctgctgaaccgctgtttggaattgggcgcgcgccttgccgaaccgggcgagtttaccaaacgtgcgtttttgaacgacaaactggacttggcacaggcggaaggcgtggcggatttgattgacgcatccagccgttcggcggcgcgtctggcgttgcgctcgctcaagggcgatttttcgcggcggatacacggtctggtcgaagatttgattaccttgcggatgctggtcgaagcgacgctggattttcccgaggaagacattgattttctcgaagcggcagacgcacgcggcaaactggacggcttgcgccgcgccgtggatgatgtgcttgccaacgcgcagcagggcgcgattttgcgcgaaggtctgaatgtcgtattggtcggcgcgccgaatgtgggcaagtccagcctgctgaacgcgttggcgggcgacgaagtggcgattgttaccgatattgccggaacgacgcgcgacgcggtcagggaacgtatcctgattgacggcgtgccggtgcatattgtcgatacggcaggtttgcgcgagacggacgacgtggtcgagcgtatcggcatcgaacgcagccgcaaagccgtatccgaagccgatgtcgcgctggtgttggtcgatccgcgcgagggtttgaatgaaaagacacgggcgattttggacgcgttgccgctggagttgaaacgcatcgaaatccacagcaaatccgatttgcacgcacacgcggcaggcgggttcggtacgggcgcggaaaccgtcatcgcactgtcggcgaaaaccggcgacggcttggacgcgctgaaacggacgttgttgcgcgaggccggttggcagggcgaaagcgaagggctgtttttggcgcggacgcggcacgtcaacgcactcaaagcagcgcaggaagaattgtcgctggcggcattgtgcggcaaccatcaaatcgagctgtttgccgaacacttgcggctggcgcaggtcgcgtgcggcgaaatcacgggcgagtttacggcggacgacctgctcggcgtgattttttcgagattctgcatcggaaaataa

SEQ ID NO: 29527 - DNA, 4350 bp, Neisseria meningitidis
atgaaaacaaccgacaaacggacaaccgaaacacaccgcaaagccccgaaaaccggccgcatccgcttctcgcctgcttacttagccatatgcctgtcgttcggcattcttccccaagcttgggcgggacacacttatttcggcatcaactaccaatactatcgcgactttgccgaaaataaaggcaagtttgcagtcggggcgaaagatattgaggtttacaacaaaaaaggggagttggtcggcaaatcaatgacaaaagccccgatgattgatttttctgtggtgtcgcgtaacggcgtggcggcattggtgggcgatcaatatattgtgagcgtggcacataacggcggctataacaacgttgattttggtgcggaaggaagaaatcccgatcagcaccgtttttcttaccaaattgtgaaaagaaataattataagcctgacaattcacacccttacaacggcgattaccatatgccgcgtttgcataaatttgtcacagatgcagaacctgtcgaaatgacgagtgacatgagggggaatacctattccgataaagaaaaatatcccgagcgtgtccgcatcggctcaggacaccactattggcgttatgatgatgacaaacacggcgatttatcctactccggcgcatggttaattggcggcaatacacatatgcagggttggggaaataatggcgtagttagtttgagcggcgatgtgcgccatgccaacgactatggccctatgccgattgcaggtgcggcaggcgacagcggttcgccaatgtttatttatgacaaaacaaacaataaatggctgctcaacggagttttacaaaccggctacccttattccggcagggaaaacggtttccagctgatacgcaaagattggttctacgatgacatttacagaggcgatacacataccgtcttttttgaaccgcgcagtaacggacatttttcctttacatccaacaacaacggtacgggtacggtaacagaaaccaacgaaaaggtttccaatccaaagcttaaagtacagacagtccgactgtttgacgaatctttgaatgaaactgataaagaaccagtttacgcggcagggggtgttaatcagtaccgtccaaggttaaacaacggtgaaaacctttcttttatcgattacggcaacggcaaactcatcttatcaaacaacatcaaccaaggcgcgggcggtttgtattttgaaggtgattttacggtctcgcctgaaaacaacgaaacgtggcaaggcgcgggcgttcatatcagtgaagacagtaccgttacttggaaagtaaacggcgtggcaaacgaccgcctgtccaaaatcggcaaaggcacgctgcacgttcaagccaaaggggaaaaccaaggctcgatcagcgtgggcgacggtacagtcattttggatcagcaggcagacgataaaggcaaaaaacaagcctttagtgaaatcggcttggtcagcggcaggggtacggtgcaactgaatgccgataatcagttcaaccccgacaaactctatttcggctttcgcggcggacgtttggatttaaacgggcattcgctttcgttccaccgtattcaaaataccgatgaaggggcgatgattgtcaatcataatgccacaacaacatccaccgttaccattacagggaatgaaagtattacacaaccgagtggtaagaatatcaatagacttaattacagcaaagaaattgcctacaacggttggtttggcgagaaagatacgaccaaaacgaacgggcggctcaaccttgtttaccagcccgccgcagaagaccgcaccctgctgctttccggcggaacaaatttaaacggcaacatcacgcaaacaaacggcaaactgtttttcagcggcagaccgacaccgcacgcctacaatcatttaggaagcgggtggtcaaaaatggaaggtatcccacaaggagaaatcgtgtgggacaacgactggatcaaccgcacgtttaaagcggaaaatttccatattcagggcgggcaggcggtgatttcccgcaatgttgccaaagtggaaggcgattggcatttgagcaatcacgcccaagcagtttttggtgtcgcaccgcatcaaagccatacaatctgtacacgttcggactggacgggtctgacaaattgtgtcgaaaaaaccattaccgacgataaagtgattgcttcattgactaagaccgacatcagcggcaatgtcagccttgccgatcacgctcatttaaatctcacagggcttgccacactcaacggcaatcttagtgcaaatggcgatacacgttatacagtcagccacaacgccacccaaaacggcaaccttagcctcgtgggcaatgcccaagcaacatttaatcaagccacattaaacggcaacacatcggcttcgggcaatgcttcatttaatctaagcaacaacgccgcacaaaacggcagtctgacgctttccgacaacgctaaggcaaacgtaagccattccgcactcaacggcaatgtctccctagccgataaggcagtattccattttgaaaacagccgctttaccggacaactcagcggcagcaaggatacagcattacacttaaaagacagcgaatggacgctgccgtcaggcacggaattaggcaatttaaaccttgacaacgccaccattacactcaattccgcctatcgccacgatgctgcaggcgcgcaaaccggcagtgtgtcagacacgccgcgccgccgttcgcgccgttccctattatccgttacaccgccaacttcggtagaatcccgtttcaacacgctgacggtaaacggcaaattgaacggtcaaggaacattccgctttatgtcggaactcttcggctaccgaagcgacaaattgaagctggcggaaagttccgaaggcacttacaccttggcggtcaacaataccggcaacgaacccgtaagcctcgatcaattgacggtagtggaagggaaagacaacaaaccgctgtccgaaaaccttaatttcaccctgcaaaacgaacacgtcgatgccggcgcgtggcgttaccaactcatccgcaaagacggcgagttccgcctgcataatccggtcaaagaacaagagctttccgacaaactcggcaaggcagaagccaaaaaacaggcggaaaaagacaacgcgcaaagccttgacgcgctgattgcggccgggcgcgatgccgccgaaaagacagaaagcgttgccgaaccggcccggcaggcaggcggggaaaatgtcggcattatgcaggcggaggaagagaaaaaacgggtgcaggcggataaagacagcgccttggcgaaacagcgcgaagcggaaacccggccggctaccaccgccttcccccgcgcccgccgcgcccgccgggatttgccgcaaccgcagccccaaccgcaacctcaaccccaaccgcagcgcgacctgatcagccgttatgccaatagcggtttgagtgaattttccgccacgctcaacagcgttttcgccgtacaggacgaattggaccgcgtgtttgccgaagaccgccgcaacgccgtttggacaagcggcatccgggacaccaaacactaccgttcgcaagatttccgcgcctaccgccaacaaaccgacctgcgccaaatcggtatgcagaaaaacctcggcagcgggcgcgtcggcatcctgttttcgcacaaccggaccgaaaacaccttcgacgacggcatcggcaactcggcacggcttgcccacggcgccgttttcgggcaatacggcatcggcaggttcgacatcggcatcagcacgggcgcgggttttagcagcggcagtctttcagacggcatcggaggcaaaatccgccgccgcgtgctgcattacggcattcaggcacgataccgcgccggtttcggcggattcggcatcgaaccgtacatcggcgcaacgcgctatttcgtccaaaaagcggattaccgctacgaaaacgtcaatatcgccacccccggtcttgcgttcaaccgctaccgcgcgggcattaaggcagattattcattcaaaccggcgcaacacatttccatcacgccttatttgagcctgtcctataccgatgccgcttcgggcaaagtccgaacacgcgtcaataccgccgtattggctcaggatttcggcaaaacccgcagtgcggaatggggcgtaaacgccgaaatcaaaggtttcacgctgtccctccacgctgccgccgccaaaggcccgcaactggaagcgcaacacagcgcgggcatcaaattaggctaccgctggtaa

SEQ ID NO: 29528 - DNA, 1113 bp, Neisseria meningitidis
atgagcaccttcttccaacaaaccgcgcaagccatgattgccaaacacatcgaccgtttcccgctattgaagttggaccaggtgattgattggcagccgatcgagcagtacctgaaccgtcaaaaaaaccgttaccttagagaccaccgcggccgtcccgcctacccgctgttgtccatgttcaaagccgtcctgctcggacaatggcacagcctctccgatcccgaactcgaacacagcctcattacccgcatcgatttcaacctgttttgccgtttcgacgaactgagcatccctgattacagcaccttatgccgctaccgcaactggctggcgcaagacgacaccctgtccgaattgctcaaactgattaaccgacaactgaccgaaaaaggtttaaaaatagagaaagcatccgccgctgtcgttgacgccaccattattcagaccgccggcagcgaacagcgtcaggccatagaagtcgatgaagagggacaagtcagcggtcaaaccacactgagtaaggacaaaaatgcccgttggacaaagaaaaacagcctctacaaactcggttacaaacaacatacccgtaccgatgcggaaggctatatcgagaaactgtacatcactcccaccaatgcccatgagtgcacacacctgtcgccgttgttggaaggactgcccaaaggtacgaccgtctatgccgacaaaggctacgacagcaaggaaaaccggcaacatctgaaagaacatcggttgcagaacggcattatgcgcaaagcctgccgcaaccgtccgctgacggaaacgcaaaccaaacgtaaccgatatttatcgaagacccgttatagtggattaaatttaaatcaggacaaggcgacgaagccgcagacagtacaaatagtacggcaaggcgaggcaacaccgtactggtttaaatttaatccactatatgtggtcgaacagagcttcggtacgctgcaccgtaaattccgctatgcgcgggcagcctatttcgggctgagcaaagtgagtgcacaaagccatctgaaggcgatgtgtttgaaccttttgaaagcggccaacaggctaagtgcgcccgctgccgcctaa

SEQ ID NO: 29529 - DNA, 318 bp, Neisseria meningitidis
atgagcaccttcttccggcaaaccgcccaagccatgattgccaaacacatcgaccgtttcccactattgaagttggaccgggtgattgattggcagccgatcgagcagtacctgaaccgtcaaaaaaaccgttacctccgagaccaccgcggccgtcccgcctacccgctgttgtccatgttcaaagccgtcctgctcggacaatggcacagtctctccgatcccgaactcgaacacagctccatcacccgcatcgacttcaacctgttttgccgtttcgacgaactgagcatccctgattacagtatagtggattaa

SEQ ID NO: 29530 - DNA, 2817 bp, Neisseria meningitidis
atgtccaacagacctacactcctcctcgttgacggctcttcctatctctaccgtgcgtatcacgcgatggggcaaaacctgaccgcacccgacggcgcgccgacgggcgcgctgtatggcgtattgaatatgttgcgccgtttgcggtcggaatatccgcacgattattgcgcggtggtttttgatgcgaaaggcaaaaatttccgccatcaaatgtttgaagaatacaaggcgacgcgcccgccgatgcccgacgatttgcgcccgcaggcggaagcactgccggatttagtgcgcctgacgggctggccggtattggtgattgggcaagtggaggcggacgatgtgatcggcacgctggcgaaacagggggcggaacatggtttgcgagtcattgtttcgaccggcgataaggacatggcgcagttggtggatgagcgcgttacgctggtgaacacgatgagcagcgaaacgctggatattgaaggcgtgaaggcaaaattcggcgtgcgccccgaccaaatccgcgattatctcgcgctgatgggcgataaggtggacaacgtgccgggcgtggaaaaatgcggcccgaaaacggcggtgaagtggctggaagcctacggctcgttgcaaggcgtgatagaacacgcttcggaaatcaagggcaaagtgggcgaaaacctgcaagccgcgctgccccaactgccgctgtcgtatgacttagtaacgattaaaaccgatgtggacttgcacgccgagctttcagacggcatcgaaagcctgcgctgtactacgccgaaatgggcgcagctggttgtcgatttcaaacgctggggcttccgcacctggctgaaagaagcggaatcaaacatgaataccggctcgaccgatgatttgttcggcagcgacagcatcggcgagcaggcggctttgaatgcggaaatgccgtttgaaaaacaagccgaaaaagccaccgcccccgaaaaactggattatcaagccgttaccaccgaagcgcagtttgccgctttgttggacaaactgtcgcgggcggacacaatcggcatcgatacggaaaccacgtcattagacgcgatgaacgcctcgctggtcggcatcagcatcgctttccaagcaggcgaagcggtttacatccccgtaggacacagcctgaccgccgcgcccgaacagcttgatttgcaagacgtattaggccgtctgaaaccgcatttggaaaaccccgccctgaagaaaatcgggcaaaacctcaaatacgaccaacacgttttcgctaactacggcatcgccctgaacggcattgccggcgacgctatgctcgcttcctacatcatcgaaagccatcttggacacggcttggacgaattgtccgaacgttggctgggcttggaaaccattacctacgaatcattgtgcggtaaaggcgcgaagcaaatcagttttgccgatgtcgccatcgggcaggcgaccgaatacgccgcccaagacgccgatttcgccttgcgcctcgaagcgcacctgcgcgcgcaaatggacgccaaacagcttgaaatgtatgaaaaaatggagctgcccgtcgcgcaagtattgtttgaaatggaacgcaacggtgtgcaaatcgaccgcgccgaactcgcccgccaaagcgcggaactcggcgccgagctgatgaagctcgaacaagaagcctacgccgccgcagggcagccgttcaacctcaactcgcccaaacagctgcaagaaatcctgttcgacaaaatgggcatcccgacaaaagggctgaaaaaaaccgccaagggcggcatttccaccaacgaggccgtgctcgaacagctcgcgcccgactaccccctgcctaaaatcatcctgcaaaaccgcagcctggcgaagctcaaatccacctacaccgacaaactacccgaaatgatttcccccaaagacggccgcgtgcataccacctacgcccaagccgtcgccattacaggacgcttggcaagcaacaaccccaacctgcaaaacatccccatccgcaccgccgaaggccgacgcgtgcgccgcgccttcaccgcaccgcaaggcagcgtcatcgtttccgccgactattcccaaatcgagctgcgcatcatggcgcacctctccggcgacaaaaccctcattgccgcgttccaaaacggcgaagacgtacaccgccgcaccgccgccgaagtattcggcatcgcccccgaaaacgtctcgtccgaacaacgccgctacgccaaaaccatcaacttcggcctgatttacggcatgggccaatacggccttgccaaatcattgggcatcgacaacatctccgctaaaaactttatcgaccgctacttcgcccgctaccccggcgtcgccgaatacatgcagcgcaccaaagaacaagccgccgcccaaggctttgtcgaaaccctgttcggcagaaggctctatttgcccgacatccgcaacaaaaacaccaacgcccgcgccggagccgaacgcgcagccatcaacgctcccatgcagggcaccgcgtccgacctcatcaaacgcgccatgatagacgtgtcccgctggctttcagagtgcgaagcctccccgtgggacgaactcttacaaagcaaactgattatgcaggtgcatgacgaactggtgctggaagtcgttgaaaccgaactggattttgtcaaagaaaaactgccgcagattatggcgaaagtggacggcggattattggatgtaccgctggtggctgaggttggcgtaggggagaattgggaagaggcacattga

SEQ ID NO: 29531 - DNA, 1635 bp, Neisseria meningitidis
atggcagcaaaagacgtacaattcggcaatgaagtccgccaaaaaatggtaaacggcgtgaacattttggcaaacgccgtgcgcgtaaccttgggtcccaaaggccgcaacgtggtggttgaccgcgctttcggcggcccgcacatcaccaaagacggcgtaaccgtcgccaaagaaatcgaactgaaagacaagtttgaaaatatgggcgcgcaaatggtgaaagaagtcgcgtccaaaaccaacgacgtggcgggcgacggtacgactaccgccaccgtattggcgcaatccatcgttgccgaaggtatgaaatacgttaccgccggtatgaacccgaccgacctgaaacgcggtatcgacaaagccgtcgccgctttggttgaagagctgaaaaacatcgccaaaccttgcgacacttctaaagaaatcgcccaagtcggctctatttccgccaactctgacgaacaagtcggcgcgattattgccgaagcgatggaaaaagtcggcaaagaaggcgtgattaccgttgaagacggcaaatctttggaaaacgagctggacgtggttgaaggtatgcaattcgaccgcggctacctgtctccttacttcatcaacgatgcggaaaaacaaatcgccggcttggacaatccgtttgtattgctgttcgacaaaaaaatcagcaatatccgcgacctgctgcctgttttggaacaagtggccaaagccagccgtccgctgttgattatcgctgaagacgtagaaggcgaagccttggcgactttggtcgtgaacaacatccgcggcattctgaaaaccgttgccgttaaagctccgggcttcggcgaccgccgcaaagcgatgctgcaagacatcgctatcctgaccggcggcacagtgatttccgaagaagtcggcctgtctttggaaaaagcgactttggacgacttgggtcaggccaaacgcatcgaaatcggtaaagaaaacaccaccatcatcgacggcttcggcgacgcagcccaaatcgaagcgcgtgttgccgaaatccgccaacaaatcgaaaccgcaaccagcgattacgacaaagaaaaactgcaagagcgcgttgccaaactggcaggcggcgtggcagtaatcaaagtcggtgccgcgaccgaagtggaaatgaaagagaaaaaagaccgcgtggaagacgcgctgcacgctacccgcgcagccgttgaagaaggcgtggttgcaggcggcggcgtagccctgttgcgcgcccgtgccgctctggaaaacctgcacaccggcaatgcagaccaagacgcaggcgtacaaatcgtcttgcgcgccgttgagtctccgctgcgccaaatcgttgccaacgcaggcggcgaacccagcgtggttgtgaacaaagtgttggaaggcaaaggcaactatggttacaacgctggcagcggcgaatacggcgacatgatcgaaatgggcgtactcgaccccgccaaagtaacccgttccgcgctgcaacacgccgcgtctatcgccggcctgatgctgaccacagactgcatgattgctgaaatccctgaagacaaaccggctatgcctgatatgggcggcatgggtggtatgggcggcatgatgtaa

SEQ ID NO: 29532 - DNA, 1443 bp, Neisseria meningitidis
atgaaacaattggccatgtacatcaacggacgctttgaaaacgatttcaacggcgaatggcgcaacgtattgaacccgtccaccgaagaggccatcgcccgcgaacccaaaggcggcaaagcagacgttgaccgcgccgtagcggcggcgcgtgcggcgcaaccggcttgggagcgtctgcctgcggtcgaacgcggcgcgtatttgcgcaaaatcgcccaaggcatacgcgaacgcgccgacgagctgaccgacaccattgtcgccgaaggcggcaaaaccaaagacttggcgcgcgtggaagtgatgttcaccgccgactatctcgattaccaagccgaatgggcgcgccgttacgaaggcgaaatcatccaaagcgaccgtccgcgcgaaaatattttattgttcaaacgtccgctgggcgtaattgccggcattttgccgtggaacttccccttcttcctgattgcccgcaaaatgggccccgctttggtaacgggcaataccatcgtcgtcaaacccagcagcgtaaccccgatcaactgccacatcttcgccgaaatcgtcgatgcggtcggactgcccgccggcgtgttcaacgtggtgaacggcccgggcgcggaaatcggcaatgccttgtccgcccatccgcaagtcgatatggtcagcctgaccggctccgtcgaagcgggccgccaagtgatggaagccgcttccgccaacatcaccaaagtttcgttggaactcggcggcaaagcccccgccatcgtgttgaaagacgcggatttggatttggcggtgaaatccatcttggcttcgcgcgtcggcaacaccggtcaaatctgcaactgcgccgagcgcgtctatgtccacagcagcctgaaagacgcgtttatcgaaaaaatgaccgccgcgatgaaaggcgtgcgctacggcaaccctgccgaagccgaagcaggcgcattggaaatgggcccgctgattgaagagcgcgccgtcaaagccgttgccgaaaaagtggaacgggcagtcaaacaaggtgcgaaattggtttgcggcggcaaacgcgccgaagggcgcggctatttcttcgagccgaccctgctgaccgacaccgacaacagtatggacattatgaaagaagaaaccttcggccccgtgctgcccgtttccgctttcgacacgctcgaccaagtcatcgcactggctaacgattgcgagtttggtctgaccagttctgtttatacgactaatttaaacgaagccttctacgttacccgccgcctgcaattcggcgaaacctacatcaaccgcgaaaacttcgaagccatgcagggtttccacgccggttggaaaaaatccggtatcggcggcgcggacggcaaacacggtttggaagaatatctgcaaacccaagtcgtttatttggaaaccgacatttaa

SEQ ID NO: 29533 - DNA, 840 bp, Neisseria meningitidis
atgaaaaaaaccgcctatgccttcctcctgctgatcgggttcgcttccgcccctgcatttgccgaaacccgccccgccgacccttatgaaggctacaaccgcgccgttttcaaattcaacgaccaagccgaccgctacattttcgcccctgccgcgcgcggctaccgcaaagttgcgccgaaacccgtccgcgccggcgtgtccaatttttttaacaacctgtgcgacgtggtcagcttcggcagcaatatcttgcgcttagacatcaaacgcgcaagcgaagaccttgtccgcgtcggtatcaacaccactttcggtttgggcgggcttatcgacatcgccggcgcgggcggcattcccgacaataaaaacaccttgggcgacacgtttgcttcgtggggatggaaaaacagcaattatttcgtgttgcccgtcttagggccgtccaccgtccgcgacgcgctcggcacgggtattacctccgtttattcgcccaagaatatcgtcttccgcacccctgtcggacgctggggcacgactgccgtatccgccgtcagtacgcgcgaaggcctgctcgatttgaccgacagtctggacgaagccgccatcgacaaatacagctacacgcgcgacctctatatgaaagtccgtgcgcggcagaccggtgcaacacctgccgaaggtacggaagataacatcgacatcgacgaattggtcgaaagtgccgaaaccggcgcggcggaaactgccgttcaagaagattccgtatccgaaacacaggcagaagcagcaggggaagccgaaacgcaacctggaacacaacctggaacacaaccttaa

SEQ ID NO: 29534 - DNA, 384 bp, Neisseria meningitidis
atgaagctgaccgtccgcaactaccatctcgacggctacggccatgtcaacaatgcgcgctacctcgaatttttcgaagaagcgcgctgggcgttttttgaagaacgcggactgctgcacgagttggcaggcctcatactgattgtcgcccgcatcgacatccgatacagccgccccgccgtcgaaggcgacgtattgcagttttcatgccgcctgaaaacccccggcacgcgccgtattgtgctgacccagacgattacactgccaaacggcaaaaccgccgcagaagccgacattaccctgatgcccgtccacgccgccacacaacgcaccgtcagcctgcccgccacccttgcccgcgcattggaagccttgtccgaatga

SEQ ID NO: 29535 - DNA, 513 bp, Neisseria meningitidis
ttgatgggatcaaaattctttttcctgctgctgcgttttgccggttcggtgttgccgccgtcgcatatgcgcggcatcgtcggcagacgggtacgcggttttttggcgcggcgggtttctccgcatatcggacgcggggtcaatatcgaacgcggggcgtatgtgtttccggatacggttttgggcgacggctcgggcatcggggcaaactgtgaaatctgccgtgggccggtggtcggcaaaaatgtgatgatggagccggaatgcctgctctattcgaccaaccacaagtttgaccgtgaaaacaaacgctttgagggctacacggaaatccgtccgattacgttggaggacgatgtctggccggggcgcagggtgattgtaatggcaggcgtaaccgtcggacgcggctcggtcgtgggcgcaggcgcggtggttacaaaagacattccgccctactctttggcggcaggcaatccggcagtggtgaaaaagaatctgccggaaggttga

SEQ ID NO: 29536 - DNA, 642 bp, Neisseria meningitidis
atgagatgttttatgattcaaaatgtcgttacttcaataatcctgtattctgggacagccgtagacttacttattatcctaatgttattttttgccaaaagaaaaagcagaaaagacatcattaacatctatttaggacaatttctaggctctgttagcctgatattgctaagtttgctttttgcatttgtcttagattatattcctagtaaagagattttaggtttgctcggcttgattccgattttcctaggcctcaaagttttgcttttaggagattccgatggagaggctattgccaaagagggtttgcgcaaagataataaaaacctgatttttctagtcgctatgattacttttgcaagttgtggtgctgacaatattggtgtctttgttccatattttactaccttaaatttagtgaatttgatagtggctttacttacctttctagtcatgatttatctcttggttttttctgcccaaaaattagcacaagtcccttctgttggagaaactttggaaaaatatagcagatggtttgttgctgttgtttatttaggattgggggtatatatcctgattgaaaacaacagttttgatatgctatggactgtgtcgggccaggaaaaaatattatga

SEQ ID NO: 29537 - DNA, 606 bp, Neisseria meningitidis
atgatgaccctctattccggcattacctgccccttcagccaccgctgccgcttcgttttgtacgaaaaaggtatggattttgaaatcaaagacgtcgatatttacaacaagcccgaagacctcgccgtcatgaacccgtataaccaagttcccgtgctggtcgagcgcgatttggtgctgcacgagtccaacatcatcaacgaatacatcgacgaacgcttcccccatccgcagcttatgcccggcgatcccgttatgcgcggcaggggccggctggtgctgtaccgtatggaaaaagaattgtttaaccacgtccaagttttggaaaaccccgccgccaccaacaaggaacaggcaaaagcgcgcgaagccatcggcaacggtctgaccatgcttgccccttcgttcagcaaaagcaaatacatcctcggcgaagatttttctatgattgatgtcgcccttgccccgctgctgtggcggctcggccactacgatgtcaaactgggcaaaagtgccgcgccgctgctcaaatacgccgagcgcatcttccagcgcgaagcctttatcgaagcactgacacccgccgaaaaagccatgcgcaaataa

SEQ ID NO: 29538 - DNA, 447 bp, Neisseria meningitidis
atgagcctgaaaatccgccttaccgaagacatgaaaaccgcgatgcgcgccaaagaccaagtttccctcggcaccatccgcctcatcaacgccgccgtcaaacagtttgaagtggacgaacgcaccgaagccgacgatgccaaaatcaccgccatcctgaccaaaatggtcaaacagcgcaaagacagcgtgaaaatctacactgaagccggccgtcaggatttggcagacaaagaaaacgccgaaatcgaggtactgcaccgctacctgccgcaaatgctctccgccggcgaaatccgtactgcggtcgatgccgccgttgccgaaaccggcgcggcaggtatggcggatatgggcaaagtgatgggcgtattgaaaacccgacttgccggcaaggccgatatgggcgaagtcaacaaaatcttaaaagccgtgctgaccgcctga

SEQ ID NO: 29539 - DNA, 213 bp, Neisseria meningitidis
atgcctgcaatccgcgtaaaagaaaacgaaccctttgaagtcgctatgcgccgtttcaaacgcgccgtagaaaaaaccggcctgctgaccgagctgcgcgcccgcgaagcctacgaaaaaccgactaccgaacgcaaacgcaaaaaagcggcagccgtaaaacgcctgcaaaaacgcctgcgcagccaacaactgccgcccaaaatgtactaa

SEQ ID NO: 29540 - DNA, 687 bp, Neisseria meningitidis
atggcagacctgaccttccaacaagccgtttccaacatcatcggtatgaaaggcgaaatcgtccgcgcattgggcgaaaccttcgtcatggtcggcttatccaccacattcgccgtcatcttcggcacgctgctgggcgtgctgctcttcgtaacctccagccgccaactgcattacaacaagctggtgaacttcctgctcgacaacctcgtcaacctcatgcgcgccttccccttcgtcatcctgatgattgcgatgatacccgccacacgcgccatcgtcggcagcaccatcggtccggttgccgcctcgctggtgttgagcgtgtcgggattgttttattttgcccgtttggtggaacaaaacctgcgcgaagtccccaaaggcgtgattgaagccgccgccgctatgggtgcgccgccggttgccatcatccgcaaagtcctcttaaacgaagcgcgcgcgggcatggtttccagcattaccgtgcttgccatcgggcttttgtcatacagcgcggcggcagggatgataggcggcggcggcttgggcgacctcgccatccgctacggctactaccgctaccaaaccgaagtcatcgtcttcatcgtcgccctcctcgtgctgctggtcatcctgattcaaagcaccggcaacgcgttggcgcggaaactcgacaaacgttga

SEQ ID NO: 29541 - DNA, 864 bp, Neisseria meningitidis
atgaaaaccttcttcaaaaccctttccgccgccgcactcgcgctcatcctcgccgcctgcggcggtcaaaaagatagcgcgcccgccgcatccgcttctgccgccgccgacaacggcgcggcgaaaaaagaaatcgtcttcggcacgaccgtcggcgacttcggcgatatggtcaaagaacaaatccaacccgagctggagaaaaaaggctacaccgtcaaactggtcgagtttaccgactatgtgcgcccgaatctggcattggctgagggcgagttggacatcaacgtcttccaacacaaaccctatcttgacgacttcaaaaaagaacacaatctggacatcaccgaagtcttccaagtgccgaccgcgcctttgggactgtacccgggcaagctgaaatcgctggaagaagtcaaagacggcagcaccgtatccgcgcccaacgacccgtccaacttcgcccgcgtcttggtgatgctcgacgaactgggttggatcaaactcaaagacggcatcaatccgctgaccgcatccaaagcggacattgccgaaaacctgaaaaacatcaaaatcgtcgagcttgaagccgcgcaactgccgcgtagccgcgccgacgtggattttgccgtcgtcaacggcaactacgccataagcagcggcatgaagctgaccgaagccctgttccaagaaccgagctttgcctatgtcaactggtctgccgtcaaaaccgccgacaaagacagccaatggcttaaagacgtaaccgaggcctataactccgacgcgttcaaagcctacgcgcacaaacgcttcgagggctacaaatcccctgccgcatggaatgaaggcgcagccaaataa

SEQ ID NO: 29542 - DNA, 867 bp, Neisseria meningitidis
atggcaggtgaaaccattaccgctgccgactacatcaagcaccacttgcagagcttgaccagtttgtcggatgttactcagggtcagggactgaaaaacattgctgatttttcgtttattaaccttgatgccgtcttttttgccgtcctgttgggcgtaatcggcagcttcctgttgtggcgcggtgcaaaaaaagcgacggcaggcgttcccggacgtttccaggccgccgtggaaatcttgtttgagtttgtggacgatatgtgtaagagcatcattcacaacgaaaagtctagaaaagccgtcgcgccgttgggtctgacgctgtttgtctggattttcctgatgaacgcgatggatatgctgccggtcgatttgctgccgatggtatggcagggcattaccggcaaccatcacgccctgttgcgcgtcgtaccgactgccgatttgaacaccactttggcactcgctgtcggcgtgttgctgatttgtatctattacaacatcaaaatcaaaggattgggcggatggtttcacgagttgttcagcgcgccgttcggtgcaaaactcgcacctgcgaacttcctgctgaatttggtcgagtttctttctaaaaccgtatcccacggtatgcggttgttcggcaatatgtatgcaggcgagttggtattcttgttgatagccttgcttggcggtgcttgggcggcttccggcagcgtcgaagtcatggatccgattctgtttgtattccacattattgccggtttggcatgggcgattttccatattttggtgattaccctgcaggcgtttattttcatggcgttggcgttcgtctatatcggacaggcacatgatgcgcactga

SEQ ID NO: 29543 - DNA, 237 bp, Neisseria meningitidis
atgggtttgattgctatcgcatgtggtttgatcgttgcattgggcgcactgggtgcctctatcggtatcgcaatggtcggttctaaatatttggagtcttctgcccgtcagcccgaactgatcggtccgctgcaaaccaaactgttcctgattgccggtttgattgatgccgcattcttgattggtgtcgccattgcactgctgttcgccttcgttaacccgtttgcaggtgcataa

SEQ ID NO: 29544 - DNA, 471 bp, Neisseria meningitidis
gtgaatatcaatgcaacattattcgctcaaatcatcgtctttttcggtttggtatggtttaccatgaaattcgtgtggccgccgattgcaaaagctttggatgagcgtgccgcaaaagtcgccgaaggcttggcagctgccgagcgtggtaaaagcgatttcgagcaggctgaaaaaaaggttgcagaactcttggcagaagggcgtaatcaggtttccgaaatggttgccaacgccgaaaaacgtgccgccaaaattgtcgaagaagccaaagaacaggcttcttccgaggcggcgcgcattgcagctcaggcaaaggccgatgtggagcaggaattgttccgcgcacgcgaatccctgcgcgagcaggttgccgtgttggctgtcaaaggtgccgaatctattttgcgcagcgaagtcgatgcttccaaacacgcaaaactgctcgataccctgaaacaggagctgtaa

SEQ ID NO: 29545 - DNA, 534 bp, Neisseria meningitidis
atggcagagttcgcaacgattgccagaccttatgcaaaggcattgttcggtctggctcaggaaaaaagccaaattgagtcttggttgggcggactggaaaaacttgcggcggttgttcaggaagggaaggtggcttcattgattgaccgtcctgaaacgaatgcttcagaaaaagcagatatcctcatcgatttggtcggtttgaaagacaaggagttgaaaaactttgttatcgtcttggccgggcagaaacgtttgtcgatattgccggaagtatatgctcaatatcaagacttgaccttatcattcaaccatatcaaatctgccgtcatttacagtgcctatccgttgaccgacaaacaggtcggcgagttggcgcaaatgctgaataagcgtttcgacagcgagctgaaaatctctgtcgaaatcgaaccggagctgattggcggcataaaagttgaagtgggtgatcaggttttggatttgtctgtacaaggcaaattgagtgccttgtacacgactatgacgaattag

SEQ ID NO: 29546 - DNA, 1548 bp, Neisseria meningitidis
atgcagcttaatcctgctgaaattagcgatttgattaaagccaagatcgaaaatctgtctgtaaatgccgaagtgcgtacccgtggtacggtgatttcggtaactgacggtatcgttcgcatccatggtttgtcagatgcaatgcaaggtgagatgctcgaattcccgggtaacactttcggcttggcgatgaacctggagcgcgactccgtcggcgccgtagtgttgggcgagcacgaacatattaaagaaggcgacacggttacctgtaccggtcgtatcttggaagtgccggtcggacgcgaactggtcggacgcgtcgttgatgcattgggtcggcctatcgacggcaaaggcccgattaatacaactttgaccgcccctatcgaaaaaatcgcaccgggcgtgattgcgcgcaaatcggttgaccagccgatgcaaaccggtctgaaggcgattgactctatggttcctgtcggtcgcggtcagcgtgagttgattattggcgaccgtcaaactggtaaaacggccgtagcgctggatgccatcgtcaaccaaaaaggtacgggtgttatctgtatctatgtcgctatcggtcaaaaagcatcttctattgccaacgtggtccgcaaattggaagagcatggcgcgatggaacacacgattgtggttgctgcaactgcatctgaagcggcggcattgcaatatatcgcaccttactccggttgtacgatgggtgaattcttccgcgaccgcggcgaagatgccttgattgtttatgacgatttgtccaaacaggctgtggcttaccgtcaaatttccctgcttttgcgccgtccgcccggccgcgaagcctatcccggcgatgtgttctacctgcactcccgtctgttggaacgtgcagcacgtgtcaatgaacacgaagtggagaaattgaccaacggcgaagtaaaaggcaaaaccggttctctgactgctttgccgattatcgaaacccaagcgggcgacgtatctgctttcgttccgactaacgtcatttcgattaccgacggtcagattttcttggaaaccgacctcttcaacgccggtatccgtcctgcaatcaatgccggtatttccgtatcccgcgtaggcggtgctgcacaaaccaaagtgattaaaaagctgggtggcggtatccgtttggcgttggcacaatatcgtgaattggcggcgttctcgcaatttgcatccgatttggatgaagctacgcgcaaacaattggagcatggcgaagtcgtaaccgaactgatgaaacagaaacagttcagtacgttgaatacggctgaaatggctttgaccctttgggcaatcaacaacggttcgtattctgatgttccggttgccaaagctctggcttttgaatctgaatttttgagctttgtccgtacccaacatccggaagttttggaagccgtcaatgcttcaggtgcaatgtccgacgagagcgagaaaacgcttgaagcagccatgaaatccttcaaatcttcttacgcctatcaggcataa

SEQ ID NO: 29547 - DNA, 906 bp, Neisseria meningitidis
atgcttaccttccaacaaatcatcttcaaactgcaaacattctgggcagacaaaggctgcaccgtcatccaacccttcgacatggaagtcggtgccggcacatcccatcccgccacctgtctgcgcgcactcggccccgagccttggtttgccgcctacgtccaacccagccgccgccccaaagacggtcgctacggcgacaaccccaaccgcctgcaacactattaccaattccaagtcgccctcaagcccgctcccgccaatatccaagacctctatctcgactccctgcgcgaattgggcatcgaccccaaagtgcacgacatccgctttgtcgaagacgactgggaaaaccccaccctcggcgcgtggggtttgggctgggaagtctggctcaacggtatggaagtaacccagttcacctatttccaacaagtcggcggcatcgactgcacccccgtactcggcgaaatcacctacggcatcgaacgcttggcgatgtacctgcaaggcgtggaaaacgtctatgacctcgtttgggcaaaaacgctggacggtaatacagtaacttacggcgacgtgtaccaccaaaacgaagtcgaacaatccacctacaacttcgaatacagcgatgccgattggctgctgcgccagttcaacgactacgaagcgcaagccaaacgcctgcttgccgaagaaaacgccgccctcgccctgcctgcctacgagcttgtcctcaaagcggggcatacgttcaaccttttagacgcacgcggcgcgatttccgtaactgagcgggcaacttatattggacgtattcgtgcattgagccgcgccgtggcgcaaaaatatgttgaaagccgcgaaaaactgggcttccctttaatgaaggcaaacgccgcctaa

SEQ ID NO: 29548 - DNA, 2064 bp, Neisseria meningitidis
atgatgacccaaacccttttaattgaacttctcactgaagaactcccgcccaaagccctgaataatctgggcaaccattttgccgccgccgttgccgaaggcttggaaaaagcgcaactggttgacggcgcagctgaatacactgcctacgcttctccgcgccgtttggcggttcaagtcaaaaacgtcaaagccgttcaagccgaccagaaaatcgtgaaaaaaggccctgccgtggcgaatgccgtaaaagacggtgcgccgaccaaggctttggaaggtttcgcacgcggtgcgggcgcgaaaatcgaagacttgaccatcgtccacgacggcaaacaggatgtgtacgcctacgaatacgtccaaaccggcaaactgttgggcgaacttttggaagacatcatcaatgccgcagtgaaaaaactgccgattccgaaagtgatgcgttggggcagcagcacgtttaccttcgtgcgccccgtccacgggctgattgtgctgcacggcggcgacattgtgaacgtcagcgttttgggcctgcaaagcggcaacaaaaccttggggcaccgcttcctctccgacggcgaaatcactattgaaaacgccgacagctacgccgaacaaatgcgcgagcaaggcaaagtcgtcgcttcgtttgccgagcgcaaagctgcgattcagacggcattggaagggcaggcgcgccgtctgaacgccgccgtcgccgccgatgaagcattgttggacgaagtaaccgcgctggtcgaatggcctgttgttttggaagccggttttgaagaacacttcctcgccgtaccgcaagaatgcctgattctgaccatgcagcaaaaccaaaaatacttcccgctgctcgatcaaaacggcaagctgatgaaccgcttcctgctggtgtccaacctgcaaaccgaagacccgtcacacatcatccaaggcaacgaacgcgtcttgcgcgcacgcctgtctgatgccgagttcttctacaaacaagaccaaaaagcgactttggaaagccgtctgccgaaattgtccggcgtggtttaccacaataaaatcggttcgcaggccgagcgcatcgaacgcctgcaaagcatcgccgcccatatcgccaaagcattgggcgcggatgccgccgcagccgaacgcgccgcgcgtttggcaaaagccgacttggtaaccgaaatggtcggcgagtttcccgaactgcaaggcacgatgggcaaatactatgcccgcttggacggcgaaaccgaagaaatcgccgaagccgtcgagcaacattaccaaccgcgttttgccggcgacaagctgcccgaaagcaaaattgccactgccgttgcacttgccgacaagctggaaaccctggtcggcatttggggcatcggtctgattccgaccagcgacaaagacccatacgccctgcgccgttccgcattgggtattttgcgtatgctgatgcagtacggtttggacgtaaacgaactgattcagacggcattcgacagcttccccaaaggtttgctcaacgaaaaaacgccgtctgaaaccgccgacttcatgcaggcgcgtttggccgtgttgctgcaaaacgattatccgcaagacatcgttgccgccgtattggcgaaacagccgcgccgtttggacgacgtagtggccaaactgcaggccgttgcctcgttcaaacagctgcccgaagccgccgcgctcgccgccgccaacaaacgcgtgcaaaacctgctgaaaaaagccgatgccgagttgggcgtggttaacgaaagcctgttgcaacaggacgaagaaaaagccctctttgccgctgcgcaaggcttgcagccgaaaatcgccgccgctgttgccgaaggcaatttccaaaccgccttgtccgaactggcttccgtcaaaccgcaagtcgatgcattctttgacggcgtgatggtaatggcggaagatgccgccgtaaaacaaaaccgcctgaacctgctgaaccgcttggcagagcaaatgaacgcggtagccgacatcgcgcttttgggcgagtaa

SEQ ID NO: 29549 - DNA, 726 bp, Neisseria meningitidis
atgccccgattctacctgcccgaaaacctttccgtcggacaaaccgtcgccctgcccgacaacatcgtccgccacctcaacgtcctacgcgtccgccccaacgaaaacatcaccctcttcgacggcaaaggcaaggcacacgccgcacagctgaccgttttggaaaaacgccgcgccgaagccgaaatcctgcacgaagacacaaccgacaacgagtccccgctcaacatcacactgatacaatccatctcctccggcgatcgcatggatttcaccctgcaaaaaagcgtcgaactcggcgtaaccgccatacagcccgtcatcagcgaacgctgcatcgtccgcctcgacggagaacgcgccgccaaacgcctcgcacgctggcaggaaatcgtcatctccgcgtgcgaacaaagcggcaggaacaccgttccccccgtactgcccatcatcggctaccgtgaagcactcgacaaaatgccgtctgaaagcaccaagctgattatgagcatcaaccgcgcccgcaaactcggcgacatccgccacccgtccggcgcaatcgtctttatggtcgggcccgaaggcggctggacagaacaggaagaacaacaggcatttgatgccggcttccaaaccgtaacattgggcaaacgcatcctgcgcaccgaaaccgtcgccctcgccgccctcgccgcgatgcagacgctttggggcgatttcgcataa

SEQ ID NO: 29550 - DNA, 747 bp, Neisseria meningitidis
atgagcacacaagatttaagcggcaaaatcgctttggtaaccggcgcctcgcgcggtatcggtgcagcaattgccgacacactggcggcagccggtgccaaagtcatcggtacggcgaccagtgagagcggtgcggcggcgattagcgagcggttggcgcaatggggcggcgaaggccgtgcattggattccgccgaacctgaaaccatcgaaagcctgattgccgacatcgaaaaagcattcggcaaactcgacattctggtcaacaacgctggcatcacccgcgacaacctcctgatgcgtatgaaagaagaagagtgggacgacatcatgcaggtcaacctcaaatccgtcttccgcgcttctaaagccgtcttgcgcggcatgatgaaacaacgttccggccgcatcatcaacatcacatccgtcgtcggcgtgatgggcaatgccgggcaaaccaactacgccgccgccaaagcaggcttaatcggttttgccaaatccatggcgcgcgaagtcggcagccggggcattaccgtcaactgcgtcgcccccggctttatcgataccgatatgacccgcgccctgccggaagaaacccgccaagcctttaccgcccaaaccgccttgggcagattcggcgacgcgcaagacattgccgatgcagtcttgttcttggcttccgatcaggcaaaatacattaccggtcaaacgctgcacgtcaacggcggcatgctgatgccctga

SEQ ID NO: 29551 - DNA, 1566 bp, Neisseria meningitidis
atgacccaagacaaaatcctcatccttgacttcggttcgcaagttacccagctcatcgcccgccgcgtgcgcgaagcccacgtttactgcgagctgcattccttcgatatgcctttggacgaaatcaaagccttcaaccccaaaggcatcatcctttccggcggccctaattccgtttacgaatccgactatcaagccgataccggtatctttgacttgggcattccgattttgggcatttgctacggcatgcaatttatggcgcaccacttgggtggtgaagtgcaacccggcaaccagcgcgaattcggttacgcgcaagtcaaaaccatcgacagcgagctgacacgcggcattcaagacgatacgccaaacacgctcgacgtatggatgagccacggcgataaagtttccaaactgcctaccggtttcaccgtcatcggcgacacgccgtcctgcccgattgccatgatggaaaacgccgaaaaacaattctacggcatccaattccaccccgaagtaacccacaccaaacaaggccgcgccctgttgaaccgctttgttttggatatttgcggcgcacaaccgggctggacaatgccgaactacatcgaagaagccgttgccaaaatccgcgaacaagtcggcagcgacgaagtgattttaggcttgtccggcggcgtggactcttccgtagccgccgcgctgatccaccgcgccatcggcgaccaactgacctgcgtgttcgtcgatcacggtttgttgcgcctgaacgaaggcaaaatggtgatggatatgttcgcccgcaacttgggtgtgaaagtgattcacgtcgatgccgaagggcagtttatggcgaaactcgccggcgttaccgaccctgagaaaaaacgcaaaatcatcggcgcggaatttatcgaagtatttgatgccgaagagaaaaaactcaccaacgccaaatggctggcgcaaggcacgatttaccccgacgtaatcgaatccgcaggcgcgaaaaccaaaaaagcccacgccatcaaatcccaccacaatgtcggcggcctgcctgaaaacatgaagctcaagctgcttgagccgttgcgcgacttgtttaaagacgaagtgcgcgaactgggcgttgctttgggtctgccgcgcgaaatggtgtaccgccatccgttccccggccccggtttgggcgtgcgcatcttgggcgaagtgaaaaaagaatacgccgacttattgcgtcaagcagacgatattttcatccaagaattacgcaacaccaccgacgaaaacggcacatcttggtacgacctgaccagccaggcatttgccgtattcctgcctgtgaaatccgtcggcgtaatgggcgacggacgcacttacgactacgtcgtcgcactgcgcgcagtcatcaccagcgacttcatgaccgcacactgggcagaactgccttactcactgctcggacgcgtgtccaaccgcatcatcaacgaagtcaaaggcatcaaccgcgtggtttatgatgtgagcggcaaaccgcctgccaccatcgagtgggaataa

SEQ ID NO: 29552 - DNA, 1866 bp, Neisseria meningitidis
atgatagaaaaactgactttcggactgtttaaaaaagaagacgcgcgcagctttatgcgcctgatggcgtacgtccgcccctacaaaatccgcatcgttgccgccctgattgccattttcggcgttgccgccaccgaaagctaccttgccgccttcatcgcccccctgattaaccacggcttttccgcacccgccgcgccgcccgagctgtctgccgccgccggcatcctttccaccctgcaaaactggcgcgaacagtttacctatatggtttgggggacggaaaacaaaatctggaccgtcccgctcttcctcatcattctcgtcgtcatccgtggcatctgccgctttaccagcacctatctgatgacttgggtctccgtgatgaccatcagcaaaatccgcaaagatatgtttgccaaaatgctgaccctttcctcccgctaccatcaggaaacgccgtccggcaccgtactgatgaatatgctcaacctgaccgaacagtcggtcagcaacgccagcgacatattcaccgtcctcacgcgcgacacgatgatcgttaccggcctgaccatcgtcctgctttacctcaactggcagctcagccttatcgtcgtcctgatgttccccctgctctccctgctctcgcgctactaccgcgaccgtctgaaacacgtcatttccgactcgcaaaaaagcataggcacgatgaacaacgtgattgccgaaacccatcagggacaccgcgtcgtcaagctgttcaacgggcaggcgcaggcggcaaaccggttcgacgcgatcaaccgcaccatcgtccgcctcagcaaaaaaatcacgcaggcaacggcggcacattccccgttcagcgaactaatcgcctcgatcgccctcgccgtcgtcatcttcatcgccctgtggcaaagccaaaacggctacaccaccatcggcgaatttatggcattcatcgtcgcgatgctgcaaatgtacgcccccatcaaaagccttgccaacattagcatccctatgcagacgatgttcctcgccgccgacggcgtatgtgcatttctcgacaccccgcccgaacaggacaaaggcacgctcgcaccgcagcgtgtcgaagggcgcatcagcttccgcaacgtcgatgtcgaataccgttcggacggcatcaaagccctcgacggcttcaacctcgacatcagacaaggcgaacgcgtcgccctggtcggacgttccggcagcggcaaatccaccgtcgtcaacctgctgccccgctttgtcgaaccgtctgccggcaacatctgcatagacggtatcgacatcgccgacatcaaactcgactgcctgcgcgcccaatttgccctcgtctcccaagacgtattcctgtttgacgacaccctgtttgaaaacgtccgatatagccgtcccgacgcgggcgaagccgaagtcctatccgccctccaagccgctaacctgcaaagcctgatcgacgcatcaccgctcggactgcaccagcccatcggatcgaacggcagcaacttatccggcggacagcggcaacgcgttgccattgcccgcgccattttgaaagacgcgccgatattattattggacgaagccaccagcgcattggacaacgaatccgaacgcctcgtccaacaggcgctcgaacgcctgatggaaaaccgcaccggcatcatcgtcgcccaccgcctgaccaccatcgaaggggccgaccgcatcatcgtaatggacgacggcaaaatcatcgaacaaggcacacacgaacaactgatgtcccaaaacggctactacacgatgttacgcaatatctcaaacaaagatgccgccgtccggacggcataa

SEQ ID NO: 29553 - DNA, 927 bp, Neisseria meningitidis
atgtcttttgccttcttttttcccggacaaggttcccaaagcctcggtatgatgaacggctttgccgaacacgccatcgtcaaaaacacctttgccgaagcctccgccatattggggcaggacttgtgggcgatgattaacggcagcgatgccgaaatcatcggacaaaccgtcaatacccagcccatcatgctcgccgccggcgttgccgtttaccgcgcctattcggaagcgggcggcaaaacgcctgccgccgttgccggacacagcctcggcgaatacaccgcactcgttgccgccggcgcattggattttgccgacgcggtcaaactcgtgcgcctgcgcgccgaactgatgcagtccgccgtaccgcaaggcgtgggcgcaatggcggcgattctcggcttggaagatgaacaggtaaaacaaatttgcgccgaatccgcacaggatgaagtggttgaagccgtcaacttcaactcgcccggacaagtcgtgattgcaggcaatgccgccgccgtcgagcgcgctatgcttgccgccaaagaagccggcgccaaacgcgccctgccgctgcccgtgtccgtaccttcccattgcagcctcatgaaacccgccgccgacaaactcgccgaagccctgaaaaccgttgaaatcaagcagccgcaaatccgcgtcatccacaacgccgacgttgccgcctacgatgatgccgacaaaatcaaagacgcgctcgtccgccagctttacagccccgtacgctggacggaaaccgtcaacgcccttgtttcagacggcattgccgaatccgccgaatgcggcccgggcaaagtgttggcaggtctggcaaaacgcatcaacaaggccgccgcgtgcagcgcgctgaccgatgccggacaggttgccgcctttatcgaagcacactga

SEQ ID NO: 29554 - DNA, 963 bp, Neisseria meningitidis
atgcagtatgccaaaatttccggcacgggcagctatcttcccgccaaccgcgtcagcaatgacgaccttgcccaaaaagtggatacctcggacgagtggattaccgcgcgcacgggcatcaaattccgccatattgcagccgaaaacgaaaaaaccagcgaccttgccgccgaagcggcgcgccgcgcgctggatgccgcaggtttgaacggcaatgaaatcgacctgattatcgtggcgacggcaacgccggatatgcagtttccgtctactgcgaccatcgtgcagcaaaaattgggcataaccaacggctgccccgcgtttgacgtacaggcggtgtgcgccggctttatgtacgcgctgaccacggcaaacgcctacattaaaagtggcatggcgaaaaacgcgctggtcatcggcgcggaaaccttcagccgcatcgtcgattggaacgaccgcacaacctgcgtattgttcggcgacggcgcgggcgcggtggttttaagcgcgtcggacacgccgggcatcatccacagcaaactcaaggccgacggcaattatctgaaactcttaaacgtccccgggcaaatcgcctgcggcaaagtttccggttcgccgtacatttcgatggacggtcccggcgtgttcaagtttgccgtcaaaatgctgtccaaaatcgccgatgacgttatcgaagaagccggttataccgccgctcaaatcgactggatcgtgccgcatcaggcaaaccgccgcattatcgaatcgaccgcgaaacatttaggtttgagtatggacaaagtcgtcctgaccgtccaagaccacggcaacacatccgccgcatcgattccgctggctttggatacgggcatccgcagcggacaaatcaaacgcggtcaaaacctgctgctcgaaggcatcggcggcggtttcgcgtggggcgcggtgctgttgcaatattga

SEQ ID NO: 29555 - DNA, 591 bp, Neisseria meningitidis
atgggtttggaactgcctttgattttgggtacgagttcggttttccgccgcgaacagatggaaaggctcggcattgcctttcaggcggcgtcccccgattttgacgaaacgccgatgttgggggaatccgcccctcagacggcattgcgccttgccgagggtaaggcgaggtcgttggccggacgtttccccgaggcgttgattgtcggtgcggaccaggtggcgtggtgcgacggcaggcagtggggcaagccgatgaaccttgccaacgcgcaaaagatgctgatgcatttgagcggcagggagattgagttttacagcgcggtcgttctgctaaatacggttacgggcaggatgcagcggcatatcgataagacggtggtcgtgatgaggaagttggacgagctgcacatcctccgctatttggagcgcgagcctgatgcggtttattgctcgtgtgcgttgaagagcgaggctttgggtgcattgttgatcgaacggattgagagtaccgatccgaatgctttaatcggtttgccggttttccgtctggtcgattttttgaaaaatgagggcgtggatgttttgtaa

SEQ ID NO: 29556 - DNA, 1638 bp, Neisseria meningitidis
atggattttaaaagactcacggcgtttttcgccatcgcactggtgattatgatcggatgggaaaagatgttccccactccgaagcccgtccccgcgccccaacagacggcacaacaacaggccgtaaccgcttccgccgaagccgcgctcgcgcccgcaacgccgattaccgtaacgaccgacacggttcaagccgtcattgatgaaaaaagcggcgacctgcgccggctgaccctgctcaaatacaaagcaaccggcgacgaaaataaaccgttcatcctgtttggcgacggcaaagaatacacctacgtcgcccaatccgaacttttggacgcgcagggcaacaacattctaaaaggcatcggctttagcgcaccgaaaaaacagtacagcttggaaggcgacaaagttgaagtccgcctgagcgcacctgaaacacgcggtctgaaaatcgacaaagtttatactttcaccaaaggcagctatctggtcaacgtccgcttcgacatcgccaacggcagcggtcaaaccgccaacctgagcgcggactaccgcatcgtccgcgaccacagcgaacccgagggtcaaggctactttacccactcttacgtcggccctgttgtttatacccctgaaggcaacttccaaaaagtcagcttctccgacttggacgacgatgccaaatccggcaaatccgaggccgaatacatccgcaaaaccccgaccggctggctcggcatgattgaacaccacttcatgtccacctggatcctccaacccaaaggcggacaaagcgtttgcgccgctggcgactgccgtatcgacatcaaacgccgcaacgacaagctgtacagcaccagcgtcagcgtgcctttagccgctatccaaaacggtgcgaaatccgaagcctccatcaacctctacgccggcccacagaccacatccgttatcgcaaacatcgccgacaacctgcaactggccaaagactacggcaaagtacactggttcgcctcccccctcttttggcttttgaaccaactgcacaacatcatcggcaactggggctgggcgattatcgttttaaccatcatcgtcaaagccgtactgtatccattgaccaacgcctcttaccgttcgatggcgaaaatgcgtgccgccgcgcccaaactgcaagccatcaaagagaaatacggcgacgaccgtatggcgcagcaacaagccatgatgcagctttacacagacgagaaaatcaacccgctgggcggctgcctgcctatgctgttgcaaatccccgtcttcatcggattgtattgggcattgttcgcctccgtagaattgcgccaggcaccttggctgggttggattaccgacctcagccgcgccgacccctactacatcctgcccatcattatggcggcaacgatgttcgcccaaacctatctgaacccgccgccgaccgacccgatgcaggcgaaaatgatgaaaatcatgcctttggttttctccgtcatgttcttcttcttccctgccggtctggtattgtactgggtgatcaacaacctcctgaccatcgcccagcaatggcacatcaaccgcagcatcgaaaaacaacgcgcccaaggcgaagtcgtttcctaa

SEQ ID NO: 29557 - DNA, 366 bp, Neisseria meningitidis
ttggactaccgcttcggaaggcagtaccgcttgttgaaaacggatgatttttcatccgtttttgcattcagaaaccgccgcagccgcgacctgctgcaagtttcgcgttcaaacggcaacgggctggatcatccccgcatcggtctggtggtcggcaaaaaaaccgccaaacgcgccaacgaacgaaattatatgaagcgcgtcatccgcgactggttcagattgaacaaaaaccggctgccgccgcaggatttcgtcgtgcgcgtccgccgtaaattcgacagggctaccgcaaaacaggcaagggcggaactggcacaactcatgttcggcaaccccgcaaccggatgcaggaaacaggcatga

SEQ ID NO: 29558 - DNA, 135 bp, Neisseria meningitidis
atgaaacgcacttatcaaccttccgttaccaaacgcaaacgcacccacggcttcctcgtgcgctccaaaacgcgcggcggacgcgcagtattggccgcacggcgcgccaaaggccgcaaacgcctggcggtgtaa

SEQ ID NO: 29559 - DNA, 1557 bp, Neisseria meningitidis
atgacattagcagagttttggccgctgtgcctccgccgtcttcacgatatgttgcctcacgggcagtttgcgcaatggattgcgccccttaccgtcggtgaggaggggggcgtatgggtggtgtacggcaagaaccagtttgcctgcaatatgctcaagagccagtttgccggaaaaatagaagcggtgagggaagagttggctgccggccgttccgccttcgtattcaaaccgggagaaggcgtgtgttatgagatggcggcggttgaaggtgctgtcgaacctgccgagccgtccttgcacgcggggtcggaggagatgcctgtgcaggaggttctgttggacgagctgccgtctgaagagcctgtcaaacccgctgcgtcgaaaacggcggcggatattttggcagaacgtatgagaaacctgccgcacgagccgcgtcaggctgccgggtctgcttcccggccggaatcggcggcagttgccaaagcacggacggacgcgcagcgcgatgcggaagaggcgcgttacgagcagaccaatctgtcgccggactatacgttcgacacattggtcgaaggcaagggaaaccgccttgcggcggctgcggcgcaggcgattgcggaaagcccgggacagagttacaacccgttcttcctctatggcagtacgggtttgggtaaaacccaccttgtgcaggcggtcggcaacgaactgttgaaaaaccgtcccgatgccaaagtgcgctatatgcattcggacgactacatccgcagctttatgaaggcggttcgcaacaatacctatgacgtattcaagcagcaatacaagcaatacgacctgctgattatcgacgatattcagtttattaaaggaaaagaccgtacgatggaagagtttttctatctgtacaaccatttccacaacgagaaaaaacagctcatcctcacttgcgatgtgttgcctgcgaaaatcgaaggcatggacgaccgcctcaaatcccgtttttcatggggactgactttggaactcgagccgcccgaattggaaatgcgcatcgccattttgcagaaaaaggcggaagcggcgggcatcagtatcgaagacgaagccgcgctgttcattgccaatctgatccgttccaacgtgcgcgagcttgaaggcgcgtttaatcgtgtcggagcgagcagccgctttatgaaccgtcccgtcatcgacatcgatttggcgcgtaccgctttgcaggacattattgccgagaagcacaaagtcatcaccgccgatatcatcatcgatgcggtggcgaaatattaccgcatcaaaatcagcgacgtactcggcaaaaaacgcacgcgcaacattgcccgtccgcgtcaggttgccatgagcctgaccaaagaactgaccactttgagcctgccgtctatcggcgattcgtttggcggacgcgaccatacgaccgttatgcacggcatcagggcagtggcgaaactgcgcgaggaagaccccgagttggcgcaggattacgagaaactgctgattctgattcaaaactga

SEQ ID NO: 29560 - DNA, 1104 bp, Neisseria meningitidis
atgttgattttacaagccgaacgcgacagcctgctcaagccgctgcaagccgttaccggcatcgtcgaacgccgccataccctgcccatcctgtccaacgtcctgattgagggaaaaggcggtcagaccaaactcttggcaaccgatttggaaatccaaatcgacactgcgggtcccgagggcggcgcggacgacttccgcatcaccaccaatgccaagaaatttcaggacattttacgggcactgcctgccggtgcgctggtgtcgctggattgggacgacagccgtctgacgctgaaggcgggcaaatcgcgttttgccctgcagaccctgcctgccgccgattttccgatgatgaatgtcggcgaggacatcagcgcgactttctcgctggagcaggagcgtttcaaaaccatgctgtcgcaagtgcagtacagcatggcggtgcaggacatccgctattatctcaacggtctgctgatgcaggttgagggcagccagttgcgccttgtggcgaccgacggacaccgccttgcctatgcagcctgcgcgattgatgcggatttgccgcgcgccgaagtgattttgccgcgcaaaacggtgctggaactgttcaaactgttgaacaaccccgacgatccgattcaaatcgagctgctggacaaacaggtgcgtttccaatgcaacggcacgaccatcgtcagcaaggtcatcgacggcaaattccccgatttcaaccgcgtgattcctttggacaacgacaagattttcgttttgtcccgtgccgaacttttgggcgcgctggaacgtgtgtccattcttgccaacgaaaaattccgtggcgcgcgcctgttcctgcaatccggcctgttgagcgtcgtgtgcagcaacaacgagcaggaagaagcgcgcgaagaaatcgagattgcctatcagggcggcgaactcgaagtcggtttcaatatcggctatctgatggacgtgttgcgcaacatccattccgacgatatgcagcttgccttcggcgatgccaaccgctcgacgctgtttaccgtgccgaacaatccgaatttcaaatatatcgtgatgccgatgcgaatttga

SEQ ID NO: 29561 - DNA, 2733 bp, Neisseria meningitidis
atgcaagaacaatatcaacccgccgccatcgagcctgcggcgcagaaaaaatgggacgacgcccgtattttcaacgtctccgaagacgcttccaaacccaaatattattgcctctccatgttcccctatcccagcggcaagctgcatatggggcatgtgcgcaactacaccatcggcgatgtattgagccgcttcaaacttttaaacggcttcaacgtcatgcagcctatgggttgggacgcgttcggcatgccggcggaaaacgcggcgatgaaaaacaacgtcgcccctgccgcttggacgtacgataacatcgaatacatgaaaacccagctcaaaagcctgggttttgcgattgactgggcgcgcgaaaccgcaacctgcaaacccgaatactaccgctgggaacaatggctgtttaccaagctgtttgaaaaaggcatcgtctatcgcaaaaacggcacggtaaactgggacccggtcgaccaaaccgtccttgccaacgagcaagttatcgacggacgcggctggcgttccggcgcattgatcgaaaaacgcgaaatcccgatgtattacttcaaaatcacggattacgccgaagaactgctcaacgacttggacaagctggaacactggccggaacaagtcaaaaccatgcagcgcaactggatcggtaaatctcgcggtatgaccgtgcgcttcgccgtttcagacgacagcaaacaaggcttggaaggcgattacgcgaaattcctgcaagtttataccacccgtcccgacacgctgatgggcgcgacttatgttgccgttgccgccgagcatccgctggcaaccgccgcagccgccgacaaacccgaattgcaggcatttattgccgaatgcaaagccggttcggttgccgaagctgatatggcgacgatggagaaaaaaggcgtgccgaccggccgctacgtcgtcaacccgctcaacggcgacaagctggaagtgtggattgccaactatgtattgtggggctacggcgacggcgcggtaatggcggttccggcgcacgacgaacgcgatttcgagttcgccgccaaatacagcctgccgaaaaaacaggtcttacaacgcgtaacaatcggactttcgccagagcaagaagaagctatgggttttggtggcggttccggatgtggtgctggttatggtgatggtagtggttccgattcaagagatttgccgtttatgcctaataaatggcaagcatggtatggagtcaaagatgacttcatggtcttaatcaactcaggtgaactggacggcatgaattatcagacagcatttgatgctgtcgccgctaaattacaagctatcggagctggcgaaccgaaaacccaataccgcctgcgcgactggggcatttcgcgccaacgctactggggctgcccgattcccatcgtccattgcgaacaatgcggcgacgtacccgtccctgccgaccaattgccggtcgttttgcctgaaaacgtcgtacccgacggcatgggttcgccgctggcaaaaatgcccgagttttacgaaaccacctgcccatgctgcggcggcgcggcaaaacgcgaaaccgacaccatggacaccttcatggaatcaagctggtacttcttccgctacatgtcgccaaaattttcagacggcatggtcgatcctgccgccgcgaaatactggggcgcggtcgaccaatacatcggcggcatcgaacacgcgattttgcacctcttgtacgcgcgtttcttcaccaaactgatgcgcgacgaaggtttggtcaatgttgacgaaccgtttgaacgcctgctgacgcaaggcatggtcgtttgcgaaacctactaccgcgaaaacgacaaaggcggcaaagattggatcaaccccgccgatgtcgagctgacttttgacgacaaaggccgccctgtttccgccgtcctgaaagtcgacggactgcccgtcgtcatcagcggcacggaaaaaatgtccaagtccaaaaacaacggcgtcgatccgcaagaactgattaacgcctacggcgcagacaccgcccgcctgttcatgatgttcgccgcaccgcccgaacagtccctcgaatggagcgacagcggcgtcgaaggcgcgcaccgcttcctgcgccgcctgtggcgtaccgtttacgaatacttgaagcaaggcgaagcagtcaacgcgttcgcaggcagccaagacggtttgtctaaagaactcaaagaccttcgccacaaactgcattccaccatcgccaaagtcagcgacgactacggccgccgccagcagttcaacactgccatcgccgccgtgatggaactgctcaaccaatacgacaaaaccgacaccggcagcgaacaaggccgcaccgtcgcccaagaagtattggaagctgccgtacgcctgctgtggcccatcgtgccgcacatctgcgaaaccctgtggagcgaattgaacggcgcgaaactgtgggaagctggctggccggcagtcgacgaagccgccttggtcaaatccgaaatcgaagtgatggttcaagtcaacggcaaactgcgcggcaaaatcaccgtcgccgccgacgcctccaaagctgacctcgaagccgccgcactcgccaccgaaggcgcggtgaaattcatggaaggcaagcccgcgaagaaaatcatcgtcgttcccggacgcttggtgaatatcgtcgtctaa

SEQ ID NO: 29562 - DNA, 2178 bp, Neisseria meningitidis
atgacacgcttcaaatattccctgctgtttgccgccctgttgcccgtgtacgcgcaggccgatgtttctgtttcagacgacccaaaaccgcaggaaagcactgaattgccgaccatcaccgttaccgccgaccgcaccgcgagttccaacgacggctacactgtttccggcacgcacaccccgctcgggctgcccatgaccctgcgcgaaatcccgcagagcgtcagcgtcatcacatcgcaacaaatgcgcgaccaaaacatcaaagcgctcgaccgcgccctgttgcaggcgaccggcaccagccgccagatttacggctccgaccgcgcgggctacaactacctgttcgcgcgcggcagccgcatcgccaactaccaaatcaacggcatccccgttgccgacgcgctggccgatacgggcaatgccaacaccgccgcctatgagcgcgtagaagtcgtgcgcggcgtggcggggctgctggacggcacgggcgagccttccgccaccgtcaatctggtgcgcaaacgcccgacccgcaagccattgtttgaagtccgcgccgaagcgggcaaccgcaaacatttcgggctgggcgcggacgtatcgggcagcctgaatgccgaaggcacgctgcgcggccgcctggtttccaccttcggacgcggcgactcgtggcggcagcgcgaacgcagccgcgatgccgaactctacggcattttggaatacgacatcgcaccgcaaacccgcgtccacgcaggcatggactaccagcaggcgaaagaaaccgccgacgcgccgctcagctacgccgtgtacgacagccaaggttatgccaccgccttcggcccgaaagacaaccccgccacaaattgggcgaacagccgccaccgtgcgctcaacctgttcgccggcatcgaacaccgcttcaaccaagactggaaactcaaagccgaatacgactacacccgcagccgcttccgccagccctacggcgtagcaggcgtgctttccatcgaccacaacaccgccgccaccgacctgattcccggttattggcacgccgacccgcgcacccacagcgccagcgtgtcattaatcggcaaataccgcctgttcggccgcgaacacgatttaatcgcgggtatcaacggttacaaatacgccagcaacaaatacggcgaacgcagcatcatccccaacgccattcccaacgcctacgaattttcccgcacgggtgcctacccgcagcctgcatcgtttgcccaaaccatcccgcaatacggcaccaggcggcaaatcggcggctatctcgccacccgtttccgcgccgccgacaacctttcgctgatactcggcggcagatacagccgttaccgcaccggcagctacgacagccgcacacaaggcatgacctatgtgtccgccaaccgtttcaccccctacacaggcatcgtgttcgacctgaccggcaacctgtcgctttacggctcgtacagcagcctgttcgtcccgcaatcgcaaaaagacgaacacggcagctacctgaaacccgtaaccggcaacaatctggaagccggcatcaaaggcgaatggcttgaaggccgtctgaacgcatccgccgccgtgtaccgcgcccgtaaaaacaacctcgccaccgcagcaggacgcgacccgagcggcaacacctactaccgcgccgccaaccaagccaaaacccacggctgggaaatcgaagtcggcggccgcatcacgcccgaatggcagatacaggcaggttacagccaaagcaaaacccgcgaccaagacggcagccgcctgaaccccgacagcgtacccgaacgcagcttcaaactcttcactgcctaccactttgcccccgaagcccccagcggctggaccatcggcgcaggcgtgcgctggcagagcgaaacccacaccgaccctgccacgctccgcatccccaaccccgccgccaaagcccgcgccgccgacaacagccgccaaaaagcctacgccgtcgccgacatcatggcgcgttaccgcttcaatccgcgcgccgaactgtcgctgaacgtggacaatctgttcaacaaacactaccgcacccagcccgaccgccacagctacggcgcactgcggacagtgaacgcggcgtttacctatcggtttaaataa

SEQ ID NO: 29563 - DNA, 1065 bp, Neisseria meningitidis
atggcactcgtatccatgcgccaactgcttgatcatgctgccgaaaacagctacggcctgcccgcgttcaacgtcaacaacctcgaacaaatgcgcgccattatggaagccgccgaccaagtcaacgcgcccgtcatcgtacaggcgagcgcaggtgcgcgcaaatacgcgggcgcgccgtttttgcgccacctgattttggcggctgtcgaagaatttccgcacatccccgtcgtgatgcaccaagaccacggcgcatcgcccgacgtgtgccaacgctccatccaactgggcttttcctccgtgatgatggacggctcgctgatggaagacggcaaaaccccttcttcttatgaatacaacgtcaacgccacccgtaccgtggttaatttctcccacgcctgcggcgtatccgttgaaggcgaaatcggcgtattgggcaacctcgaaactggcgaagccggcgaagaagacggtgtaggcgcagtgggcaaactttcccacgaccaaatgctcaccagcgtcgaagatgccgtgcgtttcgttaaagataccggcgttgacgcattggcgattgccgtcggcaccagccacggcgcgtacaaattcacccgtccgcccacaggcgacgtgttgcgtatcgaccgcatcaaagaaatccaccaagccctgcccaatacacacatcgtgatgcacggctccagctccgttccgcaagaatggctgaaagtcatcaacgaatacggcggcaatatcggcgaaacctacggcgtgccggttgaagaaatcgtcgaaggcatcaaacacggcgtgcgtaaagtcaacatcgataccgacttgcgccttgcttccaccggcgcggtacgccgctaccttgccgaaaacccgtccgacttcgatccgcgcaaatatttgagcaaaaccattgaagcgatgaagcaaatctgcctcgaccgctacctcgcgttcggttgcgaaggtcaggcaggcaaaatcaaaccggtttccttggaaaaaatggcaaaccgttatgccaagggcgaattgaaccaaatcgtcaaataa

SEQ ID NO: 29564 - DNA, 918 bp, Neisseria meningitidis
atggttttggacgggtttgcggcgcattttgacgcttatttggaaaacatcgtgcgcgagggcaagtcggagcacacggtggcggcataccggcgcgatttggaagaactgtttgcgctgttggcacaaatgccgtctgaagatgcaggcggcgtgccgcagggcttgtcgcagcgcgattttacggcggcgttgcggcggctgtcgcagcgcggtttgaatgcgcggacgctggcgcgcaagctgtcgtcttggcggcagtattgcgcctggctggtcaaacgcggtctgctgcataccgacccgaccgccgacatcaaaccgccgaagcagcccgagcgcgtacccaaagccctgccgcaggaatggctgaaccggatgctggatttgcccgtggacggcggcgacccgctggcggtgcgcgatcacgcgctgttcgaactgatgtacggcagcggtttgcgcgtgagcgagatacacggcttgaatgcagatgatgtatatttggacgaggcgtgggtacacgttaccggcaaaggacgcaagcagcggcaggttccgctgaccggcaaaagcgtggaagccctgaaaaactatctgccgctgcgtcagacggcatcggacggcaaagccctgtttaccggcaggaacggcacgcgcctgagccaacgccaaatccaaaaacgtttggcgcaatgggcggcgcaaaacggcgacggcaggcacgtttcgccgcatatgatgcgccacagctacgccggacacctgttgcaggcttcgcgcgacatcagggcggtgcaggagctgctcgggcacagcagcctttcgaccacgcagatttacaccaaactcgatttcgaccacatcgcccgcctgtatgacgaagcccacccgcgcgccaagcggcaggacgaatga

SEQ ID NO: 29565 - DNA, 1914 bp, Neisseria meningitidis
atgaacccaagccccctactcgacctgattgacagcccgcaagatttgcgccgtctggacaaaaaacagctgccgcgccttgccggcgagttgcgcacctttctgctggaatctgtcgggcagaccggcgggcatttcgccagcaatttgggcgcggtcgagctgacggttgcgctgcactacgtttacaacacgcccgaagacaagctggtgtgggatgtcggacaccaaagctatccgcacaaaattcttaccggacgtaaaaaccagatgcacaccatgcgccaatatggcggtttggcgggttttccgaaacgttgcgagtccgagtacgacgcgttcggcgtggggcattcctccacctccatcggcgcggcgttgggcatggcggcggcggacaaacagttgggcagcgaccgccgcagcgtcgccatcatcggcgacggcgcgatgacggcgggtcaggcgtttgaagccttgaactgcgcgggcgatatggatgtggatttgctggtcgtcctcaacgacaacgaaatgtcgatttcccccaacgtcggtgcgttgcccaaataccttgccagcaacgtcgtgcgcgatatgcacggactgttgagtaccgtcaaagcgcaaacgggcaaggtattagacaaaatacccggcgcgatggagtttgcccaaaaagtcgaacataaaatcaaaacccttgccgaagaagccgaacacgccaaacagtcactgtctttgtttgaaaacttcggcttccgctataccggccccgtggacggacacaacgtcgaaaatctggtcgatgtattggaagacctgcgcggacgcaaaggcccgcagcttctgcacgtcatcaccaaaaagggcaacggctacaaactcgccgaaaacgatcccgtcaaataccacgccgtcgccaacctgcctaaagaaagcgcggcgcaaatgccgtctgaaaaagaacccaagcccgccgccaaaccgacctatacccaagtgttcggcaaatggctgtgcgaccgggcggcggcagattcccgactggttgcgattacccccgccatgcgcgagggcagcggcttggttgagtttgaacaacgattccccgaccgctatttcgatgtcggcatcgccgagcagcacgccgttacctttgccggcggtttggcttgcgaagggatgaagcccgtcgtggcgatttattccacctttttacaacgcgcctacgaccaactggtgcacgacatcgccctgcaaaacctgcccgttttgtttgccgtcgaccgcgcgggcatcgtcggcgcggacggcccgacccatgccggtttgtacgatttaagctttttgcgctgcattccgaatatgattgtcgccgcgccgagcgatgaaaatgaatgccgcctgctgctttcgacctgctatcaggcagacgcgcccgccgccgtccgctatccgcgcggcacgggtacgggcgtgccggtttcagacggcatggaaaccgtggaaatcggcaagggcattatccgccgcgaaggtgagaaaaccgcattcattgccttcggcagtatggtcgcccctgcattggcggtcgccggaaaactgaacgccaccgtcgccgatatgcgcttcgtcaaaccgatagacgaagagttgattgtccgccttgcccgaagccacgaccgcatcgttacccttgaagaaaacgccgaacagggcggcgcaggcagcgcggtgctggaagtgttggcgaaacacggcatctgcaaacccgtcttgcttttgggcgttgccgataccgtaaccggacacggcgatccgaaaaaacttttagacgatttgggcttgagtgccgaagcggtggaacggcgtgtgcgcgcgtggctgtcggatcgggatgcggcaaattaa

SEQ ID NO: 29566 - DNA, 1362 bp, Neisseria meningitidis
atgctgaaaaaagttttaatcgccaaccgaggcgaaatcgcattacgcgtactccgtgcctgccgcgaaatgggcattgccaccgtcgccgtgcattccgaggccgacaaagacagcctgcacgtcaaactcgccgacgaatccgtgtgcatcggccctgccgcatctgcacaaagctacctcaacgtccccgccattattgccgccgccgaagtaagctgcgcggacgctgtccacccgggctacggtttccttgccgaaaacgccgatttcgccgaacaggtcgagcagtccggctttacctttatcggcccgaaacccgacaccatccgcctgatgggcgacaaagtctccgccaaacacgcgatgatagcggcaggcgtaccctgcgtccccggttctgacggcgcattgcccgacgacggcgaagaaatcctcaaaatcgccgataaaatcggttatcccgtcattatcaaagcctctggcggcggcggcggtcgcggtatgcgcgtggtcgagaaaaaagaagacctcctccaatctgtcgaaatgaccaaggcagaagcaggcgcggcattcggcaacccgatggtttacatggaacgctatctgcaacgtccgcgccacgtcgaaatccaagtgattgccgacgaacacggcaacgccgtatatcttgccgagcgcgactgttcgctgcaacgccgccaccaaaaagtcatcgaggaagcaccggctccgttcatcactgaaaaagaacgcgccaaaatcggcaaagcctgtgccgacgcttgcaaacgcatcggctatcgcggcgcaggtacgtttgaattcctgtacgaagacggcgagttcttctttatcgagatgaacacacgcgttcaggttgagcatccggttaccgagctcatcaccggcgtggacattgtgcaggagcaactccgcatcgccgccggcctgcctttgcaatacaaacaaaaggatattcaagtcgaaggccacgcgtttgagtgccgtatcaacgccgaagacccatacaacttcatccccagcccgggcccgattgaaagctgccacctgcccagcggcttcggtatccgcgtcgacagccacatttaccaaggctaccgcatccctccttactacgacagcctgatcggcaaagtctgcgtcgtcggtaaagaccgcgaccaagccatggctaaaatgcgcgtagcccttgccgaactggcgattaccggcatcaaaaccaatacgccgctgcaccgcgacttgttcaacgacccaggtttccaaaaaggcggcgtcagcatccactatttggaacactggctggaagatcgcaaagccaaacaggacaagtaa

SEQ ID NO: 29567 - DNA, 456 bp, Neisseria meningitidis
atggatttgcgcaaattaaaaaaactgattgatttggttgaagaatcgggtatcgccgaaatcgaagtaaccgaaggcgaggaaaaagtccgcatcacccgaaccatcgccgccgcacccgtttacgccgcgcccgtacctgccgccgcgccggccgtaacgcctgccgccgcacccgttgcggcatccgcgcctgccgccgcacctgccgcccgcgatttgtccgacgcgcaaaaatcacctatggtcggcacgttctaccgcgcacccggcccgaatgccgcgccttttgtcgaagtcggccaacaggttaaagccggcgacacgctgtgcatcatcgaagcgatgaagctgatgaacgaaatcgaagccgaaaaatccggcacggtcaaagaaattttggtcgaaaacggtacgcccgtcgaattcggcgaaccgctcttcattatcggataa

SEQ ID NO: 29568 - DNA, 1041 bp, Neisseria meningitidis
atggatatttcagattttgattttaccctgcccgaacacctgattgcccagcatccgcccgaagtgcgcggcagcagccaccttttggtcgcgctgcccgatatgccgctgcaagaccgggtgttcggcgatttgccggattatgtcgaggcgggcgacgttttggtgttcaacaacaccaaagtcatgaaggcgcggctgtttgggcagaaagacagcggcggcaggatcgaagccctgatcgagcgtgttttagacagtcataccgcactggcgcacatccgttcgtccaagtcccccaagcccggtatggggctggtgtttgaaggcggcatccgcgccgtgatggtcgggcgtgagggcgaactgttctgcctgcgttttgaaggcggagagaccgtttacgaacttttggaacagaacggacacctgcccctgccgccttatatcgaacgtgccgccgatgcggacgacgacagccgctaccagactgtttatgccaaatatcagggcgcggtcgccgcgccgacggcgggcctgcattttacggaagaacttttgcgccgtctgaaagacaaaggcgcggtaaccgcagaagtaaccctgcacgtcggtgcgggaacgttccaacccgtgcgcgtcgataaaatcgaagaacacaaaatgcacagcgaatggtttgaagtgccgtctgaaaccgccgccgccgttgaggcggcaaaagcccgggggaacaaagtctgggcggtcggcacgacttccatgcgcgccctcgagtctgccgcgcgtgcgacgggtcgtctgaaagcggggcagggcgacaccgatattttcatcacgccgggctaccgttttaatgttgccgacaggctggttaccaatttccatctgccgaaatcgacgctgctgatgcttgtcagcgcgttttcgggtatgggtcatatccgcgccgcgtatcgttatgcggtcgaacgcgaataccgtttcttcagctacggcgatgcgatggttttggggcggaacgaaggggtggtacgttag

SEQ ID NO: 29569 - DNA, 3216 bp, Neisseria meningitidis
atgcccaaacgtaccgacctaaaatccatccttatcatcggcgccggccctatcgttatcggtcaggcctgcgaatttgactattcgggcgcacaggcctgcaaggctttgcgtgaagaaggctataaagtcattttggtgaattccaaccccgccacgattatgaccgaccctgaaatggcggatgttacctacatcgagccgattatgtggcagacggtggagaagattatcgccaaggagcggcctgatgcgattctgcccacgatgggcggtcagaccgcgctgaactgtgcgctggatttggcacgcaacggcgtgctggcaaaatacaatgtcgagctgattggcgcgacggaagacgcgatcgacaaggcggaagaccgcggccgctttaaagaagcgatggaaaaaatcggtttgtcttgcccgaaatcttttgtctgccacacgatgaacgaagctttggcggcgcaggagcaggtcggcttcccgacgctgattcgtccttctttcacgatgggcggttcgggcggcggcattgcctacaataaagacgagtttttggcgatttgcgaacgcggtttcgatgcgtcgcccacgcacgagctgctgattgagcagtccgtcctcggctggaaagagtacgagatggaggtggtgcgcgataagaacgataactgcatcatcatttgctcgattgaaaacttcgacccgatgggcgtgcatacgggcgactcgattacggttgcgccggcgcaaacattgacagacaaagaataccaaatcatgcgtaatgcttcgttggcagtattgcgcgaaatcggcgtggacacgggtggctcaaacgtgcagtttgcggtgaaccctgaaaacggcgagatgattgtgattgagatgaacccgcgcgtgagccgttcatccgcgctggcttccaaagcgacgggcttcccgattgcgaaggtggcggcgaaactggcggtcggctttacgctggacgagttgcgcaacgacatcaccggcggtcgcacgcccgcgtcgttcgagccttcgattgattatgtggtaaccaaaatcccgcgtttcgcgtttgaaaaattccccgccgcagacgaccgcctgactacgcagatgaaatcggtgggcgaagtgatggcgatgggacgcacgattcaggaaagtttccaaaaagccctgcgcggcttggaaacaggcttgtgcggcttcaatccgagaagctccgacaaagcggaaatccgccgcgaactggccaaccccggccccgaacgtatgctgtttgtggcagacgcattccgcgcgggcttcacgctggaagaaatccacgaaatctgcgccatcgacccttggttcctggcgcaaatcgaagacttgatgaaggaagaaaaagcggtttcagacggcgttttgagtgatttggattatgccgccctacgccgtctgaaacgcaaaggcttctccgacaaacgcatcgcgcagcttttggacgtaaaagaaaaagaagtgcgcgaacaccgctacgtgctgaacctgcatccggtttacaaacgcgtcgatacctgcgccgccgagttcgccactgaaaccgcctacctctattccacttacgaagaggaatgcgaagcgcgtccttccgaccgcaaaaaagtgatgattctcggcggcggcccgaaccgcatcggtcagggcatcgagtttgactactgctgcgttcacgccgcgctcgccctgcgcgaatcgggttttgaaacgattatggtgaactgcaaccccgaaaccgtgtccaccgacttcgacaccagcgaccgcctctatttcgagccgctgacattggaagacgtgttggaaatcgtccgcaccgaaaacccgtggggcgtgattgtgcattacggcggtcaaaccccgctgaaactcgccaacgcgctggttgaaaacggcgtgaacatcatcggcacatccgccgacagcatcgatgccgccgaagaccgcgaacgcttccaaaaagtgttgaacgacttaggcctgcgccaaccgcccaaccgcatcgcacacaacgaagaagaagccctcgtcaaagccgaagaaatcggctatccgctggtcgtgcgcccgtcttatgttttgggcggccgcgccatgcagattgttcactctgccgagcagttgcaaaaatacatgcgcgaagccgtgcaggtttccgaagacagccccgtgttgctcgatttcttcctcaacaacgcgattgaagtggatgtggactgcgtttcagacggcaaagacgtggttatcggcggcattatgcagcacgtcgaacaggcaggcattcactccggcgactctggctgctcgctgccgccctactccttaagcgaagaaatccaagacgaaatccgccgccaaaccaaagcgatggcgtacgcgctgggcgtggtcggtctgatgaacgtgcagtttgccgtgcaggacggcgtggtgttcgtgttggaagtgaacccgcgcgccagccgtaccgtgcccttcgtctccaaagccaccggcgtgccgctcgccaaagtcggcgcacgctgcatggcaggtatttccctgaaagaacaaggcgtggaaaaagaagttgtccccgatttctatgccgttaaagaagccgtgttcccattcatcaaattcccgggcgtggacacgattttgggaccggaaatgcgctccaccggcgaagtcatgggcgtgggcgcaagcttcggcgaagcctactacaaagcccaactcggcgcaggcgaacgcctcaacccgaccggcaaaatcttcctctccgtgcgcgaagaagacaaagaacgcgtcatcaaaaccgccaaaaacttccaagcattaggctacggcatctgcgccacacgcggcacggcgcaatacctgaccgaacacgggctgattgtccaaaccatcaataaagtccccgaaggccgtccgcacatcggcgacgcgctgaaaaacggtgaaatcgcactggtcgtgaataccgtttccagcgatccgcaatccgtatccgacagccacatcatccgccaaagcgcattgcagcaacgcgtgccgcaatacaccaccactgccggcggcgaagcgatgagcgaaggcgcgaaaagccgcgaccacttgggcgtgtacagcgttcaagaactgcacgggcgtttgaaaaaccgcagctga

SEQ ID NO: 29570 - DNA, 1134 bp, Neisseria meningitidis
atgagcacccccgccctcctcgtcctcgctgacggcagcgtattccacggcacatcaatcggttacgaaggttcgacttccggcgaagtcgtgttcaatacttcgatgaccggctatcaggaaatcctgaccgacccgtcctactgcaaacaaatcgttaccctcacctacccacacatcggcaacaccggcaccaacgccgaagatgaagaaagccgcagcgtttatgccgccggcctgattatccgcgacctgccgctcttgcacagcaacttccgcgcctccgaaagcctgcacgactatctggtacgcaacaaaaccgtcgccatcgccgacatcgatacccgccgcctgaccacgctgttgcgcgaaaaaggcgcgcaaggcggcgcgattctgaccggtgcggatgccacaatcgaaaaagcgcaagaactcatcgccgcgttcggcagtatggtcggcaaagacttggcaaaagaagtttcctgcacggaaacttacgaatggacggaaggcgaatgggcattgggcaagggtttcgttacccctgacgaacagccttaccacgtcgtcgcctacgatttcggcgtgaaaaccaacatcctgcgtatgctcgcctcgcgcggctgccgcctgaccgtcgtccccgcccaaacgagcgcacaagacgtgttggcactcaatcccgacggcgtgttcctgtccaacggccccggcgaccccgagccttgcacctacgccatcgaagccgtgcaaaaactgatggaaagcggcaaaccgattttcggcatctgcttgggacaccagctcatcagcctcgctatcggcgcgaaaaccctgaaaatgcgcttcagccaccacggtgcgaaccaccctgtgcaagatttggacagcggcaaagtcgtcatcaccagccaaaaccacggttttgccgttgatgccgacaccctgcccgctaacgcacgcattacccacaaatccttgtttgacaacactttgcaaggcatcgagctgaccgacaaacctgtgttctgcttccaaggccaccccgaagccagccccggtccgcaagatgtcggctatttgtttgacaaattcattggcaatatgaaagcggcaaaacgggcataa

SEQ ID NO: 29571 - DNA, 1092 bp, Neisseria meningitidis
atgagtttgaaatgcggcatcgtcggtttgcccaacgtcggcaaatccaccctttttaacgcgctgacccaatcgggtatcgaagcggcaaactatcctttctgtaccatcgaacccaacgtcggcatcgtcgaagtccccgatccgcgtatggccgaattggcaaaaatcgtcaatccgcaaaaaatgcagcctgccatcgtcgaatttgtcgatattgccggtttggttgcaggcgcgagcaaaggcgagggcttgggcaaccagttccttgccaacatccgcgaaaccgatgcgattgtgaatgtcgtgcgctgctttgacgacgacaacatcgtccacgttgcaggccgcgtcgatccgattgccgacattgaaaccatcggcacagagttggcacttgccgacctggcaagtgtcgaaaaagccatcgtccgcgaagaaaaacgcgcccgctcaggcgacaaagacgcgcaaaagctggtcgatttgtgcaaaaaactgctgccgcatctggacgaaggcaaacccgtgcgttccttcggtttggacgcggaagaacgcgcgatgctcaaaccgctgttcctgctgaccgccaaaccggcgatgtatgtgggcaacgtcgccgaagacggttttgaaaacaatccgcacctcgaccgcctgaaagaattggcggcaaaagaaaacgcccccgtcgtcgccgtttgcgccgcgatggagagcgaaattgccgaattggaagacgacgaaaaagccgagttcctcgccgaaatgggcttggaagaaccgggcctgaaccgcctgattcgtgccggttacgacctcttggggctgcaaacctatttcaccgccggtgtgaaagaagtccgcgcgtggacgatacacaaaggcgataccgccccgcaagccgccggcgtgattcacaccgactttgagcgcggcttcatccgcgcccaagtcatttcttacgacgactttgtctcgctcggcggcgaagccaaagccaaagaagccggcaaaatgcgtgtggaaggtaaggaatacgtcgtgcaggacggcgatgtaatgcactttttgtttaacgtgtaa

SEQ ID NO: 29572 - DNA, 1296 bp, Neisseria meningitidis
atgagcgtcatccaagacctgcaatcgcgcggcctaatcgcgcaaacgaccgacatcgaagccttagacgctttgttgaacgaacaaaaaatcgccctttactgcggtttcgatccgaccgccgacagcctgcacatcggacacctgttgcccgtattggcattgcgccgcttccaacaggcggggcatacgccgattgctttggtgggcggcgcgaccggtatgatcggcgaccccagcttcaaagccgccgaacgcagcttgaattccgccgaaactgttgccggctgggtggaaagtatccgcaaccaattaacccctttcttgagctttgaaggcggaaatgccgccattatggcgaacaacgccgactggttcggcaaaatgaactgcctcgacttcctgcgcgacatcggcaaacatttctccgtcaacgctatgctgaacaaagaatccgtcaaacagcgcattgaccgcgacggcgcaggcatttccttcaccgagttcgcctactccctgctgcaaggctacgacttcgccgagttgaacaaacgccacggcgcggttttggaaatcggcggctccgaccaatggggcaacatcaccgccggtatcgacctgacccgccgcctgaatcaaaaacaagtgttcggcctgaccctgcctttggttaccaaatcagacggcaccaaattcggcaaaaccgaaggcggcgcagtatggctgaacgcgaaaaaaacctcgccctatcagttctaccaattctggctgaaagttgccgatgccgatgtgtataaattcctgaaatactttaccttcctgtccatcgaagaaatcgatgccatcgaagccaaagacaaggcaagcggcaccaagcccgaagcgcaacgcatcctcgccgaagaaatgacccgcctgattcacggcgaagccgccctgcaagccgcgcagcgcatttccgaaagcctgtttgccgaagaccaaagcagcctgaccgaaagcgacttcgagcagctcgccctcgacggcctgcctgcatttgaagtttcagacggcatcaatgtcgtcgaagccttggtaaaaaccggtttggcatcctccaataaagaagcgcgcggctttgtgaacagcaaagcggttttgctcaacggcaaacctgccgaagccaacaaccccaaccacgccgccgaacgccccgacgatgcctgcctgctgaccgacgaacacaaacgtttcggcaaatacaccatccttcggcgcggcaaacgcaaccacgcgcttttggtttggaaataa

SEQ ID NO: 29573 - DNA, 957 bp, Neisseria meningitidis
atgaccgcctgtttcaccacatacccgaacataacaatgagaatcaggctggggcggcacaactcgcccgactttccgcacggggccgccgtaaccataggcaattttgacggcgtacacctcggacacaaacacatcctccaaaaactccgcctcgaagccgatacgcgcggattacccgtcgtggccgtcgttttcgaaccccaacccaaagaatttttcgcactccgcaccggcaggatgccaccgtgccgcatcagtcccctgcgcaccaagctcgaattattggaaggcacaggctgcgtcgatgccgtctgggttttgtgtttcgatcggaatttttccgaaatatccgcgcaagcatttatcgaccgcctgctgcgtcaaaccttgaatacgcgttatttgctcgtcggcgacgatttccgtttcggtgcggggcgggaaggctgttttgaacttttggcacaacagcccgatatgcagaccgagcgtacgccttccgtcatcgtcgaagacatccgcaccagcagtaccgccgtgcgacaagccctttcagacggcaaccttgcctatgcgaaaaaacttttgggacacgactacgtcttgagcggcagggtggtgcacggcagaaaactcggacgcaccttaaacgccccgactgccaacatccgcctgccccgccaccgttatgcactcggcggcgtgttcgtcgtcgaagcggacggcgcattcggcacgcggcgcggcgtggcgagcttcggcttcaatcccaccgttgatagcggctgttctcaaaagcttgaagtccacctgttcgactttcaaggcgacctgtacggacaacggttgaacgtccgcttcctgcacaaactgcgcgatgaagaaaagtttgacggtatggcagaactgaaaaggcagatagcagccgatatggaagccgcaaagtgttggtag

SEQ ID NO: 29574 - DNA, 2790 bp, Neisseria meningitidis
atgaccgattacagtaaaaccgtaaacctgctcgagagcccgtttccgatgcgcggcaaccttgccaagcgcgagcctgcatggctgaaaagctggtacgagcaaaaacgctaccaaaaactgcgcgaaatcgccaaaggccgtccgaaattcatcctgcacgacggccctccgtatgccaacggcgacatccacatcggtcatgccgtcaataaaatcctcaaagacatcattatccgcagcaaaactcaagccggttttgacgcgccttatgtgccgggttgggactgtcacggtttgcctatcgaagtaatggtggaaaaactgcacggcaaagacatgcccaaagcgcgcttccgcgaattgtgccgcgaatacgccgccgaacagattgcccgtcagaaaaaagactttatccgtctgggtgtgttgggcgactgggacaatccttacctgaccatggatttcaaaaccgaagccgataccgtgcgtatgctcggcgaaatctacaaatccggctatctctaccgcggcgcgaaaccggttcaattctgcttggactgcggttcttcgctggcggaagcggaagtggaatacaaagacaaagtatcgcctgcgattgacgtgggctatccgtttaaagacaccgctgcgcttgccactgcattcggtttggcaggtatcgaaggcaaagcgtttgccgttatctggacaaccacgccttggacgctgccggcgagccaagccgtgtctgccggtgcggacgtggtgtatcaattaatcgatacgcctacaggcaaattggtgctggcgaaagatttggcagaagacgcgctcaaacgttacggtttttcagacggcattgctattcttgccgaaaccaccggcgacaagctggaaaacctgcacatgaatcatccgttcctcgagcgtgatattcccatgctcaacggcgaacacgttaccaccgacgccggtacgggtttggtacataccgcccctgcgcatggtttggaagactacgccgtctgcaacaaatacggcatcgagctttacaatcctgtcaacgccgaaggcaaatacatcggcgaaacgccgcgcgttgccggtatgcgcgtttgggaagccaattccgttatcctgcaatggctggaagaaaccggcaaccttttggcaagcagcaaaatcgaacacagctacgcccactgctggcgccacaaaacgccgctgatttaccgcgcgacaggtcaatggtttgtcggtatggacaaagccggtgccgacggtaaaaccctgcgcgacaaagccatcaaagccgtggacgacaccgaattcttcccgtcttgggggcgcgcgcgtttggaagcgatgatcgaaggccgccccgactgggtggtttcgcgccaacgctattggggcacgccgatgactttctttgttcacaaagaaacgggcgagctgcatccgaactctgccgaacttttggaaaaagtcgcgcaacgcatcgaagaaaaaggcatcgaggcttggttctccctcgataagggcgaattgttgagcgcggaagattgcgaacattacgacaaactctccgacacgatggacgtatggttcgactccggttcgacccattattccgtcttgaaacagcgcgaagaattggactggccggctgacttgtacctcgaaggcagcgatcaacaccggggctggtttcagtcgtccatgctgaccggctgcgcctcatcaatgggtcgcgcgccgtacaaacagctgctgacccatggtttcgtggtggatcaaaacgggcgcaaaatgtcgaaatccatcggcaacgtcgtcgcgccgcaagaagtgtataacgagttcggcgcggacatcctgcgcctgtgggcggcatccaccgattacagcggcgaattggcgatttccaaagaaatcctcaagcgcgtaaccgaaagctaccgccgtatccgcaataccttgagctttttgtttgccaacttgagcgacttcaatcctattgaagatgccgtgcaacaggcggatatggtggaaatcgaccgctatgccttggtgttggcaaggcggctgcaagaacgcgttgccggtgatttttatccgcgttatgccttccactttgccgtgaaagaaatggtttctttctgctcggaagacttgggcgcgttctacctcgatatcctgaaagaccgcctctataccaccaaagccgacagccgcgcccgccgcagcgcgcaaaccgccctgtaccacatcacgcgcagcctggttctcttgattgcaccgattttgtgcttcaccggcgaagaagcgtgggacatcatcggcggcggcgcagaagacagcgtgcttttccatacttggcacgagttcccgaccatcaacgaaaaagccgaagccgaactggtgaaaaaatggacggcaatccgcgaagcccgcgaagcggtaaccgccgccatcgagcctttgcgcgccgacaaaaccgtcggttcgtccttgcaagccgaagccgaaattaccgcgccggaagaaatggccggctatctgaatgctttgggcgaagaattgcgctttgctttgctggtgtctaaagcagaagtgaaagtaggcagcgaacttgccgttgccgctaaagccagtgatggtgaaaaatgcgaacgctgctggcactacacccgcgatgtgggcgcggttgcaggccatgaaaccgtctgcaaacgctgtgcagagaatgtcggcggagaaggcgaaacgcgccattacgcctga

SEQ ID NO: 29575 - DNA, 480 bp, Neisseria meningitidis
atgccgtctgaaaccgccattgccgacatcacacgcacttattccgcacattacctcaatcccaacaaccgcaatatgacgctctttcccgatgccctgccctgtctggacaagctcaaagcacaaggatactggcttgccgtcgccacgggcaaagggcgggcgggtttggacaacgccatcagtcaaaccgccaccggcggctattggctcgccaccgcctgcgcgggggaatatccctccaaaccctcgcccgaaatggtattcggaatctgcggcgaactgggactcgacccgaaagaggcattggtcgtcggcgatacggcgcacgacctgcatatggcggcaaacgcaggcgcggcggcagtcggcgtggccaccggcgcacattcgcgcgaacagctccttagcgcaccgcatctcgccgtattggacggtttgtccgaactgcccggttttcttgcacaacattacgcctga

SEQ ID NO: 29576 - DNA, 3435 bp, Neisseria meningitidis
atgaccgagccgacctacatccccctgcgcctgcataccgagttctcaattaccgacggtatggtgcggattaaaaaactgattgccaaagcgcaggaatacggtttgcctgctttgggcatcagcgatttgatgaacgaattcggcttggtgaaattttataaagcctgccgcagcgcggggattaagcctatcggcgcggcggatgtgcggataggcaatccggatgcgcccgacaagccgttccgcgctatgctgattatccgtaacgatgcgggctatctgcgcttgagcgagcttctgacggcggcttatgtcggcaaagaccgcaatgtccatcatgcggaactcaatcccgaatggctggaaaacggcgacaacagcggcttgatttgtttgagcggcgcgcattacggcgaagtgggcgtgaatctcttgaacggcaacgaagacgcggcgcgggcggcggcgttgaaatatgcggcgtggtttcccgatgcgttttatctggagttgcaacgcctgcccgagcgtcccgaatgggaggcttgcgtttcgggcagcgtgaagctggcggaggaactgggtttgccggtagtggcgacgcatccgacccagtttatgagccgcgacgatttcaacgcgcacgaggcgcgggtgtgtatcgcaggcggctgggtattgacggacaagaaacgtccgcgcgatttcacaccgagccagtttttcattccgccggaaacgatggccgaacgtttctccgatttgcccgaagccttggaaaacacggtagaaattgccaaacgctgcaacctgcacatcacattgggtaaaaacttcctgccgctcttccctactccggacggcctgtcgctggatgattatttggtgaaactgtccaacgagggcttgcaggaacgcatggttcagctttatcccgacgaagcggaacgggcagcgaaaatgccggaatatcaggaacgtttggattttgagctgaacatcatcatccagatgaaattccccggctatttccttatcgtacaagactttatcaactgggcgaaaacacacggctgtccggtagggccgggacgcggttcgggcgcgggttcgctggtggcgtattcgctgaagattaccgaccttgatccgctcaaatacgcgctgctgttcgagcgtttcctaaaccccgaacgcgtttctatgcccgacttcgacgtggacttctgtcaggcaaaccgcggccgcgtgattgagtacgtgcgcgaaaaatacggcgcggaggcggtcagccaaattgttaccttcggcacgatgtcgtccaaagcagtcatccgcgacgtggggcgcgtgttggagctgccgtttaccctgtgcgacaaactgtccaagctgattccgttggaagccaacaaacctctgggtttggacgacgcgatgaaggcggagccgcagattcaggaattaatcgaagcggaagaagcggacgaactgattacgctggcgaaaaagctggaagatttgacgcgcggtttgggtatgcacgcgggcggcgtattgattgcgccgggcaagatttccgattacagccccgtgtatcaggcagacgaatccgcctcgccagtatcgatgtacgacaaaggcgacgtggaagacgtgggcttggtgaaattcgactttttgggtctgcgaaacctgaccattatcgaaatggcgcagaacaacatcaaaaacaccaccggcgatatcgtcgatgtcggcacaatcccgctcgacgaccagaccgcctaccaaatcttccgcgatgcgaacaccaccgccgtgttccagtttgagtcgaccggcatgaaaaaaatgctgaaaacggcgcatacgaccaagtttgaagaactcatcgccttcgtatcgctctaccgccccggcccgatggacaacatccccgacttcgtcgcgcgcatgaagggacaggaattccaatacatccatccgctgctcgaaggcatcctcgcgccgacttacggcattatggtgtatcaggaacaagtgatgcaggcggctcagattatcggcggctactcgctcggcggcgcggacctgctgcgtcgcgcgatgggtaagaaaaaacccgaagaaatggtgaaacaccgcgaaatcttcgccgaaggcgcggcaaaacaaggcatttcgcgcgaaaaatccgacgaaatcttcaactacatggaaaaattcgccggctacggtttcaacaaatcccacgccgccgcctacgccctgatttcctaccaaaccgcatggctcaaagcccactaccccgccgaatttatggcggcaaccatgtcgtctgaattagacaacaccgaccagctcaagcatttctacgacgactgccgcgccaacggcatcgagtttctgccgcctgacatcaatgaatccgactaccgcttcacgccgtatccggacatgaaaatccgctacgcgctcggcgcgattaaaggtacgggcgaagccgccgtcgaatccatcacctccgcgcggcaaagcggcggcaagtttaccggcctcttggacttctgcgagcgcgtcggcaaagaacacatgaaccgccgcacccttgaagccctgatacgcggtggcgcgttcgacagcatcgaacccaaccgcgccatgctcttggcgaacatcgacctcgccatgaacaacgccgaccaaaaagccgccaacgccaatcagggcggacttttcgacatgatggaagacgccatcgaaccggtgcggctcattgacgcgccgatgtggagcgaatcggaaaaactcgccgaagaaaaaaccgtcatcggcttttacctgtccggccacccgttcggcccgtatgcccaagaagtccgccaaatcgccccgcagaaactgtcgaaactcaaaccgcaagacagcgtgcgcctcgccggattcgttaccgccgtgcgtacgatgatgggcaagcgcggcaaaatcgccttcgtcagccttgaagatttgagcggacaggttgaaatcatggtcggcggtcagacgttggaaaactgcgccgactgcctcaaagccgaccaagtgctgattatcgaatccaaagtcagccgcgacgactacggcggcggcgacgggctgcgtattctggcaaaccaagtcatgaccctgcaaacggcgcgcgaacgctacgcccgcagcctcagcctcgccctcgccccgcatcacgacatcggcgaactggtacaactgcttgccgcccaccaactgcccgacacgccgcgcatcccgctgcaactgtcgtatgccaacgaaaaagcgtcgggcaggcttcaagtgccgccgaaatggacggttacaccgagctccgcattgttcggcgaactggaaacattgctcggcagccggtcggtgcgcgtcaactggtaa

SEQ ID NO: 29577 - DNA, 837 bp, Neisseria meningitidis
atgatagacctgcactgccattccaccgtttccgacggtatgctttcccccgccgaagtcgtccgcctcgcgcatcaaaacggctgcacgctgctggcgttgaccgaccacgaccataccggcggcatcgccgaagcgcgtgccgaagccgacaggctcggtttgcgcctgattaacggtgtggaaatctccgtaacgtggcgcgggcgtaccatacacgttgtcggtttggatttcgacgaacgggacgaaaacctgcaaaacctgttggcgcaagtgcggcaaggccgtctgaaacgcctcgaagccatcgccgccaagctcgaaaagaaaggcatcggcggcgcatacgacggcgcgctggcactggcggcaaacaaagaaatggtcagccgcacccacgtcgccgagttcctcatccaagcgggacatgtcaaaaacaagcagcaggcgttcatcaaatacttgggcgacggcaaatcctgcgctgtccgccacgaatgggcgacgctggaagactgcgtctccgccgtcaacggcgcgggcggcatggcagtcatcgcccaccccatgcgctacgatttgtccgccaccgccaagcgcaatctgtttgaagaatttaaaaacctcggcggcgcaggcatcgaagtccacagcggcaactgctgcaaaaacgaccgcctcaactacgcgcttttggcagaacgtttcggtatgctcgccagcgcgggcagcgacttccaccgtttaaacgacttcagcggcggcatcctcggcgcgtgtcccgagctgccggaaaactgtaggccggtgtgggcgcatttttcccgacattga

SEQ ID NO: 29578 - DNA, 1293 bp, Neisseria meningitidis
atgcagttttcagcattcggcgaaaaattcacgcaacacagcggcatcctccaactgatggacgacctcggcgacgcgctcaaaagcgacaagcccgtcaacatgctcggcggcggcaacccggcgcgcattccggaaatcgatcgggcgtttgccggcatattctccaaactggcggcagaacacgccgtcgaaaacatcggcaactactccaatccccaaggcgatgccgtgctgattgacgcgctgaccgccttcctcaaccgcgaatacggctggaacctgaccgccgacaatatcgcgctgaccaacggttcgcaaaacgcgtttttctatttattcaacctcttcggcggcaaattcaagctttcagacggcacatccgcagaaaaagccattttgttgccgctcgcgcccgaatacatcggctatgccgacgtgcatatcgaagggcggcactttgtttccgtcaaacccaaaatcgaaaacgtcgaacacgaaggcgaagcaggcttcttcaaataccgcgtggactttgacgcgctggaaagcctgcccgggctgaaagaagaaaaaatcggcgcgatttgctgttcgcgcccgaccaacccgaccggcaatgtgttgaccgacggcgaaatggcgcgcttggatgctttggcgcgtgaacacggcattccgctgattatcgacaacgcctacggaatgccgttccccaacatcatttacagcgacgtaacgctgaattggcacgaaaacatcatcctctgcttcagcctttccaaagtcggcctgccgggcgttcgcaccggcatcattgtcgccgcgccggaagtcgtcaaagccgtcagcagcctgaacgcgattgtgaaccttgcccccacgcgcttcggcgcggccatcgccgccccgctgctggaaagcggcgagatgaaacggcttgccgaccaagtcatccggccgttttaccgcaatcaggcgcaaaccgccgtctcgctgctcaagcgggagctgggcgcgtacccgatgaaaatccacaaacccgaaggcgcgattttcctgtggctctggtttgaaaacctgcccgttccttcgcaaaccctgtacgaaatgctcaaagccgaaggcacgctgattattccgggcgagcatttcttcatcggcatcgacacgcgggattatccgcacgcgggcgagtgcattcgtatgagcatcgcgcaggatgcggaaacgctggaaaaaggcattgccgccatcggtaagaccgtccgaaaactgtacgacaacgtttaa

SEQ ID NO: 29579 - DNA, 1911 bp, Neisseria meningitidis
atgactctggaaaccctgatcgccctgccgcgcaacatcaagaaaatctgtttcctcatacacgattttctgatgattttcattgcattctggttcacccaaagcctaaaggccgactactcgaacgaatggttcgaccctgccaactggcagtctttcctattgaccgcgctgttgaccatcggtctgttcgtcagaatggggctctaccgtgccgttacacgcttcatcagcttccgcatcctctccaccgcgctggcaggcagcattgtttccgccgtcctgttcttcctcaacacattgatttttgaagaaaggctgcgcctcgccctgccgattgtctatttcttactgctgtttgtttccgtgaccggctcgcgtatggttttgcgcggactgttgtccgaacaccccaaaaaacagatgatccccgtcatcatttacggcgcgggacggtcgggcagacaactgcttgaggccgtcaaacaaatgcgcgaatattccgccgccgcctttgtggacgacgaccccaaactgtggcacaccatcatctacgaccttgccgtttaccagcccgatgccatcgccttcctcatcgaacgctacggcgtggaaaaaatcctgctcgccatccccggcgcgacccaggaacaacgccgccgaatcatcagcaaactggaagcctatccctgcgaagtgttgaccattcccggaatgaaagacctgatggacgggaaaatcagcatcggcacgctcaaaaaaatctccgtgtccgacctgctcgggcgtgattccgtcgcgcccgacaaccgcctcatgagtgccgacatcgaaggcaaaaccgtcatggtaaccggcgcgggcggctccatcggttcggaactctgccgccagattatccgtcgccgccccgaaaagctgctgctgttcgagttatccgaattcgccctgtacgccatcgaaaaagaattgcgcgaaacctgcatccaaaaacgcctcaacaccgaaatcctgccctttctcggttcggtgcaaaaccgcaccctgctcgaacacgtcatgaccgccttttccgttgcgaccgtctatcacgccgccgcctacaaacacgtccccatggtcgaattcaacaccgtcgaaggcatacgcaacaacatcttcggcacactcgagtgcgcgcttgccgccacgacatcgggcgtaagaactttcgtcctcatctccaccgacaaagccgtccgccccaccaacaccatgggtgccagcaaacgcatggcggaactctgccttcaggcactcgccgccgaacccggacagaaaacccgcttcagcatggtacgtttcggcaatgttttaggttcgtccggctccgttgtcccgctgtttgaaaaacagattgccgaaggcggcccgcttaccctgacccaccccgacatcacacgttatttcatgaccatacccgaagccgcccaactcgtcatacaggcaggcgcgatgggtacgggcggcgacgtattcgtcctcgatatgggcgaatccgtcaaaatcatcgaccttgcccgccaaatgattaccttaagcggcctcaaacccaaaacacccgaacaacccgacggcgacatcgaaatcttcattaccggactgcgtcccggcgaaaaactctacgaagagctgctcatcgacgacaacgtccgcaaaaccggccatccgcgcattatgacggctgacgaggcgatgctgccgtggcacgagctctccgccctgctcaaccgcatccgtgcggcctgcgaccgttacgaccagcaggcaatccgcaccctgctcatcaacgccccgactggctttgccccgagcgacggcatctgcgacctgctttgggtacgagaaacacacagaaaaaatgccgtctga

SEQ ID NO: 29580 - DNA, 1242 bp, Neisseria meningitidis
atgagtaaattcttcaaacgcctgtttgacattgttgcctccgcctcgggactgattttcctctcgccagtatttttgattttgatatacctcatccgcaagaatctgggttcgcccgtcttcttctttcaggaacgccccggaaaggacggaaaaccttttaaaatggtcaaattccgttccatgcacgacgcgcttgattcagacggcattctgctgcccgacggagaacgcctgacaccgttcggcaaaaaactgcgtgccgccagtttggacgaactgcccgaactgtggaacgtcctcaaaggcgacatgagcctggtcggcccccgcccgctgctgatgcaatatctgccgctgtacgacaacttccaaaaccgccgccacgaaatgaaaccgggcattaccggctgggcgcaggtcaacgggcgcaacgcgctttcgtgggacgaacgcttcgcatgcgacatctggtatatcgaccacttcagcctgtgcctcgacatcaaaatcctactgctgacggttaaaaaagtattaatcaaagaagggatttccgcacagggcgaagccaccatgccccctttcacaggaaaacgcaaacttgccgtcgtcggtgcgggcggacacggcaaagtcgttgccgagcttgccgccgcactcggcacatacggcgaaatcgtttttctggacgaccgcgtccaaggcagcgtcaacggcttccccgtcatcggcacgacgctgctgcttgaaaacagtttatcgcccgaacaattcgacatcgccgtcgccgtcggcaacaaccgcatccgccgccaaatcgccgaaaaagccgccgcgctcggcttcgccctgcccgtcctgattcatccggactcgaccgtctcgccttctgcaacagtcggacaaggcggcgtcgttatggcgaaagccgtcgtacaggctgacagcgtattgaaagacggcgtaattgtgaacactgccgccaccgtcgatcacgattgcctgcttgatgctttcgtccacatcagcccgggcgcgcacctgtcgggcaacacgcgtatcggcgaagaaagctggataggcacaggcgcgtgcagccgccagcagatccgtatcggcagccgcgcaaccattggagcgggcgcagtcgtcgtgcgcgacgtttcagacggcatgaccgtcgcgggcaacccggcaaaaccattggcaggcaaaaataccgagaccctgcggtcgtaa

SEQ ID NO: 29581 - DNA, 1110 bp, Neisseria meningitidis
atgttttcggacacagatatatccatgatggaaaacgccctccgacttgccgctttggggcgtttttccacttcgcccaatccgcgcgtcggctgcgttatcgcacacggcagccaaattgtcgggcaaggcttccacgtcaaagcgggcgaaccccatgccgaagtccacgccctgcgtcaggcgggcgaaatggcacaaggcgcgaccgcctttgttaccctcgaaccgtgcagccattacgggcgtaccccgccctgcgccgaagctctgctccgttccggcgtaacacgcgtcgttgccgccatgcgcgaccccaacccgctggttgccggcaaagggcttgccatgctcgaagcagcaggcatcaagacggaatgcggtttactcgaacatcaggcaagggaactcaaccgaggcttcctgtcgcgcatcgaacgccgccgccccttcgtccgcctcaaatgcgccgtttcgctggacggcaaaaccgccctttcagacggcagcagcttttggattaccggcgaagacgcgcgtgccgacgtacaggttttgcgtgccgaaagctgcgcggtgctgaccggcatcggcacggtgttggcggacaatccccggctcaacgtccgcgcttttccaactttgcgccaacccgcacgcatcgttttagacagccgcctgcgcctgcccttggacagccaccttctgaccgacggacaatctccaacctacatcgccaccttggaacgcgatgaagataaactccgcccttatcgggaacacgcacacatccgcatcctgatgccgtctgaaacggcagacggcaaaatcgacctgcaccacctgatgcgcctccttgccgacgaaggtttcggcgaaatcatggtcgaagcaggctccgaactcacatccgcatttttggcagaagatttggcggacgaaatcgttttataccgctcgcccaaaatcctcggcggcggcagcggtttattttgcctgcccgaaaaccgcgccgccctttccgcaccgcccttgtggacacctgtttcaagcgaaatcctcggacacgacatcaaaaccgtgttccgaaaaaacggcaacgccttttaa

SEQ ID NO: 29582 - DNA, 2397 bp, Neisseria meningitidis
atgattaaaaagattttaacgacttgttttggtttggtttttgggttttgtgtatttggagtgggtttggttgccattgctattttggtaacgtatccgaaactgccgtctttggattctttgcagcattaccagcctaaaatgccgttgactatttattcggcggatggggaagtcatcggtatgtatggggagcagcggcgcgaatttacaaaaatcggcgatttcccagaggtgttgcggaatgcggttatcgccgccgaggataaacgcttttaccggcattggggggtggatgtttggggtgttgcccgcgctgccgtcggcaatgtcgtgtccggcagcgtgcagtcgggtgcgagtacgattacgcagcaggtggcgaaaaatttttatttgagcagtgaaaaaacgttcacacgcaaattcaatgaggtgttgcttgcctataaaatcgagcagtctttaagcaaagacaaaatcctcgagttgtatttcaatcagatttacctcggtcagcgcgcctatggttttgcatctgccgcgcaaatctatttcaataagaatgtccgagatttgactttggcggaagccgccatgcttgcgggactgcccaaggctccgtctgcctataatccgattgttaatccagaacgtgccaagttgcgccagaagtatattttgaacaatatgctcgaggagaagatgattaccgtgcaacagcgcgatcaggcgttgaatgaggaactgcattacgagcggtttgttcggaaaatcgatcagagtgctttatatgtggcggaaatggtgcgtcaggaactgtatgagaaatacggtgaagatgcctatacgcagggttttaaggtttataccacggtccgcgccgatcatcagaaggtggcaaccgaggcattgcgcaaggctctacggaatttcgatcgcggcagcagctaccgcggtgcggaaaactatatcgatttgagtaagagtgaagatgtcgaggagactgtcagccagtatctgtcgggactctataccgtcgataaaatggttcccgccgttgtgttggatgtgactaaaaagaaaaatgtcgtcatacagctgcccggcggcaggcgggttacgcttgacaggcgcgccttgggttttgcggcccgcgcggtcaataatgaaaaaatgggggaggaccgtatccgcaggggcgcggtcatccgtgtcaaaaacaacggcgggcgttgggcggtggttcaagagccgttgctgcagggggctttggtttcgctggatgcaaaaaccggagctgtgcgcgcgctggtcggcggttatgattttcacagcaaaacattcaatcgtgccgttcaggcaatgcggcagccgggttcgacctttaagccgtttgtctattcggcggcattatctaaggggatgaccgcgtccacagtggttaacgatgcgccgatttccctgccggggaaagggccgaacggttcggtttggacacctaaaaattcagacggcagatattccggctacattactttgagacaggctctgacggcttccaagaatatggtttccatccgtattttgatgtctatcggtgtcggttacgcgcaacagtatatccggcgtttcggcttcaggtcgtccgagctgccggcaagcctgtctatggctttaggtacgggcgagacaacgccgttgaaagtggcggaggcatatagcgtatttgcgaacggcggatatagggtttcttcgcacgtaatcgataagatttatgacagagacggcaggttgcgcgcccaaatgcaacctttggtggccgggcaaaatgcgcctcaggcaatcgatccgcgcaatgcctatattatgtataagattatgcaggatgtggtccgtgttggtacggcaaggggggcagctgcgttgggaagaacggatattgccggtaaaacgggtacgaccaatgacaataaggatgcgtggtttgtcggttttaaccctgatgtggttactgccgtatatatcggcttcgacaaacctaagagtatggggcgtgtcggctacggcggtacgattgcggtgccggtttgggtggactatatgcgttttgcgttgaaaggaaagcagggcaaggggatgaaaatgcctgaaggtgtggtcagcagcaatggcgaatactatatgaaggaacgtatggtaaccgatccgggcttgacgctggacaacagcggtattgcgccgcaaccttcccgacgggcaaaagaagatgacgggggcgcggcagaaggcggacggcaggcggcggatgacgaagtccgccaagatatgcaggaaacgccggtgcttccgagtaatactggttccaaacagcagcagttggattctctgttttaa

SEQ ID NO: 29583 - DNA, 624 bp, Neisseria meningitidis
atgaaacgattgactttattggcctttgttttggctgccggtgcggtttccgcatctcccaaagcagacgtggaaaaaggcaaacaggttgccgcaacggtttgtgcggcttgccatgcagcagacggtaacagcggcattgcgatgtatccgcgtttggcggcacagcatactgcttacatctatcatcaaaccatcggcatccgcgacggtaaacgcacccacggttcggcagctgtgatgaaaccggtggtaatgaatttgagcgatcaggatattttgaacgtatccgcattctatgccaaacagcagcccaaatccggtgaagccaatcctaaggaaaatcccgaattgggtgcgaaaatctatcgcggcggtttgagcgataaaaaagtgccggcgtgtatgtcctgccacggtccgagcggtgcgggtatgccggggggcggaagcgaaattcaggcttatccgcgtttgggcggtcagcatcaggcatatattgttgaacagatgaatgcctacaagtccggtcagcgtaaaaataccatcatggaagatattgcaaaccgtatgtctgaagaagatttgaaagcggtcgccaactttatccaaggtttgcgttaa

SEQ ID NO: 29584 - DNA, 1065 bp, Neisseria meningitidis
atgttggtattaggaatcgagtcttcttgcgacgaaaccggtgttgcgctttacgatacggaacgtggattgcgggcgcactgcctgcacactcaaatggcaatgcacgccgaatacggcggggttgtgccggaattggcaagccgcgaccatatccgccgccttgttccgttgactgaaggctgtttggcgcaggcgggcgcatcgtatggcgacattgacgcggttgcctttacgcaggggcccggtttgggcggtgcgctgctggcgggttcgagctacgccaacgcgctggctttagcgttggacaagcctgttattcccgtccatcatttggaaggacatctgctgtcgccgctgttggcggaggaaaaacccgactttccttttgtcgcgctgctggtttcgggcgggcatacgcagattatggcggtcaggggcataggcgactacgcgcttttgggcgagagcgtcgatgatgcggcgggcgaggcattcgacaaaacggcgaaactgctgggcttgccgtatccgggcggtgcgaaactgtcggaacttgcggaatcgggcaggcccgaagcgtttgtttttccgcgcccgatgattcattccgacgatttgcagatgagtttttcaggtttgaaaaccgccgtattgaccgccgttgagaaagtgcgcgcggaaaacggggcggatgacattcctgagcagacacgcaacgacatctgccgtgcgtttcaagatgcggtggtcgatgtgttggcggcgaaagtgaaaaaagccctgttgcagacagggttcagaaccgtagtggttgccggcggggtcggtgcaaaccgcaaactccgcgaaactttcggcaacatgacggtgcaaatcccgacccccaaaggcaagccgaaacatccgtccgaaaaagtcagcgtgtttttcccgccgacggcatattgcacggacaacggtgccatgattgcctttgccggtgcgatgcacctgggcaagggcagggaggtcggtgcgttcaatgtccgtccgcgctggccgctgtcggaaatcgtcagatga

SEQ ID NO: 29585 - DNA, 1170 bp, Neisseria meningitidis
atgagcgaatatctgtttacttccgaatcggtatccgaaggccatccggataaagtggccgaccaagtgtccgatgcgattttggatgcgattctggcgcaagaccccaaagcgcgtgtcgccgcagaaactttggtcaacacaggcttgtgcgtattggcaggcgaaatcactaccaccgcccaagtggactacatcaaagtcgcacgcgaaaccatcaaacgcatcggctacaactcctccgagctgggctttgacgccaacggctgcgcagtcggcgtgtactacgaccaacaatctccggacatcgcccaaggcgtgaacgaaggcgaaggcatcgatctgaaccaaggcgcgggcgaccaaggtttgatgttcggctatgcctgtgacgaaaccccgaccctgatgccgtttgccatctattacagccaccgcctgatgcagcgtcaaagcgaattgcgcaaagacggccgcctgccgtggctgcgccctgatgctaaagcgcaactgaccgtggtttacgacagcgaaaccggcaaagtaaaacgcatcgacaccgtcgtcctgtccacccagcacgatccgtctgtcggttacgaagagctgaaaaacgccgtcatcgagcagattatcaagcccgtcctgccgtctgaactgctgactgacgaaaccaaatacctgatcaacccgaccggccgcttcgttatcggtggcccgcaaggcgactgcggtttgaccggccgtaaaatcattgttgacacctacggcggcgcggctccgcacggcggcggcgcattctccggcaaagacccgtccaaggttgaccgttccgccgcttacgcctgccgttatgtggcgaaaaacatcgtcgccgcaggcttggcaacccaatgccaaattcaagtttcctacgccatcggcgttgccgaaccgacttcgatttccatcgatactttcggcacaggcaaaatcagcgaagaaaaactgattaccttagttcgcgaacatttcgacctgcgccccaaaggcatcgtccaaatgctcgatctcttgcgcccgatttacagtaaatccgccgcttacggacatttcggccgcgaagaacctgagttcacttgggagcgcaccgacaaagctgctgcattgagggcggcagcggggctgtaa

SEQ ID NO: 29586 - DNA, 1410 bp, Neisseria meningitidis
atgaatttccccaaaacagcggcctccctgctgctgcttctcgcctccctcgccgcacacgcgctcgatacaggtcgcattccgcaaaacgaaatcgccgtatatgtccaagagcttgacagcggaaaagtcatcattgaccaccgctcggatgtccccgtcaaccccgcctccacaatgaaactcgttaccgcgtttgccgccttcaaaaccttcggcagcaattaccgctgggcgaccgagtttaaaagcaacggtacggtaaacgacggcacgcttgacggaaacctgtattgggcgggcagcggcgaccccgttttcaatcaggaaaacctgcttgccgtccaacgccagttgcgcgaacaaggcatacgcaatatcacgggacacctgatgctcgaccacagcctgtggggcgaagtcggcagccccgacgatttcgaagccgacagcggttcgccgtttatgacgccccccaatccaactatgctgtctgccggtatggttatggtgcgcgccgaacgcaatgccgccgacagtaccgacatcctcaccgatccgcctttgccgcatattttcgcccaaaacaacttgaaaattaccgcctcccaagctgcctgcccttcgatcaaaaaactgatgcgtgcatctttttcggacaatacgctgaaattgcgcggcaatattcccgagagctgtttgggcaagcctgtcggtgtccggatgttcgcgcttgacgaactgatccggcaaagttttaccaaccactggctgctcggcggcggacggatttcagacggcatcggcatatccgacacgccggaaggcgcgcagacgcttgccgttgcacactcaaagccgatgaaggaaattttgacggacatgaacaagcgttcggacaatctaattgcgcgttccgtcttcctcaaactcggcggcgacggcaaactgcccgccgtttccgaacaggcagcgtctgccgtccggcgtgaacttgccgtgtcgggcatcgatgttgcggatttggttttggaaaacggttcaggtctgtccagaaaagaaagggtaacggcgagaatgatggcgcaaatgttggaaacggcttatttcagcccgtttgcacaagatttcatcgatacgctgcccatcgccggcacagacgggactttacgcaaccgcttcaaacaaagcggcgggctgttgcgcttaaaaaccggcacgctcaacaatgtccgcgcccttgcaggttattggctgggcgacaaaccgatggcggtggtcgtcatcatcaacagcggccgcgccgtttccctgctgcccgacttggacaacttcgttgccaacaacatcatctccggcggcgatggctggctggatgcgaaactgatgtgcaaagaacgccgagcctga

SEQ ID NO: 29587 - DNA, 258 bp, Neisseria meningitidis
atgcagaccgttaccatgtacacaggtccgttttgcccctactgcacgatggcgaaaaggctgctgcacgcggcaggtgtcggacatatcgacgaaatccgtgtcgatgcaagtcccgaagcctttgccgaaatgcagcagctttccggacagcgcagcgtgccgcagattttcatcggcgaaacgcacgtcggcggatttaccgacctctaccgcctccagcaggaaggcgggctggacggactgctgaacccttaa

SEQ ID NO: 29588 - DNA, 6048 bp, Neisseria meningitidis
atgaataaaggtttacatcgcattatctttagtaaaaagcacagcaccatggttgcagtagccgaaactgccaacagccagggcaaaggtaaacaggcaggcagttcggtttctgtttcactgaaaacttcaggcgacctttgcggcaaactcaaaaccacccttaaaaccttggtctgctctttggtttccctgagtatggtattgcctgcccatgcccaaattaccaccgacaaatcagcacctaaaaaccagcaggtcgttatccttaaaaccaacactggtgcccccttggtgaatatccaaactccgaatggacgcggattgagccacaaccgctatacgcagtttgatgttgacaacaaaggggcagtgttaaacaacgaccgtaacaataatccgtttctggtcaaaggcagtgcgcaattgattttgaacgaggtacgcggtacggctagcaaactcaacggcatcgttaccgtaggcggtcaaaaggccgacgtgattattgccaaccccaacggcattaccgttaatggcggcggctttaaaaatgtcggtcggggcatcttaactatcggtgcgccccaaatcggcaaagacggtgcactgacaggatttgatgtgcgtcaaggcacattgaccgtaggagcagcaggttggaatgataaaggcggagccgactacaccggggtacttgctcgtgcagttgctttgcaggggaaattacagggtaaaaacctggcggtttctaccggtcctcagaaagtagattacgccagcggcgaaatcagtgcaggtacggcagcgggtacgaaaccgactattgcccttgatactgccgcactgggcggtatgtacgccgacagcatcacactgattgccaatgaaaaaggcgtaggcgtcaaaaatgccggcacactcgaagcggccaagcaattgattgtgacttcgtcaggccgcattgaaaacagcggccgcatcgccaccactgccgacggcaccgaagcttcaccgacttatctctccatcgaaaccaccgaaaaaggagcggcaggcacatttatctccaatggtggtcggatcgagagcaaaggcttattggttattgagacgggagaagatatcagcttgcgtaacggagccgtggtgcagaataacggcagtcgcccagctaccacggtattaaatgctggtcataatttggtgattgagagtaaaactaatgtgaacaatgccaaaggctcggctaatctgtcggccggcggtcgtactacgatcaatgatgctactattcaagcgggcagttccgtgtacagctccaccaaaggcgatactgaattgggtgaaaatacccgtattattgctgaaaacgtaaccgtattatctaacggtagtattggcagtgctgctgtaattgaggctaaagacactgcacacattgaatcgggcaaaccgctttctttagaaacctcgaccgttgcctccaacatccgtttgaacaacggtaacattaaaggcggaaagcagcttgctttactggcagacgataacattactgccaaaactaccaatctgaatactcccggcaatctgtatgttcatacaggtaaagatctgaatttgaatgttgataaagatttgtctgccgccagcatccatttgaaatcggataacgctgcccatattaccggcaccagtaaaaccctcactgcctcaaaagacatgggtgtggaggcaggcttgctgaatgttaccaataccaatctgcgtaccaactcgggtaatctgcacattcaggcagccaaaggcaatattcagcttcgcaataccaagctgaacgcagccaaggctctcgaaaccaccgcattgcagggcaatatcgtttcagacggccttcatgctgtttctgcagacggtcatgtatccttattggccaacggtaatgccgactttaccggtcacaataccctgacagccaaggccgatgtcaatgcaggatcggttggtaaaggccgtctgaaagcagacaataccaatatcacttcatcttcaggagatattacgttggttgccggcaacggtattcagcttggtgacggaaaacaacgcaattcaatcaacggaaaacacatcagcatcaaaaacaacggtggtaatgccgacttaaaaaaccttaacgtccatgccaaaagcggggcattgaacattcattccgaccgggcattgagcatagaaaataccaagctggagtctacccataatacgcatcttaatgcacaacacgagcgggtaacgctcaaccaagtagatgcctacgcacaccgtcatctaagcattaccggcagccagatttggcaaaacgacaaactgccttctgccaacaagctggtggctaacggtgtattggcactcaatgcgcgctattcccaaattgccgacaacaccacgctgagagcgggtgcaatcaaccttactgccggtaccgccctagtcaagcgcggcaacatcaattggagtaccgtttcgaccaagactttggaagataatgccgaattaaaaccattggccggacggctgaatattgaagcaggtagcggcacattaaccatcgaacctgccaaccgcatcagtgcgcataccgacctgagcatcaaaacaggcggaaaattgctgttgtctgcaaaaggaggaaatgcaggtgcgcctagtgctcaagtttcctcattggaagcaaaaggcaatatccgtctggttacaggagaaacagatttaagaggttctaaaattacagccggtaaaaacttggttgtcgccaccaccaaaggcaagttgaatatcgaagccgtaaacaactcattcagcaattattttcctacacaaaaagcggctgaactcaaccaaaaatccaaagaattggaacagcagattgcgcagttgaaaaaaagctcgcctaaaagcaagctgattccaaccctgcaagaagaacgcgaccgtctcgctttctatattcaagccatcaacaaggaagttaaaggtaaaaaacccaaaggcaaagaatacctgcaagccaagctttctgcacaaaatattgacttgatttccgcacaaggcatcgaaatcagcggttccgatattaccgcttccaaaaaactgaaccttcacgccgcaggcgtattgccaaaggcagcagattcagaggcggctgctattctgattgacggcataaccgaccaatatgaaattggcaagcccacctacaagagtcactacgacaaagctgctctgaacaagccttcacgtttgaccggacgtacgggggtaagtattcatgcagctgcggcactcgatgatgcacgtattattatcggtgcatccgaaatcaaagctccctcaggcagcatagacatcaaagcccatagtgatattgtactggaggctggacaaaacgatgcctataccttcttaaaaaccaaaggtaaaagcggcaaaatcatcagaaaaaccaagtttaccagcacccgcgaccacctgattatgccagcccccgtcgagctgaccgccaacggtatcacgcttcaggcaggcggcaacatcgaagctaataccacccgcttcaatgcccctgcaggtaaagttaccctggttgcgggtgaagagctgcaactgctggcagaagaaggcatccacaagcacgagttggatgtccaaaaaagccgccgctttatcggcatcaaggtaggtaagagcaattacagtaaaaacgaactgaacgaaaccaaattgcctgtccgcgtcgtcgcccaaactgcagccacccgttcaggctgggataccgtgctcgaaggtaccgaattcaaaaccacgctggccggtgccgacattcaggcaggtgtaggcgaaaaagcccgtgtcgatgcgaaaattatcctcaaaggcattgtgaaccgtatccagtcggaagaaaaattagaaaccaactcaaccgtatggcagaaacaggccggacgcggcagcactatcgaaacgctaaaactgcccagcttcgaaagccctactccgcccaaattgtccgcacccggcggctatatcgtcgacattccgaaaggcaatctgaaaaccgaaatcgaaaagctgtccaaacagcccgagtatgcctatctgaaacagctccaagtagcgaaaaacatcaactggaatcaggtgcagcttgcttacgacagatgggactacaaacaggagggcttaaccgaagcaggtgcggcgattatcgcactggccgttaccgtggtcacctcaggcgcaggaaccggagccgtattgggattaaacggtgcggccgccgccgcaaccgatgcagcattcgcctctttggccagccaggcttccgtatcgttcatcaacaacaaaggcgatgtcggcaaaaccctgaaagagctgggcagaagcagcacggtgaaaaatctggtggttgccgccgctaccgcaggcgtagccgacaaaatcggcgcttcggcactgaacaatgtcagcgataagcagtggatcaacaacctgaccgtcaacctagccaatgcgggcagtgccgcactgattaataccgccatcaacggcggcagcctcaaagacaacttgggcgatgccgcactgggtgcgatagtcagtaccgtacacggagaagtagcgagcaaaatcaaatttaatctcagcgaagactacattacccacaagattgcccatgccatagcgggctgtgcggcagcggcggcgaataagggtaagtgtcaggatggtgcgatcggtgcggctgtgggcgagatagtcggggaggctttgacaaacggcaaaaatcctgccactttgacagctaaagaacgcgaacagattttggcatacagcaaactggttgccggtacggtaagcggtgtggtcggcggcgatgtgaatacagcggcgaatgcggctaaagtcgcgattgaaaataacctattatctcaagaagagtatgctcttagagaaaaattgatcaaaaaagccaaagggaaaggcctattatctttagattggggcagcctgaccgaacaagaggcaaggcagtttatctatttgattgagaaagatcgatattctaatcaattgcttgaccgatatcaaaaaaatccaagtagtttaaataatcaagaaaaaaatattcttgcatattttattaaccaaacctctggaggtaacacagcttgggcagcttcgatactgaaaacgccccagtcaatgggtaatctcactattccttccaaagatattaataacaccttatcgaaagcctatcaaacattgagtcgttatgattcttttgattacaaatcagctgttgccgcacaacctgcactttacttattaaacggaccgcttggcttcagtgtcaaagcagctactgtggcagcaggaggatataacattggacagggagcgaaagcaatctctaatggagaatatctgcatggtacagttcaggttgttaatggcacattgatggttgcaggatctgtatctgcacaggctgcaatatcggccaagcctgcacctgttacccgttatctgagcaatgacagtgctcctgctttaagacaagctttaactgctgaaagccagagaatccgcatgaaactgccggaagagtatcgacaaatagggaatcttgcgatagcaaaaattgatgttaaaggattaccgcaaaggatggaagcatttagttctttccaaaaaggggaacatggatttatttcgttacctgaaacaaaaatttttaaacctatatctgttgataaatatcataatattgcctctcctcctagaggaacattaagaaatatagatggagaatataaattacttgaaactatagcacagcaactcggaaataatcgtaatgtatcaggtagaattgatctatttacagaattaaaggcctgtcaatcttgcagcaatgttattttagagtttagaaatcgctatccaaatattcaattaaatatttttacaggaaaatag

SEQ ID NO: 29589 - DNA, 2502 bp, Neisseria meningitidis
gtgctgaagacaccccctacgcttgctgcagaactttcgggtaaaaccggtgtgagcattagcgcaccgtatgccaatgagaacagtcgcatcctgctcagcaccacggatatcagttcggaaaacggcaaaatcaaaattcaatcttacggtgaccaatattactatgcgagacagagcgaactctatacctttgaacgccgcagctacaaaactggcaaatggtacaaccgcaaacacattaccgaagtcaaagaacacaaaaacgccaagcccgacgcagtaaacctcagcgcatcccaaggcatcgacatcaaatctggtggcagcatcgacgcctacgccaccgcattcgatgcccccaaaggcagcattaacatcgaagccgggcggaaattgacactctatgccgtagaagagctcaactacgacaaactagacagccaaaaaaggcgcagatttctcggcatcagctacagcaaagcacacgacaccaccacccaagtcatgaaaaccgcgctgccctcaagggtagttgcagaatcagccaacctccaatcgggctgggataccaaactgcaaggcacacagtttgaaaccacactgggtggcgcaaccatacgcgcaggcgtaggtgagcaggcacgggcagatgccaagattatcctcgaagggatcaaaagcagcatccacacagaaaccgtgagcagcagcaaatctactctatggcaaaaacaggcaggacggggcagtaacatcgaaaccttgcaattgccgagtttcaccggtcccgttgcgcccgtactgtccgcacccggcggttacattgtcgacattccgaaaggcaatctgaaaacccaaatcgaaaccctcaccaagcagcccgagtatgcttatttgaaacaacttcaagttgcgaaaaacatcaactggaatcaggtgcagcttgcttacgataaatgggactacaaacaggagggcatgacacccgcagcagcagctgtcgtcgttatcgtcgtaaccgtattgacctacggtgcactgtccgccccggcagccgccggaacggcgggcgcggcaggcgcaggagcgggaggagccgcagcaggaacggcagccggaactggagtagcagcaggaacggcagccacaaccggagtagcagcaggcacatcagctgcagctatcaccacagccgcaggcaaagccgcactggccagtctcgccagccaagccgcagtttccctcatcaacaacaaaggagacataaaccataccctgaaagaactgggcaaaagcagcaccgtcagacaggccgccaccgccgccgtaaccgcaggcgtactgcagggcataagcgggctgaacacccaagcagccgaagccgtcagcaaacattttcacagtcccgcagcaggcaaactgaccgctaacctgatcaacagcaccgctgccgcaagtgtccataccgccatcaacggcggcagcctgaaagacaacttgggcgatgccgcactgggtgcgatagtcagtaccgtacacggagaagtagcgagcaaaatcaaatttaatctcagcgaagactacattgcccacaagatagcccatgccgtagcaggctgtgcatcggcggtagcaaataaaggcaaatgtcgggacggcgcaatcggcgcggcagtcggcgagatggtgggagaaaccctgttggacggacgcgatgtaggcaaactgtcaccccaagaacgccaaaaagtcatagcctactcgcagattatcgcaggcagcgcagtggcattggttaaaggggatgtgaatacggcggtgaatgcggctactgtggcagtggagaataatagtcttttagctcgcaggagggtaaatatacgttggactccgcgacaagaattggaacatgaatatgccattcttgaaatccaggccattaccaatcaaatccgaaggctggatccgaaatttaacgggattgctattctgaggactcctggagagccgtggacaagacatgatgtacaaacatacaggcaatattataatcaattaagggaatccagaggctttgctgttgaaccaatttatagaatcaggataaacaacggcaatgaatttaaccgtatcatgtcatcaaaatacccttataatgagctttatgtagccaatcctaaatcggcgacggggtattttagggtagattcgtatgatcctgcgacaagggaaattatttcaagaaaatttacccaattttctcaaatccaagaaagtacggggattggttatatcaaggaggctgttagaaaatatagccctggtactgtcatttccaatgttccaagtacacctactacgataagaggaagaaagcttgaaggaaaacttattttagaagttcctgctcaggtcaatccaattccacaatctgtattaagggcggcacaagaagaaaatgttatcattagagatacaacaggaaggatttacaaatga

SEQ ID NO: 29590 - DNA, 423 bp, Neisseria meningitidis
atgaaaatcaccaaaatcttcaccttcgactcctcgcatatgctcgacgggcatgacggcaaatgccaaaacctgcacgggcatacctacaaactcgaaatcaccgtttcagacggcattatcaaaggcggcgcgaaagacggtatggtgatggactttaccgacttgaaagccattgtcaaacaacacattaccgaccccttcgaccacgccttcatctaccacggcggcaacagccgcgaatgccaaatcgccgcgcttttggagggctggaacatgaaaaccctgcgcctgccctgccgcaccactgccgaaaatatggcggtcgaaatgtacgaccgtctgaaaaacgcggggctgaacgtgtgccgcgtgaaattgtgggaaacgccgacatcgtgtgcggagtatgaaggggagtag

SEQ ID NO: 29591 - DNA, 1086 bp, Neisseria meningitidis
atgactgttccctgtattccgcgcggccccgtcatggccgacattgccgccttccgcctgaccgaagaggaaaagcaacgccttctcgatcccgccgtcggcggagtcatcctgttccgccgcaacttccaaaatatcgcacagctcaaagaactcaccgccgaaatcaaagccctgcgcacacccgaactcattatcgccgtcgatcacgaaggcggaagggtgcaacgtttcatcgaaggttttacccgcctgcccgcaatgaacgttttagggcaaatttgggacaaagacggcgcgtccgccgccgaaaccgcagcccggcagataggctgggttttggcaaccgaactttccgcctgcggcatcgacttgtccttcactcccgtcttggatttggactggggaaactgcgccgtcatcggcaaccgcagtttccaccgcaatcccgaagcggtcgcccgccttgccctcgcccttcaaaaaggtttggaaaaaggcggtatgaaatcctgcggtaaacattttcccggacacggatttgtcgaaggagacagccatttggtgctacccgaagacgggcgcagcctgtccgaactcgaagccgccgacctcgcccccttccgcattatgagccgcgaaggtatggcagcggttatgcccgcccacgtcgtttatccgcaagtggacacaaagcccgccgggttttccgaaatctggctcaaacaaattttgcgccgcgacatcgggttcaaaggcgtgattttctcggacgatttaactatggagggcgcgtgcggggcaggcggcatcaaagaacgcgcccgcatttcctttgaggcaggttgcgacatcgtcctcgtctgcaaccgtcccgaccttgtggacgaactgcgcgatgatttccgcattcctgacaatcccgctttggcgcaacgttggcaatatatggccaacacgctcggcagtgccgccgcgcaagccgttatacagacggcggatttccaagcggcgcaagcctttgttgccggccttgcctcgccgcaagacacggcgggcggcgtaaaagtcggcgaagccttttaa

SEQ ID NO: 29592 - DNA, 1500 bp, Neisseria meningitidis
gtgttcaaaaaataccaatacctcgctttggcagcactgtgtgccgcctcgctggcaggctgcgacaaagccggcagctttttcggtgcggacaaaaaagaagcatcctttgtagaacgcatcaaacacaccaaagacgacggcagcgtcagtatgctgctgcccgactttgtccaactggttcaaagcgaaggcccggcagtcgtcaatattcaggcagcccccgccccgcgcacccaaaacggcagcagcaatgccgaaaccgattccgacccgcttgccgacagcgacccgttctacgaatttttcaaacgcctcgtcccgaacatgcccgaaatcccccaagaagaagcagatgacggcggattgaacttcggttcgggcttcatcatcagcaaagacggctatattctgaccaatacgcacgtcgttaccggcatgggcagtatcaaagtcctgctcaacgacaagcgcgaatataccgccaaactcatcggttcggatgtccaatccgatgtcgcccttctgaaaatcgacgcaacggaagagctgcccgtcgtcaaaatcggcaatcccaaagatttgaaaccgggcgaatgggtcgccgccatcggcgcgcccttcggcttcgacaacagcgtgaccgccggcatcgtgtccgccaaaggcagaagcctgcccaacgaaagctacacacccttcatccaaaccgacgttgccatcaatccgggcaactccggcggcccgctgttcaacttaaaaggacaggtcgtcggcatcaactcgcaaatatacagccgcagcggcggattcatgggcatttccttcgccatcccgattgacgttgccatgaatgtcgccgaacagctgaaaaacaccggcaaagtccaacgcggacaactgggcgtgattattcaagaagtatcctacggtttggcacaatcgttcggtttggacaaagccggcggcgcactgattgccaaaatcctgcccggcagccccgcagaacgtgccggcctgcgggcgggcgacatcgtcctcagcctcgacggcggagaaatacgttcttccggcgaccttcccgttatggtcggcgccattacgccgggaaaagaagtcagcctcggcgtatggcgcaaaggcgaagaaatcacaatcaaagtcaagctgggcaacgccgccgagcatatcggcgcatcatccaaaacagatgaagccccctacaccgaacagcaatccggtacgttctcggtcgaatccgcaggcattacccttcagacacataccgacagcagcggcggacacctcgtcgtcgtacgggtttccgacgcggcagaacgcgcaggcttgaggcgcggcgacgaaattcttgccgtcgggcaagtccccgtcaatgacgaagccggtttccgcaaagctatggacaaggcaggcaaaaacgtccccctgctgatcatgcgccgtggcaacacgctgtttatcgcattaaacctgcaataa

SEQ ID NO: 29593 - DNA, 1224 bp, Neisseria meningitidis
atgtctgcgcaatcacaaaacaatcatacgtccccattggtcgtcttgaccacgctgttcttcatgatgggttttattacctgcatgaacgacatccttatccctcatttgaaagaaattttcgacctgtcttacgttcaggcgatgctgatccaattctgtttctttaccgcctatgcggtgatgtccatcccgatgggggcttttgtcggcaaagtcggctacaaaaacggcgttatcggcggctttctgctgacggcggtcggatgcctgctgttttatcctgctgcgggtagccattcttacgcggtatttttgggcgcgttgtttattttggcttccggcgtaacgctgcttcaggtcgccggtaatccttatgttaccctgctggcgaaacccggcaaggaatcggcaacactgacgctggttcaggcgtttaacgctttgggtacgaccattgcgccgcaaatcggcgcgttcctgattctggcggacgcaacccaaaccgtcagcaaggcggaacagatttcttccgtacagattccctatttgggactggcggggctgctgattatccttgccgttttcgtgaaaatgatccggctgcccgacgcgcgcaaaattgccgccgaggaaagcgcgcacaaccacgacggcaaaaccagcgtatggcaatacaaacatctcgtgttcggtacggcaggcattttctgctatgtcggcgcggaggtgtctatcggttcgttgatggtcaacgtattgggttatctgaaagggctggatcatgcttctgccgcgcattacctgtcgttctattggggcggcgcgatggtcggacgtttcctcggttcggcggtgatggcgaaattcgcgcccaaccgttatttggcgtttaacgcatcggctgcggtcgtactgcttgccgtcgcgatggcgacgggtagcggcaatgcggatgtggcgatgtggtcgctgcttgccatcggttttttcaactcgattatgttcccgacgattttctctttggcaaccaaaggattgggaaaatttaccaacgcggcttccggtgtactgtgtaccgcgattgtcggcggtgcggtcgttcctgtcgtgcagggctgggtggcagatacttacaccctgatgtcttcgtttgtcgtttccgtcatctgttatctgtatatcgtgttttttgcggtgtacggatatagggcggacaaataa

SEQ ID NO: 29594 - DNA, 825 bp, Neisseria meningitidis
atggacggcgcacaaccgaaaacaaatttttttgaacgcctgattgcccgactcgcccgcgaacccgattccgccgaagacgtattgaccctgttgcgccaagcgcacgaacaggaagtatttgatgcggatacgcttttaagattggaaaaagtcctcgatttttctgatttggaagtgcgcgacgcgatgattacgcgcagccgtatgaacgttttaaaagaaaacgacagcatcgaacgcatcaccgcctacgttatcgataccgcccattcgcgcttccccgtcatcggtgaagacaaagacgaagttttgggtattttgcacgccaaagacctgctcaaatatatgttcaaccccgagcagttccacctcaaatcgatattgcgccctgccgtcttcgtccccgaaggcaaatcgctgaccgcccttttaaaagagttccgcgaacagcgcaaccatatggcaatcgtcatcgacgaatacggcggcacgtcgggtttggtaacttttgaagacatcatcgagcaaatcgtcggcgacatcgaagatgagtttgacgaagacgaaagcgcggacaacatccacgccgtttccgccgaacgctggcgcatccacgcggctaccgaaatcgaagacatcaacgcctttttcggcacggaatacagcagcgaagaagccgacaccatcggcggcctggtcattcaggaattgggacacctgcccgtgcgcggcgaaaaagtccttatcggcggtttgcagttcaccgtcgcccgcgccgacaaccgccgcctgcatacgctgatggcgacccgcgtgaagtaa

SEQ ID NO: 29595 - DNA, 936 bp, Neisseria meningitidis
atgaacccgaaaaaacttgttatcgccagccgcgaaagcctgcttgctatgtggcaggcaaagcatatccaaggccgtctgaaggctctgtatcccgattgcgaagtcgagattttgggcatgaccacgcgcggcgatcagattttggacaaaactttgtcaaaagtcggcggtaaaggcttgtttgtcaaagagttggaacaggctttatatgacgggcgcgccgatttggcggtgcattcgattaaagacgtaccgatggatttgcctgaaggtttcgcgcttgcggccatcggcgaacgcgccaatccgtttgacgcatttgtgtccaaccaatacgcgcgtttggaagaaatgcccgaaggcgcggttgtcggcacatccagcctgcgccgcgaagcccagttgcgtgcgcgctatccgcatttgcttatcaaacctttgcgcggcaatgtgcaaacccgtttgtccaaactcgataacggcgaatacgacgcaattatcttggctgccgccggtttgcagcgtctgaaattggacggacgcatccgcatgattttgtcggaatccgacagcctgcctgccgccggacaaggcgcattgggtatcgaaattgccgcgcaccgcgaagatttgtatgaagttttgaaacccttgaaccacggtgttaccaatgcctgcgttaccgccgaacgcgccctcgcacgcgctttgggcggaagctgccaagtgcctttggccgcatattgcacggaagaaaacggcttgctgaccttgcgcggcttggtcggacaccccgacggttcggttgtgttgcgggcggacgcgcaagcccctgccgaatatgccgacgcgctcggacgcgctgtcgctaagaaattggcggacgacggtgcgcgggaattgattggagcagtattgaatacggaaaattga

SEQ ID NO: 29596 - DNA, 3486 bp, Neisseria meningitidis
atgcgcctgacccacatcaaactctccggcttcaaatcttttaccgacccgaccacgattcatgttccggggcagcttgtcgcggttatcgggcccaacggctgcggcaagtcgaatgtgattgacgcggtgcgctgggtattgggcgaggtttcggcgaagcagcttcgcggcgagagtatgcaggacgtgatttttaacggtgcggcaacgcgccgtcctgcgccaagagcttcggtggagctggtgtttgacaacagcgatcacagtttgcagggcgcgtgggggcagtatgccgaggtgagcatcaagcggcagctgacgcgtcagggcgaatcgacttatttcatcaacaatcagaccgtacgccgccgcgacattaccgatttgtttctgggtacgggcgtgggtgcgcgcggttatgccgttatcgagcaggggatgatttcgcgcatcatcgaagcgcggccggaggagttgcgcgcctatatcgaggaggcggcgggcgtgtccaaatataaggaacgccgcaaggagacggaaggccgtctgaaagacacgcgcgagcatttgcagcgtttgggcgatttgcagaacgagttggcgcgtcaggtggaaaagctggagaaacaggcggaaaccgccgaacgctacaaatccctgactgcgcagttgaatcgccagcaggatttgctcgattacgcccaatggcagcaatcgcttgccgccgccgacaaggcgaccgcgcagcatcaatctttgcaggcgcagcaagacgaaaccgccgcgcaggttcaggcgttaaacgacgaagtacacgccttgcagactgccgaacagtcgcagcagcaggcggtgcacgaattgggcaacaaacgcggcgtgttgcgcgaacagattgcccgtttggaagaacaaatccgccatcagcaaaacctgcaccaacgcatcgaacgcgacaagcaggcggcgcaggcgcagatgcagcgcatccatcaggagcagcagcaaatccgcgtgcagcttgaagaaaacgagttgcaggcggaagaaaagcaaaccgaattggcggaatgggcgatgcaggttgccgaacacgaagagcgtctgcccgaattggaagaaacccaagccacactcaatgccgccttccaaacccagcaggacgaggcaaaccgcatccgccgcgaactggcgttgaagcagcagcagcttgcccatgccgaacaaaccgttgccaagcacgaagagcgcaaaggtcgtctgaaacaggaaaaccaagccctgaatctgcctgacgaagccgaaaccgccgccgcgcaggaagctgccgccttgttgcaaagccagcaagagcattacgaagaacaaatcattgccgccgaagaagccttacacgccgcccgcgaagcgtttcagacgacctcgagccgcttccaaagcctgaagcagcaacacatcaccttgcaggcgcagcagcaggcgttgtcgcaaatcctgtcgcaacagcaggaagccgccgacttctggcaggcaaccgactacgccgccgcgccgcagctgtggcaacacatcaccgcgcctgccgagtggcagcacgccttgtccgtcatccttgccgaacgcctgcacgcccgcgccgtgccgcaaggtttcgtaccgcccgaacctttgccgcaggggcaggcggcgtggctttcagacggcctctccggcggcatcaaaaaatccctgcccgtacaggcattggtgaaccaaatccaagcgcagccgccgtttcagacggcattgcactactggctcgacggcgtattgtgcgcgcccgatttgagctacgccctcgcgcatcaaagcgatttgggcgcacatcaaatctggcttacgcccgaaggccatcaggtcgataaggtcagcgtcctgctctatgccaagcccgcgcaggaaagcctgattgcccaaaaagcgcacctcgacggcatcgcatccgaactggacaacctagcccccgaactctccgccgccgaagccgcgttcaaacaggcggaagccgccgtgcgctcgtccgaagtgcagcacaaaaacctgatgcagcaacaacagcagcacacgcgccaatacagtcaggcgcagcaacgcgccgccgaacttctggcgcgcaccaaccaagggcaaatccgccgcgaacacatcgagcgcgaactggcgcagttggcggaagagcagaccgtgttgcaacacacgtccgacgggctttcagacgacatcgccattttgcaggaagccgccgccgaactcgaacaccagcagcaaaccgccgcgcacagccgccaagagcagcaaggtcgtctgaaacaggcgcagcttgccctgttggaagccaaccgccaatacgggcttgccgaagtcgccgtccacaagctcaaccagcaaaaacaaaactaccaacagcaaattgcccagcttgaacaacaaaccttcgattggcaggaacgccagcaagagcttgccctcgcctatgaaaccgagttccaaaacgacgagcagcacatcaagctcgaagagttgagcgaagccgtacagagtttggacgaagaatatattgtcgtacaggagaaactcgcgcagattcaggagcagggtagggaacaatacgcccgcgtacaaaccctgcaaaccaagctgccgcagcttcaggccgccacccaaaccgccctgttgcagcagcaggaagccctgatcaacgccaaacgctaccatcaaaacctgaccgaacgcgccgccgatttggacgcgctcgaagcgttggcgaaagaatcgccgaaagtattgaacagcagcattggcagcctttcgcaacaaatcgaagcactcggcgcggtcaacctcgccgccctgcaagaactcgaagaagcgcgcgaacgcgacggctactaccgcagccaaagcgaagacgtgcagaccgccatcacccttttggaagaagccatcgcccaaatcgacgacaaaaccaaagcgcgtttcaaagaaaccttcgacgccgtcaacggcaaagtccaaaccttcttcccgaccctgttcggcggcggcgaagccaccctcaaaatgataggcgacgaccttttgaccgccggcgtgtctatcatggcgcgcccgcccggcaagaaaaacagcaccatccacctcctttccggcggcgaaaaagcccttaccgcgatgagcctcgtgttcgccctgttcagcctcaaccccgctccgttctgtcttttggacgaagtcgacgctccgctagacgatgccaacacttcgcgtttctgcaacctggtcaaagaaatgtcggcgcaaacccagtttctctacatctcccacaaccgcctgaccatggaaatggcggaacagctggtcggtgtaaccatgcaggaaaaaggcgtatcgcgcgtcgtcgccgtggacatcaaacaggcgttggaaatggcggaatccgtttga

SEQ ID NO: 29597 - DNA, 1041 bp, Neisseria meningitidis
atgcaggcagttgttgtgaataaaaatgtagcgggcgatgtggaagtcgtagaacgcgaggttcgcccgttggaatacggcgaggcattggtcgaagtcgaatattgcggcgtgtgccacaccgacctgcacgttgcggcaggcgactacggcgaaaaaccgggccgcgtgctgggacacgagggcatcggtttggttaaagaagttgccgacggtgtgaaacatctgaaagtcggcgaccgcgtcagcatcgcctggctgttccaaagctgcggctcttgcgaatactgcaataccggccgcgaaaccctgtgccgctctgtattgaacgcgggctacaccgccgacggcggtatggcgacccactgcatcgtgagtgccgattacgcggtcaaagtcccagaaggtttggatcctgcgcaagcttccagcattacttgtgccggcgtgaccacctataaagccattaaagtttccagtgttcgtccgggacagtggattgccatctacggcgcgggcggtttgggcaacttgggggtccaatacgcgaaaaaagtattcggcgcgcacgttgtcgccatcgacatcaacgacgacaaactggcgtttgccaaagaaaccggcgcggatttggttgtcaacgccgccaaagaggacgctgccaaagtgattcaggaaaaaaccggcggcgcacacgctgcggtcgtaaccgccgtatctgctgccgcattcaactctgccgtgaattgcgtccgcgcgggcggacgtgtggttgccatcggactgccgccggaatcgatggatttgtccatcccgcgtttggttttggacggcatcgaagtggtcggctctttggtcggcacgcgcaaagatttggaagaagctttccaattcggcgcggaaggtttggttgtgccgaaagtccaactgcgtgctttggatgaagcacccgccattttccaagaaatgcgcgaaggcaaaatcaccggccgtatggtgatcgatatgaaaaaagaatgcggctgcggccatcaccgctga

SEQ ID NO: 29598 - DNA, 783 bp, Neisseria meningitidis
atgaaaaccaagttaatcaaaatcttgaccccctttaccgtcctcccgctgctggcttgcgggcaaacgcccgtttccaatgccaacgccgaacccgccgtcaaagccgagtccgccggcaaatccgttgccgcctctttgaaagcgcgtttggaaaaaacctattccgcccaagatttgaaagtgttgagcgtcagcgaaacaccggtcaaaggcatttacgaagtcgtcgtcagcggcaggcagattatctacaccgatgccgaaggcggctatatgttcgtcggcgaactcatcaacatcgacacgcgcaaaaacctgaccgaagaacgcgccgccgatttgaacaaaatcgacttcgcctccctgcctttggacaaagccatcaaagaagtgcgcggcaacggcaagctgaaagtcgccgtcttctccgaccccgattgtccgttctgcaaacgcttggaacacgagtttgaaaaaatgaccgacgtgacggtttacagctttatgatgcccattgccggcctgcaccccgatgccgcgcgcaaggcgcaaatcttatggtgtcagcccgaccgcgccaaagcgtggacggattggatgcgtaaaggcaaattcccggtcggcggcagcatctgcgacaatcccgtcgcggaaaccacttccttgggcgaacaattcggcttcaacggcacgccgaccctcgtcttccccaacgggcgcagccaaagcggctacagcccgatgccccaactggaggaaatcatccgcaaaaatcaataa

SEQ ID NO: 29599 - DNA, 951 bp, Neisseria meningitidis
atgagcaccttcttccggcaaaccgcacaagccatgattgccaaacacatcgaccgtttcccgctattgaagttggaccaggtgattgattggcagccgatcgaacaatacctgaaccgtcaaaaaaaccgttaccttagagaccaccgcggccgtcccgcctaccctctgctgtccatgttcaaagccgtcctgctcggacaatggcacagcctctccgatcccgaactcgaacacagcctcatcacccgcatcgatttcaacctgttttgccgtttcgacgaactgatcatccccgattacagtaccttatgccgctaccgcaactggctggcgcaagacgacaccctgtccgaattactcaaactgattaactgccaactgaccgaaaaaggcctaaaaatagagaaagcatccgccgccgtcgttgatgccaccattatccagaccgccggcagcaaacagcgtcaggccatagaagttgacgaagaaggacaaatcagcggtcaaaccacaccgagtaaggacagcgatgcccgttggatcaagaaaaacggcctctacaaactcggttacaaacaacatacccgtaccgatgtggaaggctatatcgagaaactgtacatcactcccaccaatgcccatgagtgcacacacctgtcgccgttgttggaaggactgcccaaaggtacgaccgtctatgccgacaaaggctatgacagtgcggaaaaccggcaacatctggaagaacatcagttgcaggacggcattatgcgcaaagcctgccgcaaccgtccgctgtcggaaacgcaaaccaaacgcgaccggtatttgtcgaagacccgtggcgatgtgtttgaacctgttgaaagccgccaacaggctaagtgcgcccgctgccgcccaaaaggcgaccggatgcctgattatcgggtatctagggaggattaa

SEQ ID NO: 29600 - DNA, 1929 bp, Neisseria meningitidis
atggcaaaagtaatcggtatcgacttaggtacaaccaactcttgtttggccatttccgaaaacggtcaaaccaaagtgatcgaaaacgcagaaggcgcacgcaccacgccgtccgttatcgcttatttggacggcggcgaaatcctcgtcggcgcgcctgccaaacgccaagcggtaaccaacgccaaaaacactatttacgccgccaaacgtttgatcggccacaaatttgaagacaaagaagtccaacgcgacatcgaatccatgccttttgaaatcatcaaagccaacaacggcgacgcgtgggtgaaagcgcaaggcaaagagctgtctcctcctcaaatttccgcagaagtcctgcgtaaaatgaaagaagccgccgaagcttacttgggcgaaaaagtaaccgaagccgtgattaccgttccggcctacttcaacgacagccaacgtcaagccaccaaagacgcaggccgtatcgccggtttggacgtaaaacgcatcatcaacgagccgaccgcagccgctttggcattcggtatggacaaaggcgacaacaaagaccgcaaagtagccgtatatgacttgggcggcggtactttcgatatttccatcatcgaaatcgccaacctcgacggcgacaaacaatttgaagtattggctaccaacggcgatactttcttgggcggtgaagacttcgaccaacgtctgatcgactacatcattgacgagttcaaaaaagaacaaggcattgatttgaaacaagacgtcatggctctgcaacgtctgaaagaagctgccgaaaaagccaaaatcgaattgtccagcggccagcaaaccgaaatcaacctgccgtacatcaccatggacgcaaccggcccgaaacacttggcaatgaaaattacccgcgccaaattcgaaagcctggttgaagacctgattgcccgctctatcgagccttgccgcaccgcattgaaagatgccggcttgagcaccggcgacatcgacgacgtaattttagtcggcgggcagtcccgtatgccgaaagtacaagaagccgtgagagacttcttcggcaaagaaccgcgcaaagacgtgaaccctgatgaagccgttgccgtaggcgcagcgatccaaggcgaagtattgagcggcggccgcagcgacgtattgctgctggacgtaacccctctgtccttgggtatcgaaaccatgggcggcgtgatgaccaagctgattcaaaagaacactactattccgactaaagcgtctcaagtgttctctactgccgaagacaaccaaagcgcagtaaccatccatgtactgcaaggcgaacgcgaacgcgcttctgccaacaaatctttgggtcagttcaacttgggcgacatcgcacccgcaccgcgcggtatgccgcaaatcgaagtcaccttcgatattgacgccaacggtatcctgcacgtttccgccaaagacaaaggcaccggtaaagcggccaacatcaccatccaaggttcttcaggtttgagcgaagaagaaatcgaacgcatggtgaaagatgccgaagccaatgccgaggaagataaaaaactgactgaattggtcgcttcccgtaaccaagccgaagccctgattcactccgtgaaaaaatctttggcggactacggcgacaaactcgatgcagccgagaaagaaaaaatcgaagccgcgttgaaagaagctgaagaagcagttaaaggcgacgacaaaaccgccatcgatgccaaagccgaagcactgggcacagccagccaaaaactgggcgaaatggtttacgcgcaggcgcaagccgaagcacaagcaggcgagggcgcacaagccgagtcttccgctaagaaagacgacgacatcgtagatgccgactttgaagaagtaaaagacgacaaaaaataa

SEQ ID NO: 29601 - DNA, 819 bp, Neisseria meningitidis
atgaaaaaagaccatttaaacacaaccggtttcgacctctggcacaccatccgcgaagaaaccgcggccgcggtctccgccgaaccgatgctggcaagttttttgcaccaaaccgtgttgcgccacgagtccctcggctccgtccttgcctaccacctttccagcaaactcggcagcccgattatggacgtgcgcgcgctgtttgaaatctaccagcaggcgttgggcagcgacacccaaatcggcaaatgcgtcgaagcagacttaaaagccatctacgaacgcgatcccgcctgcgacgaatattcgctgccgcttttatatttcaaaggcttccacgcgattcaggcacaccgcatcaaccatcggctgtatctcgacgggcgcaaaacgctggcgtatttcctgcaaaaccgtatgtccgaagtattcggcgtggacatccatcccgccgcccgtttcggatacgggctgatgctcgaccacgccaccggctttgttgccggcgaaaccgccgtgttgggcaacaatatttcgattttgcacggcgtaacgctcggcggttcgggcaaagaaggcggcgaccgccaccctaaaatcggcgacggcgtgatgatcggcgcaaacgcctcgatattgggcaatatccgcatcggcagcaatgccaaaatcggggcgggcagcgtcgtggtttcagacgtgccgccgtccatcacggttgtcggcgtacccgccaaacccgtggcgcgatcgctcaaaacaccgtcggcggatatggatcaaaatatccagtttaccgaaatcgactttatgatttga

SEQ ID NO: 29602 - DNA, 1107 bp, Neisseria meningitidis
ttgagaatgattactctgaaaaccaccccatttcatcaagcccatcaagatgcaggcgcgaagctggtagattttgccggctgggagctgcccatccattatggttcgcaaatcgccgaacacgaagccgtgcgcaccgacgcaggtatgtttgacgtatcccatatgcttgttaccgacgtagcaggcgcaaatgccaaagcctttttccgcaaattgattgccaacgatgtcgccaagctcgcttttgtcggcaaagccctttattccgctttgctcaacgacaacggcggcgtgattgacgacttgatcgtttaccgcaccaatgaagccgaaacccaataccgcatcgtgtccaacggcgcgactcgcgaaaaagatacggcacaattccacaaagtcggacaagagttcggtgtttccttcaatccgcgctacgacctcggcatgctcgccgtacaaggccctaaagccattgaaaaactcctgaccgtcaaacccgaatgggcagatgtcgtccataacctcaaaccgttccaaggcgcggatttgggcaacgactggtttgtcgcccgcaccggctacaccggcgaagacggcgtcgaagtcatcctgcccggcaccgaagccgtcgcattcttcaaagccctgcaagcagcaggcgtacaaccttgcggtctcggcgcgcgcgacaccctgcgcatggaagccggcatgaacctctacggcaacgatatggacgacgataccagcccgctcgaagcaggcatgggttggaccgttgatttgaaagacgaaagccgcgattttgtcggcaaagctgccttgttggcattgaaagaaaaaggcgttgccgtcaaacaggtcggtttgctgctcggcaaaggcggcatcctgcgcgcgcatatggaagtgttgaccgacaaaggcaaaggcgaaaccaccagcggcgtattctctccaagtctgaaacaatccatcgccatcgcccgcgtaccgaaagattttgacggcgataccgccaaagtgctgattcgcggcaaggaagcggacgtgcgcgtactgaagctgccgttcgtccgcaacggtcaaaaacagtttgattaa

SEQ ID NO: 29603 - DNA, 1248 bp, Neisseria meningitidis
atgcaacttaccgctgtcggactcaatcatcaaaccgcacctttaagcatacgggaaaagctggcgtttgccgcggcctgcctgcccgaagccgtccgcaatcttgcccgaagcaatgcggcaacggaggcggtaatcctttctacctgcaaccgtaccgagctttactgtgtaggtgattcggaagaaatcatccgttggctcgcagactatcacagccttcccatagaagaaatcagcccctacctttatactttggggatgcaggagactgtgcgccatgctttccgcgtcgcctgcggcttggattcgatggtgttgggcgagccgcagattttaggacagattaaggatgcggtcagggttgctcaagagcaggaaagtatgggtaagaaactcaatgccctgttccaaaaaaccttttctgttgctaaagaggtccgtaccgatactgccgtcggcgaaaactcggtttccatggcttccgcttccgtcaagttggcagagcagattttccccgacatcggcgatttgaatgtcttgtttatcggtgcgggtgagatgattgagctggttgccacttattttgccgccaaaagtccccggctgatgacggttgccaaccggacgctggcgcgtgcacaggagttgtgcgacaagctcggtgtcaacgccgaaccgtgcctgctgtccgatctgcctgccattttgcatgagtacgacgtggtggtttcttcaacggcaagccagttgcccattgtcggcaaaggtatggtggagcgcgcattgaaacaaaggcagagtatgccgttgtttatgcttgacttggccgtgccgcgagacattgaggcggaagtcggagatttgaacgatgcctatctttatacggtggacgatatggtcaatatcgtccaaagcggcaaggaggcaaggcagaaggccgccgccgccgccgaaacgctggtgtccgagaaggttgccgaatttgtcaggcagcagcagggcaggcagagtgtcccgttaatcagggcattgagggatgagggagagaaagcgcgcaaacaggtcttggaaaatgcgatgaaacagcttgccaaaggcgcaacggcagaagaggttttggaaaggctgtcgatccaactgaccaacaagctgctgcattcgccgacccaaaccttgaataaggcgggggaagaagataaagatttggttcacgccgtcgcgcagatttatcatttggacaaataa

SEQ ID NO: 29604 - DNA, 1035 bp, Neisseria meningitidis
atgagcctgcccgcaatggatgccggtatttatctcgaagaaactgccccgcgcgccctgattgaacacaataatattttggataattcggtcggcgtctatctgcatggttctgccgatgcgatggtgcgggagaataaaatcgtcggcgacgcgactttgcgcgtgaacgagcgcggcaatggcgttaccgtttggaacgcgcccggcgcgcaggtcgtcggcaacgatatttccaaagggcgggacggcattttttccaataccagcacgcacaacacctataaaaacaaccgcttcagcgatttgcgtttcgccgtccactatatgtacaccaacgacagcgaaatcagcggcaatatttccgtgggcaacaatatgggctatgtgctgatgttttccgagcggctcaaagtgtttgacaatatcgccgtcggcagccgcgaccaaggcatcatgctcaactatgtcaactattccgatattcacgacaacattatcaacaaagcgggcaagtgcgtttttgcctacaatgccaactacgataaactgtccgccaatcattttgaaaactgccaaatcggcatacactttaccgccgccatcgaaggcacgtccctgcacgacaattcctttatcaacaacgaaagccaggtcaaatacgtcagcacgcgctttctcgactggagcgagggcggacacggcaactattggagcgacaacagcgcgttcgatttgaacggcgacggcttcggagacagcgcgtaccgtcccaacggcatcatcgaccaaatcatctggcgcgcacccgtatcgcgcctcttgatgaacagtcccgcaatcagcatcgtcaaatgggcgcaggcgcaatttcccgccgttttgcctggcggcgtggtggacagcaaaccgctgatgaagccttatgcccccaaaattcaaacccgttatcaggcgatgaaggacgggctgctcaaaaaagtcgaaacgcggcagttggaatggggcagggcggaaaacggttctttgaactag

SEQ ID NO: 29605 - DNA, 651 bp, Neisseria meningitidis
atgccgtctgaaaacacaaaaggaacaaccatgaccacacatcatgtcgaattgaggaaggtaaccaaacgcttcggcgcgcaaaaagccgtcaaccaagtcgatttggttttgaaggccggagaaagcgtcggacttgccggacacaacggtgcgggcaagtccaccattatgaagctgatactcggtctgattaccccgaccgaaggcgaagtgatgcttttgggcgaacgtaccggcagcaaagcgggggcgcggcttcgcagccaaatcggctacctgcccgaaaccgttgcgttgcacccttcgctgaccggcatcgaaacgctggacttttacgccaaacttaaaaaacagccgctcacccagaacagggggctgctcgagcgcgtcggcatttcacaggcggcacaccgccgcgtcggcacctactcgaaagggatgcgccaacgccttgccttggcacaagccctgctgggcgagcccaaagtcctgctgtttgacgaaccgacaaccggcctcgaccctgcatcaaggcaaatgttttacgaagtcgtgcgcgaactcaacgggcgcggcgcgaccgtattgctcagcacccacgcccttgccgagttggacggacacgccgaccgcattatcgtggattaa

SEQ ID NO: 29606 - DNA, 1758 bp, Neisseria meningitidis
atggttttcagacgacctttgttgtatttggtaactatatgttcccgttgtataattacggatttgcaattcaataataaatacacaggaaccgccatgacagaatccatcacccgcgacagtatgcaatacgatgtcgtgattgtcggcgcaggcccgtcgggtttgtccgccgccatcaaactcaagcagcttgccgaaaaaaacgggcgcgaaatcagcgtttgcgtggtggagaaaggttcggaggcgggcgcgcattcgctggcgggcgcggtcattgacccgattgcgctgaatgagttgattcccgactggaaagaaaaaggcgcgccgctgacgcgcacggtaacgcaggacaaggtgttgttcctgacggagaaaaaagcgttcaatctgcccattacccccaatttcgacaatcacggcaactacatcgtcagcttgggcgaagtcgtgcgctggttggcggagcaggcggaaaatatgggcgtggaaatctatcctggctttgccgctgccgaagtgctgtatcacgaagacggttcggtcaaaggcattgcgaccggcaatatgggcgtgggcaaaaacggcgagccgaccgattcattccagcccggcatggagctttgggcacagcaaaccctgtttgccgaaggttgccgaggttcgctttccaagcaaatcatcgaacgcttcaaactcgaccaaaacagccagccgcaaacttacggcttgggcattaaagaagtttgggaagtgccgtccgaacagcatcagcccggtttggtgatgcacagcgcaggctggccgctggacagcaaaacctacggcggcgcgtttgtttaccatttcgacgacaacaaagtcgccgtcggcttcgtggtcggtttggactatcaaaatccttatctgtcgccgtttgaagagttccaacgtttcaaaacccatcccgaaatccgcaaaacctttgaaggcggccgccgcatcgcttacggcgcgcgttcgctgattgaaggcggtttgcaaagtttgccgaagctctcgttcaaaggcggcgttttggtcggcgatgcggcgggtttcctcaatatgccgcgcatcaaaggcattcataccgcgatgaaatccgccatgctcgccgccgaagccgtgttccccttgttggaaaaccttgaagaagtggaaaacttcgacagcggcaaagaggcggcggattatcagcaacgttttgaacaaagctggctgtatcaagagctttacgccgcgcgcaatgtccgtccgtcattcaaatggggcgtttacctcggctcgctttataccggtatcgaccagatgattttcagaggcaaagccccgtggaccttgaaacatcacggtaaagacaacgagcagctcaaaaaagctgccgcgtgcacaccgattgattatccgaaacccgacggcgtgttgaccttcgaccgcttgagcagcgtcttccttgccaatcttgcgcacgaagaaaaccagcccgaccatttggtgctgaacaatccgcaaacgatgatagacgtgaactacaaagaatacgcctcgcccgaaacgcgctattgtccggcgggtgtgtatgaaatcgtcgaagaaaacggcagcccgcgcctgcaaatcaacgcggcaaactgcgtgcactgcaaaacctgcgacatcaaagacccgacgcaaaacatcacttggatttgtcccgaaggcgcgagcgggccgaattacggcgggatgtga

SEQ ID NO: 29607 - DNA, 1515 bp, Neisseria meningitidis
gtggaattgaaattaaaacgtttgattttaatattaatgctggggatgttttcggttaattcttatgccgaacgttttaaatatcccattggaaattcagatgttagattggatattgatcatacaaaatctgtagtaacagattttcgtgttgatggtcagcgtttttcaggtcgaattatcgaaccttcaataatagaacacgtgccaacaggtgcacgctctcttgaaaaaattcctgtcaaagtaactgcatcagtatcccgcgccggagtcttggcaggcgttggcgcattagtccgtcaaggcgcaaaactgggtaaaagggcggttccatatgtcggaaccgcgctcttggcctatgacatctacgaaacatttaaagacgaaattaaagaacaaggctatcaatacgatcccgaaaccgataaatttgtaaaaggctacgaatacagtaattgcatttgggaacacgccgaaaacggtattaaaacctatggctgttacggcgttgatagttcaattatgcgtcttatgtcagattacagcagatttccggaagtaaaagaactgatggagcatcaaatggaaattgtcgggcgcaattattgggaaatggtacgcaagaataggaatgattcttttaggaactacaattttagtcgttgttatttcaactggaacggcggtaattgcaatatcggtgaagatataaatgacgcaagatctttcatcaatttttcccttatacgcaatccgaaatacaaagaagaaatggatgccaaaaagctggaagagattttagccttaaaagtcgatgccaatcccgacaaatacatacaggcaaccggttatcccggttattccgaaaaagtagaagtcgcacccggaacaaaagtgaatatggggcccgtcacggacaggaacgggaatcccgttcaggttgtcgcaacattcggcagggattcgcaaggcaacaccacagtggatgttcaagtaatcccgcgtcccgacctcacacccggaagcgcagaagcacctgaaaccaagccaaagccagcgcctacgcccgaaaccaatccaaaggaaaaagaaaacccgcgcgaagaagatcaagacaatcccaaacccacgcccacaccgggcgaaacaccaagcccgaacgaaagcccaaaagatcggcgagaagaaaagaaaccagacggaaacggcggattgctctgtgatctctttcctaaaatcctagcctgtgccgaaatgggcgaaccttcagaaaacgattttgaaggcatagccatacccaaagccgtaaatgaagaaacgtggtcgcccgataacatgtttccgtcaagcggagtttgtccgaaagacaaaacattccacgttttcggaaaagcatttagcgtaagttatcagccattatgcacattaatggaaaacgtaagattcgccgtaattatcggctttatcatcatgtccgcatttatcacattcggatcattgagaaaggaataa

SEQ ID NO: 29608 - DNA, 366 bp, Neisseria meningitidis
atgaacctgattcaacagctcgagcaagaagaaattgcccgtctgaacaaagacatccccgaattcgcaccgggcgacaccgtagtcgtatccgtacgcgtcgtagagggtacccgtagccgtctgcaagcctacgaaggcgttgtcattgcacgccgcaaccgtggtctgaacagcaacttcatcgtccgtaaaatttccagcggcgaaggtgtggaacgtactttccaactgtactcccctaccgttgagaaaatcgaagtcaaacgccgtggcgatgtccgccgtgccaaactttactatctgcgcggtctgaccggcaaagctgcacgcattaaagaaaaattgcctgcacgcaaaggttaa

SEQ ID NO: 29609 - DNA, 750 bp, Neisseria meningitidis
atgcttatccaggcagttaccattttccccgaaatgttcgacagcattacccgctacggcgtaacgggacgcgcgaacagacagggaatctggcagtttgaagcagtcaatccccgaaagtttgccgacaacagattgggctacatcgacgaccgcccgttcggcggcggcccgggaatgattatgatggctccgccgcttcatgcagcaatagaacacgccaaagcacaatcttcccaagctgcaaaagtcatttacctcagcccccaaggaaaaccgctgacacacccaaaagcggcagaactggcagaacttccgcatctgattctgctgtgcggacgctatgagggaatagacgaaagactgctgcaaaccagcgtcgatgaagaaatcagcatcggagacttcgttgtttccggcggagagcttcccgccatgatgctgatggatgcggtattgaggctcgtacccggcgtattgggcgatatgcagtctgccgaacaagattcgttctcaagcggcattttggactgcccccactacaccaaacccttagaatttcaaggcatggctgttccggaagtattacgttccggcaatcatggcttgatagcggaatggcggttggaacaatcgctgcgccgcaccttggagcgcagacccgatcttttggaaaagcgcgttttaatcccaaaggaatcccgcctcttagaaaccatccggcaagagcaacgggaaatccaatcataa

SEQ ID NO: 29610 - DNA, 510 bp, Neisseria meningitidis
atgacagacactcaaaaccgggtagccatgggctacatcaaaggcgtattcggcataaaaggctggttgaaaattgccgccaacaccgaatattccgacagccttttggactaccccgagtggcatttggtcaaggacggcaaaaccatcagcgttacccttgaagccggaaaagtcgtcaacagcgaactccaagtcaaattcgaaggcataaacgaccgcgacttggcattctcattgcacggttacaccatcgaaataccccgtgaagcattcgccccgacagaagaagacgaatactactggacagacttggtcggcatgaccgtcgtcaacaaagaccataccgttttaggcaaggtaagcaacctgatggaaaccggcgcaaacgacgtattgatgattgacggagaacacgggcagattctgattccgttcgtttcccaatatatcgaaaccgtcgataccggcagcaagattattactgccgactggggtttggactactga

SEQ ID NO: 29611 - DNA, 246 bp, Neisseria meningitidis
atggtagttatccgtttggcacgcggcggctcgaaacaccgccctttctacaacgtcatcgttactgactcacgcagccgccgcgacggccgcttcatcgaacgcgtaggcttctacaaccccgtagccaacgaaaaacaagagcgcgtccgcctcaacgcagaccgcctgaaccactggattgcacaaggcgcgcaagtcagcgactccgttgcaaaactgattaaagaacaaaaagccgcctaa

SEQ ID NO: 29612 - DNA, 1065 bp, Neisseria meningitidis
atgaaagcagcacgtttttacgataaaggcgacatccgcatcgaagacatccccgaaccgaccgtcgcccccggcactgtcggcatcaatgtcgcctggtgcggcatctgcggtactgacctgcacgaattcatggaaggcccgattttcattccgccttgcggtcatccgcacccgatttccggcgagtccgcacccgtaacgatgggacacgagttctccggcgtggtctatgccgtcggcgaaggcgtggacgacatcaaagtcggccaacacgtcgtggtcgaaccctacatcatccacgatgacgtaccgaccggagaaggcagcaactaccacctctccaaagatatgaactttatcggcttgggcggctgcggcggcggtctgtccgaaaaaatcgccgtcaaacgtcgttgggtgcatccgatttccgacaaaatcccgttggatcaagccgctttgatcgaaccgctgtctgtcggacaccacgcctatgtacgcagcggcgcgaaagcaggcgacgtcgcattggtcggcggcgcaggtccgatcggtttgctgttggctgccgtgttgaaagccaaaggcatcaaagtcatcatcaccgagttgagtaaagcacgcaaagacaaagcgcgcgaatccggcgttgccgactacatcctcgacccgtccgaagtcgatgttgtcgaagaggtgaaaaaactgaccaacggcgaaggcgtggacgtggcattcgaatgtaccagcgtgaacaaagtgttggatactttggtcgaagcctgcaaacctgccgccaatttggttatcgtatccatctggagccaccctgcaaccgtcaacgtccacagcgtcgtgatgaaagagctggatgtgcgcggcacgattgcctactgtaacgaccacgccgaaaccatcaaactggtcgaagaaggcaaaatcaacctcgaacccttcatcacccagcgcatcaagctggacgaactggtttccgaaggcttcgagcgtctgatccacaacaacgaatccgccgttaaaattattgtgagtccaaacctgtaa

SEQ ID NO: 29613 - DNA, 270 bp, Neisseria meningitidis
atggcactgaccgtagaacaaaaagcacaaatcgttaaagatttccaacgcaaagaaggcgacaccggctcttccgaagtacaagtcgctctgttgactttccgcatcaacgacctgaccccccacttcaaagccaaccccaaagaccaccacagccgtcgcggcctgttgaaaatggtcagccaacgccgccgcctgctggcctacttgcgccgtacccagcccgatacgtatcgcgcgttgattacccgcttgggtctgcgtaaataa

SEQ ID NO: 29614 - DNA, 888 bp, Neisseria meningitidis
atgcagaaatccaaattgtcttggttcttgaaactgatgttggcattgtcgctggcgtttctgtatatcccactggtcgttttggttgtctattcgtttaacgaatccaagctcgttaccgtttggggcggcttttcgaccaggtggtacggcgcattgttggaaaacgacaccatcttggaagctgcttggctgtcgctgcgtattgccgtcgtgtcttcgcttgccgctgtcgttttgggcacgctggcgggctatgcgatggcgcgtatcaaacgttttcgcggcagcacgctgtttgccggtatgatttccgcgcctatggtgatgcccgacgtgattaccggcctgtctatgctgctgctgattattcaggtgcagatatttttgcagggcagcgaatggttacaacatctctacttcgatcgtggctttttcactattttcttaggacatacgacgctgtgcatggcatacattaccgttgttatccgttcgcgtctggttgagcttgaccaatcgctcgaagaagccgcaatggatttgggcgcgcgtccgctgaaaatcttttttgtcatcactttgcctttgattgcccctgccatcgcttcaggctttctgctcggcattaccctgtctttggatgatttggtgattacctcattcctctccggccccggttcatccacattgccgcaggtgattttctccaaaatcaagttgggtctcgatccgcagatgaacgttttggcaaccatcctaatcggcatcatcggaacattggtcatcatcgtcaattattggatgatgaggcaggcaaccaagcgtgaccgagaagcggcagaagcctaccgccaagaaaaattggctgccgagaaagcaaattaa

SEQ ID NO: 29615 - DNA, 1260 bp, Neisseria meningitidis
atgcacgtctccgaattacaaaccctgcacatttccaaactcttagaattggcggaagaacacggcatcgaaaacgccaaccgattccgcaaacaagatctcgtatttgccatcgtccgccagatgatgaaaaaaggcgagggtttcacctgctccggcacgcttgaaatcctgcccgacggcttcggcttcctccgcagcgcggacacgtcctatcttgccggccccgacgacatctatgtctcgcccacccaaatccgccgcttcaacctgcatacgggcgacaccatcgaaggaagcgtgcgcgtcccaaaagacaacgaacgctattttgccctggtcaggcttgataccatcaacggcgaccacccggaagtatgccgccataaaatcctgtttgaaaacctgaccccgctgtttccgaccgaacagttgaagctggaacgcgacttaaagtccgaagaaaacctgaccggacgtgccatcgacctgatttcccctatcggcaaaggtcagcgcgccctcttggttgccccgcccaaaagcggtaaaaccgtgatgctgcaaaacattgcccacgccgttacctcaaactatcccgaagtcgaactcatcgtcctcttgattgacgagcgtcccgaagaagtaaccgaaatgagccgttccgtccgcggcgaagtggtttcctccacctttgacgaaccggcgcaacgccacgtccaagttgccgaaatggtgcttgaaaaagccaagcgtatggtagaacacaaaaaagacgtggtcatcctgctggattcgattacccgccttgcccgcgcctacaataccgtcgtgcctacctcgggcaaaatcctaaccggcggtgtcgatgccaacgcactgcaccgccccaaacgtttcttcggcgcggcgcgcaacgtggaagaaggcggttcgctgaccatcatcgccaccgcattggttgaaaccggcagccgtatggacgatgtgatttacgaagaattcaaaggcaccggcaatatggaattgcaccttgaccgccgtatggcggaaaaacgcctcttccccgccatcaacatcaacaaatccggcacgcgccgcgaagagctgcttgtgccgaacgaccagttgcaacgtatgtggctcttacgcaagttcctgcacccgatggacgaaatcgaggcagccgaatttttaatcgggaaaatcaaagcctctaaaaacaatgatgatttctttgaactgatgcgcggcaaataa

SEQ ID NO: 29616 - DNA, 822 bp, Neisseria meningitidis
atgagcagtccgcgccatgtgttttacatttccgaccgtaccggtctgactgccgagaatatcggcgaggctttgctgaaccagtttggcaatctgtcgttcaaacgccatacgcatccgtttgtcgatacgccggaaaaggcgcgcgcggtggtggagaaggtcaatcggagccggcaggaaaacggtcagcgtccgattgcgtttgtcagtgtggttgatgacgaaatccgtcggattatcaaaggggcggatgcttttcagattaatttctttgagacttttttgggactgttggagaaagaactcaataccgaagccacggcatccgagcaggggcatcacagtatcggtaatacgaagcgttacgatgcgcgtatggaggcggtgaatttctcattgaaccacgatgacggggtcagcgataagaaccttcaggaagcggatgtaatcttgatgggtgtatcgcgttcgggcaaaacgccgacctgcctttacctcgccctgcaatacggcatccgtgcggcaaactatccgctgattcccgacgatttggaatcggccgatctgccgcgtatggtcaagccttatagggataagctgttcgggttgaccatccagccggaacgtttgcaggccatccgccaagagcgccgcccgaattcaacttatgccaaaatcgatacatgccgcagcgaggtggcggacgcgcagagtatgttcagacggcatgggattccgtttgcgaatacgacggataaatcagtggaagagcttgccgtacacatccttcaggcgtgcaagctcaaacgcaggttttga

SEQ ID NO: 29617 - DNA, 1152 bp, Neisseria meningitidis
atggatttaagtatcgtagttcccatttataatgtcgaaagttatttggaagcgtgtttaagttccatagaacctatattaagtaatgaaaatgtcgaacttatccttgtgaatgacgggtcaaaagacggaagtgaagatatatgttataaatatatagataaaacaacaaacaacaaacaacaaacaacaaacaacaaacaacaaacaacaaacaacaaacaacaaacaacaaacaacaaacaacaaacaacaaacaacaaacaacaaacaacaaacaacaaacaacaaacaacaaacaacaaacaacaaacaacaaacaacaaacaacaaacaacaaacaacaaacaccggacaccaaatatcaaatatatctatcaggataaccaagggacggcagaagctaggaataccggaataaaaaattcaaacggaaaatatatagtctttattgattcggatgattttattaattgtcaggtcttgctggattttcttagtaaagatgatattgatatgccggatgtggtttttttaaatgcggttaaatatgataagggaagtgtttcacattttggcgaagattatcagcctgaaaaaatactcaatcaatccaaagtcgaagttttgaaaggattatgccgatttagaaaatttccgggttcggcgtgtaataagattataaaaagggaattgattatcaaagaaaaactattttttgaaaaagaggtttatgccgaagatatcgaatggtcaatgagattatttaatgcggcaacaactttttcttatttggacggttgttattactattatcggcagggaagaaaagattctaaaacaggaactgtttcggaaaaaagtataaagtcattattatatattttggagaaaaatgcggaaatggaatttaatagggatatatcaagttatctttattcttttctttcctacgaatatctcgttttgctttttatcatgacgagtaaaaatatagcgtgtgatgctgatataaaaagaagggcgtatcatttaaggtttatgctgttaaagtccaataaattgatatataagctgatattcccgataatcacattattcggggtcgatattacaggcaggattttaaaagcaatcagggggaatatttaa

SEQ ID NO: 29618 - DNA, 1596 bp, Neisseria meningitidis
atgtcccaagaaatcctcgaccaagtgcgccgccgccgcacgtttgccatcatctcccaccctgacgcaggtaaaaccacgttgactgaaaaactcttgctgttttcaggtgcgattcaaagcgcgggtacggtaaaaggcaagaaaaccggcaaattcgccacctccgactggatggacatcgagaagcagcgcggcatttccgtggcatcaagcgtgatgcagttcgactataaagaccacaccgtcaaccttttggacacgccgggacaccaagacttctccgaagacacctaccgcgttttgaccgccgtcgatagtgccttgatggtcatcgacgcggcaaaaggcgtggaagcgcaaaccatcaaactcttgaacgtctgccgcctgcgcaatacgccgattgttacgttcatgaacaaatacgaccgcgaagtgcgcgattccctggaattgctggacgaagtggaaaacatcctgcaaatccgctgcgcgcccgtaacctggccgatcggcatgggcaaaaacttcaaaggcgtgtaccacatcctgaacgacgaaatctatctctttgaagcgggcggcgaacgcttgccgcacgagttcgacatcatcaaaggcatcgataatcccgaattggaacaacgctttccgttagaaatacagcagttgcgcgacgaaatcgaattggtgcaggcggcttccaacgagttcaatctcgacgaattcctcgccggcgaactcacgcccgtattcttcggctctgcgattaacaacttcggtattcaggaaatcctcaattcattgattgaatgggcgcccgcgccgaaaccacgcgatgcgaccgtgcgtatggtcgagccggacgagccgaagttttccggatttatcttcaaaatccaagccaatatggacccgaaacaccgcgaccgtattgccttcttgcgcgtctgctccggcaaattcgagcgcggcatgaaaatgaaacacctgcgtatcaaccgcgaaatcgccgcctccagcgtggtaaccttcatgtcccacgaccgcgagctggttgaagaagcctacgccggcgacattatcggtatcccaaaccacggcaacatccaaatcggcgacagcttctccgaaggcgaacaactgacgtttaccggcatcccattcttcgcgcccgaactgttccgcagcgttcgcatcaaaaacccgctgaaaatcaagcaactgcaaaaaggtttgcaacagcttggcgaagaaggtgcggtgcaggtgttcaaaccaatgagcggcgcggatttgattttgggcgcggtcggcgtgttgcagtttgaagtcgttacctcgcgccttgccaacgaatacggcgtggaagccgtgttcgacaacgcatccatctggtcggcgcgctgggtatcgtgcgacgacaagaaaaaactggcggaatttgaaaaagccaacgcgggcaacctcgccatcgacgcgggcggcaacctcgcctacctcgcccctaaccgcgtgaatctgggactcacgcaagaacgctggccggacatcgtgttccacgaaacgcgcgagcattcggtcaaactttaa

SEQ ID NO: 29619 - DNA, 1503 bp, Neisseria meningitidis
atggcaaaagtactcatcgtacccgtatctgccggactggacgcctccgccgtcgcacaagcctttgcaaaagcactggacgcacaaattttccaagccgttgacgcaaccgccgaaaccctgctcgcgcaaggcaaaagcgacgactggttcgacgcactggtcggcaaagttgccgcactcgatgccgccaacctcgtcatcgaaggcatcgcgcccgatgccgacaaaatctacctcgcaggcaaaaacgtcgaactggcattgtcccttgacgcggcagccgtcttcgccgtccgttccgacaacgccgatgccgacgaactggcaaatcggctgaaccttgccaaacagttcttcgccgccgcgccgggcgtattggaaggttttgtcgtggacggcgcggcagcctccgttgccgaagcggcagccgaaaaaaccggcctgaccttcttcggttcgagcgacgcgctgaaagacgtatccgtattggcaggccgcgaagcaaaacgcctgtcgccggcgcaattccgctacaacctgatcgacttcgcccgccaagccgacaaacgcatcgtcctgcccgagggcgcagaaccccgcaccgtccaagccgccgccatctgccacgaaaaaggcattgcccgctgcgtcctgcttgccaaacgcgaagaagtcgaagccgttgccaaagaacgcggcatcagcctgcccgactctttggaaatcatcgatcccgcctcattggtcgaacaatacgtcgagccgatgtgcgaactgcgcaaatccaaaggcctgacacccgaagacgcgcgcaagcaactgcaagacaccgtggtactcggtacgatgatgatggcgcaaaacgatgtggacggcctggtatccggtgccgttcatacgaccgccaacaccatccgccctgctttgcaactgattaaaaccgcaccgggtgcaagcctcgtatccagcgtattctttatgctgctacccaaccaagtcctcgtcttcggcgactgcgcggttaatccgaacccgactgcgcaacagcttgccgacatcgccatccagtctgccgattccgcaaaagccttcggcatcgacccgaaagtggccatgatttcctactctacggtcaactccggcagcggtcccgatgtcgataccgtcatcgaagcaaccaaacttgcccaagaaaaacgccccgatctcgccatcgacggcccgctgcaatatgatgcggcaaccgtgccgggtgtgggcaaatccaaagctccgggcagcccggtggcaggacaggcaaccgttttggtcttccccgacctgaacaccggcaactgcacctataaagccgtccaacgcagtgccaacgtcttaagcgtcggcccgctgctgcaaggcctgcgcaaaccggtcaacgacctgtcgcgcggcgcgctggtggaagacatcgtgttcaccatcgccctgactgccgttcaggcaaaacaaatggaaggctga

SEQ ID NO: 29620 - DNA, 1377 bp, Neisseria meningitidis
atgcacgacaaaacctggtccggacgtttcaacgaacccgtttccgaactcgtcaaacaatacaccgcctccatcggtttcgaccgacgccttgccgaatgggacatccaaggctcgcttgcccacgcgcaaatgctgaaagaaaccggcgtgttggacgaaggcgatttggcggacatccgtcggggcatggcggaaatcctcgaagaaatccgcagcggcaaaatcgaatggtcgtccgatttggaagatgtccacatgaacatcgaacgccgcctgaccgacaaaatcggcgatgcaggcaaacgcctgcacaccggccgcagccgcaacgaccaagtcgccaccgacatccgcctttggctgcgcgaccagattaccgttatccaaagcctgattcaaagccttcagacggcattgctggatttggcggaacaaaacgccgaaaccgtcatgcccggctttacccacctgcaagtcgcccagcccgtcagcttcggacaccatatgctcgcctacgtcgaaatgctcggccgcgataacgaacggatggcggactgccgccgccgcgtcaaccgtatgccgctcggcgcagccgcccttgccggtacgacctacccgattcggcgcgaaattaccgccgaattactgggtttcgagcaaatctgccaaaactcgctcgatgccgtatccgaccgcgattttgccgtcgagttcaccgccgccgcctcgctgattatggttcacctgagccgcctgtccgaagaattgattttgtggatgagtccgcgtttcggctttatcgacatcgccgaccgtttctgcacaggttcgtccatcatgccgcagaagaaaaatcccgacgtgcccgaactcgtgcgcggcaaatccggccgcgtcatcggacaccttatcggtctgattaccctgatgaaatcccaacccttggcgtacaacaaagacaatcaggaagacaaagaacccttgttcgacaccgccgacacgcttatcgacacgttgcggatttacgccgatatgatgcgcggcgtaaccgtcaaacccgacaatatgcgcgccgccgtgatgcagggcttcgctaccgccaccgatttggcagattacttggtaaaaaaaggcatgcctttccgcgatgcccacgaagtcgtcgcccaagccgtgcgccatgctgatgaagccggcgtcgatttgagcgaactgccgctcgaagtcttacaaggtttcagcgatttgattgccgacgacgtttacggcgtgctgacacccgaaggcagcttaaacgcgcgcaaccacttgggcggtagcgcgcctgaacaagtccgtttccaagtcaaacgctggcgggaaatgtcagcttaa

SEQ ID NO: 29621 - DNA, 870 bp, Neisseria meningitidis
atgaaacccatacggaaagccgtcttccccgtcgcagggatgggaacacgcttcctgcccgccaccaaggcaagcccgaaagaaatgctgcccatcgtcgacaagccgctgatccaatacgccgtagaagaagccgtggaagccggctgcacggaaatggtgtttgttaccggacgcaacaaacgcagcatcgaagaccatttcgacaaggcatacgaactcgaaaccgagttggaaatgcgccataaagacaaattgttggaacacgtccgcaacatcctgccgccgaacattacctgcctctacatccgtcaggcggaagcactgggcttgggacacgccgtcttgtgcgcccgcgccgccatcggcgacgaaccctttgccgtgattttggctgacgatttaatcgatgcccaaaaaggcgcgctcaaacaaatggtcgaagtgtacgaacgcagcggcaacagcattttgggcgtagaaactgtcgaaccgtcgcaaaccggctcatacggcatcgtcgaaaccgaacagctcaaacagttccaacgcattaccggcattgtcgaaaaacccaagcccgaagacgcgccctccaaccttgccgtcgtcggacgctacatccttaccccgcgcattttcgacttactgaccggactgccgcgcggcgcgggcaacgaaatccagcttacagacggcatcgccaagctgctcgatcacgaatttgtcctagcgcacccctttgaaggcacgcgctacgactgcggcagcaaactgggctatctggaagccaccgtcgcctacggcctgaaacaccccgaaaccggcgaacccttccgccgccttttggaaaaataccgtaccgaataa

SEQ ID NO: 29622 - DNA, 600 bp, Neisseria meningitidis
atgtctgaaaaaccggaaaaaatcgttttggcaagcggcaatgcaggcaaactcaaagaattcggcaacctattcgaaccatacggcattaccgtattgccgcaatccgagttcagcatacccgaatgccccgaaccctattccacctttgttgaaaatgcgctggcaaaagcccggcacgccgccggacacagcgggctgcccgcactcgccgacgacagcggcatctgtgccgccgccttaaacggtgctccgggcatacattccgcacgttacgccggcagcaatcccaaatccgataccgccaacaacctgaaacttgccgccgaacttgccggcaaagccgacaaaagctgttgctacgtctgcgtattggtttttgtccgccataaagacgacccgcgtccgattattgccgaaggcgtatggcacggacaatggaacggcgttcccgccggtgaaaacggtttcggttacgacccgtatttttatctgcccggacacggtaaaaccgccgccgaattggattcggaggtcaaaaaccgcgaaagccaccgcgcgcaggcacttgccgaactcttacgcaaactcgccctttaa

SEQ ID NO: 29623 - DNA, 1458 bp, Neisseria meningitidis
atgcacaaaatcctgcccatcgcccacgtcctctcccgactgggtatgctgttttcctttatcctgctgatacccgccgccctctcctacgccttttcggacggcgcgtacaccgccttcgccaccaccgcgaccgttaccctttccggctcgtacatcgtccggctcgccaccctccggttcaggcgcgaactgcgcccgcgcgacggcttcaccctcgtcctgatgttgtggctggcgtttgccgctatggcggcgatgccgatgtacctgtatttcccgaatatgggctttaccgacgcattttttgaatcgatgtcgggactgaccaccaccggcgcgaccgtcatcccccacgtcgacgggctcgccccctccgtcaacttttggcggcatatgctcaactggctgggtgggatgggcatcatcgtccttgccgtcgccatcctgcctatgctcggcgtaggcggcacgcagttattcaaagccgaaatccccggcattgacaaagaaagcaaaatgtcgccgcgcatttcccaagtggcgaaaaaactctggttcggctacaccctgatcaccatcctcgcggcagcctgcctgcattttgccgggatgagctggttcgatgccgtctgtcacgcaatggcgaccctctcgctgggcggattttccacccacgatgccagcatagcttattacaactcccccctcatcgaggcggtcatcatcgttttcaccattgtcggcggcatcaattttgccagccatttcgccgccctcaacagccgcagcctcaaaacctattggaaagacgaagaatgccggacgatgctgctgctgctctccggcagcatccttaccgccgccctgtacctgtggcacaccggctattacgccggttttaccgaatccctgcgctacaccgccttcaacttcgtctccatcggactggcaaacgggctggccaacaccgacttcgcacaatggccgctcctgatttccctgtggatgtttttcctcgccaacatcctcgccaactccggctcgaccggcggcggcatcaaaaccatacgcgccctcgtcctgttcaaattcagcctgcgcgaaatgatggtgctgctgcaccccaaagccgtccgcaccgtcaaaatcagcggcaaggccatacccgaccgcctcgcgctgaccgttatgtccttcatcttcatctactttatgaccgtcgtcctcttcagcttcctgctgatggcgagcggtatggaatttaccaccgccttcaccgccgtcatcgcctgcatcaccaacgccggccccggcctgggcgaagtcgggcccgccggcaattacgccggtttggacgtgatgcagaaatggatctgcgttaccgccatgctcttgggcaggctggaaatcttcaccgtcttcatcctcttcacccccgcctactggaagaaataa

SEQ ID NO: 29624 - DNA, 2526 bp, Neisseria meningitidis
atgaatccaaactcaaaacataacactaactttaccaatcttcttaaaccgtctgatagtgatataaaacaatttgccgcacaacacatccgccacctcaccgacctgctcaaccgctatgcctacgaatactacaccctcgacgcgcccagcgtacccgatgccgaatacgacaaattattccgcgagctcgaagcgttggaacgaaaccatcccgagctcaaactgcccgacagcccgacccagcgcgtcggcggcgagcctctggcgggatttgccgaagtacgccacgaagtgccgatgctgtcgctgaccaacgccttttccccgcaagatgaaaacggcgtgttcgaccatgcagaaatgtacgctttcgaccaacgcgtgcgcgacggtttggacggcggcaaacccgaatacgttatcgaacccaaattcgacggcctcgccatcagcctgctctaccgcgacggcgtattggtacaggcggcaacgcgcggcgacggcacaacgggcgaagacgttacccaaaacgtcaaaaccgtcgccaatatccccctgcggctgcacggcgaaaacacgcccgaactcatcgaagtgcgcggcgaagtgctgatgctcaaagccgattttgccgccctcaataaaagacaagccgaaaacgggcaaaaaccctttgccaatccgcgcaacgccgccgccggcagcctacgccaactcgattcgcgcatcactgcgcaacgcaaattgcactttttcccctactccgtcgcccgtcagcaaggcggtttcgtcgcggaagaacacatccaagaactcgcctatttccaagcactcggcttcagtctgcccaacggcaatttcggctgtttcaaaaatatcgacgaagtattgacgttttacgaacaaatgcagcaaaaacgccccgaactgccctacgaaatcgacggcatggtggtcaaagtcaacagcttggcgcaacagcgcgaactcggcttcatctcccgcgcgccgcgctgggcggttgcccacaaattccctgccgaagaagccctgaccattgtcgaagccatagacgtacaaatcgggcgcaccggcgcggttacccccgtcgcccgcctgcaacccgtattcgtcggcggcgtaaccgttaccaacgccaccctgcacaatcaggacgaagtatcgcgcaaagacgttcgcgtcggcgataccgtcgtcgtacgccgtgccggagacgtgattcccgaagttgtgcgcgtgatttttgaacgccgcccgatgcgggaaaccgccgttgctgtttcagacggcatcgggcatcggcaggacgatttgtttgccgaaacaccgtccgccaatcaaacccaatccgttccgctccacaagccctaccgcctgccgacccactgccccatctgccgcagcgaaatcgaacgcgaagaaggcgaagccgtcgcccgatgcagcggcggtatgctttgtcaggcacaacgcgcgcaaggcttaatccacttcgcctcgcgcaaagccatggacatcgacggcttgggtgaaaaacaaatcgaacagctggtcgcccaagacctcgtcctccacttcgccgacctctaccgcctcgatattccgaccctgcaaaaaatgaaggaaacggcggacaaaaccgttgccgaatcggatcaaatgccgtctgaaggcagttcggtcggcgcgtcgggcaaacataaaaaacaaccggtcaagtgggcggaaaacatcctcgcaggcatagaatccggcaaaacgcccgaactcgcgcgcttcctgttcgcgctcggcatccgccacgtcggcgaacgcaccgccaaaacgctggcacaggcattcggcacattggaacgcgtccgccgcgcacccgaacccgtcctcgcctgcctgcccgacatcggtacggtagtggcgcgttccattgcccacttcttcgcccaagccgaacagcaggcgatgatagacgaactgctcgccgcaggcgttgccccgcaaacccaagccgttaccatcccgcccgcccgccacgccgaaccgcaacgctggatcgcccgcctgcccgacttcaaaattagcgaaaacaaagcccaagccttatgggaactcgctggtaaaaacatagaaggtctacaaaacgacaaagccctccccgccgactggcaagcatggcgcagcgaaccacaaaacgccgccctactcgaaaacctgaaaaccttcttcgcgcaaatgccgtctgaagacgaggcggcgcaaggttcagacggcatcaataaagccgtagcgggcaaaaccttcgtgttaactggcacactgcccaccctcaaacgcgaccaagcccaatccctaatcgaagccgcaggcggcaaagtttccggcagcgtttccaaaaaaaccgattacgtcgtcgctggagaagccgcgggcagcaagctggaaaaagccaatgccttgggtgtttccatcctcagcgaagccgaactgcttaccctgctcggctga

SEQ ID NO: 29625 - DNA, 621 bp, Neisseria meningitidis
atgaaaccgcaattcatcactttggacggcatagacggtgccggcaaatccaccaaccttgccgtcatcaaggcatggtttgaacggagggggctgcccgtgctgttcacgcgcgaaccgggcggaacgccggtcggtgaggccttgcgcgaaatcctgctcaaccctgaaaccaaagccggtttgcgtgcggaaacactgatgatgttcgccgccagaatgcagcatattgaagacgtgatattgcctgcactttcagacggcatccatgtcgtgtccgaccgttttaccgatgcgaccttcgcctatcagggcggcgggcggggaatgccgtctgaagacattgaaattttggaacattgggtgcagggcggtttgcgccccgatttgaccctgctgttggatgtgccgctggaagtgtcgatggcgcgtatcgggcagacgcgcgagaaagaccggttcgagcaggaacaggcagatttcttcatgcgtgtgcgcagcgtttatctgaaccgtgccgccgcctgtccggaacgttacgccgttatcgacagtaacctcggcttggatgaagtcagaaacagcatagaaaaagtgttggacagacatttcggctgttga

SEQ ID NO: 29626 - DNA, 873 bp, Neisseria meningitidis
atgagctggttagataaaatcctgccacccaaaatcaaaaaccgcagcaaagacggttcttccaatgttcccgagggtttgtggcacaaatgtccgtcttgttcggcaaccgtttattcgaccgagttgcagcagaacaatcaggtttgtccgaaatgcaaccaccacaatccgttgtcggcacgacaacgcctgaatctgcttttggatgaggatggcagagaggaggttgccggaaatgtcaaaccgacagatcctttgaagtttaaagacggcaaaaaatatccggatcgtttgagtgcggcacgcaagctgaccggggaagatgatgctttggtggtaatgaaaggcaagatgaacggtctgcccgttgtggttgctgcgtttgagttccgctttatcggcggttcgatgggttcggttgtgggcgaacgattcgtacagggcgtccgccgggcggttgccgacaattgtccgttcgtctgtgtggcggcttccggcggtgcgcgtatgcaggagggtgtgaactcattgatgcagatgacgaaaaccagtgccgcgctgcatttgctgacggaaaaacgcctgccgtttatatcggtgttgaccgatccgactatgggcggcgtatccgccagcttcgcatttttgggtgatgttgtgcttgccgaaccgaacgcgctgatcggttttgccggtccgcgcgtgattgagcagacggtgcgcgaaacgctgccggaaggcttccaacgcgccgagttcctgctggaaaaaggcgcaatcgaccagattgtcgaccgccgcgatatgaagcggcgcatcagtgatttgattacgctgttgtgccgtcaggacaaagtttctgccgcctga

SEQ ID NO: 29627 - DNA, 1035 bp, Neisseria meningitidis
atgcaaaccctgaccattatccgccccgacgatatgcacctgcacctgcgcgacggcgacgcgctcaaagccgttgctccttataccgcccgccaaatggggcgtgccgtcattatgcccaacctcaaaccgcctgtcgtcagcgttgccgacgcgcttgcctacaaagcgcgcatcatggcggcattgcccgaaggcagcgcgtttgagccgttgatgacgctttacctgaccgaccaagccacgcctgcacttgtgcgcgaagccaaagccgccggcatcgtcgccttcaaactctaccctgccggcgcgaccaccaattccgattccggcgtaaccgacctgttcaagctcatccccgtgttggaagaaatggcgaaacagggcattttgttcctcgttcacggcgaagtaaccgaccccgaaatcgacatcttcgaccgcgaagccgcctttatcgggcgcgtgatgaaacccgttttggcgcaagtgccgaatcttaaagtcgtgttcgaacacatcaccaccgccgaagccgcccgcctagttttggaagcaggcgacaacgtagccgccaccgttaccccgcaacacctcctgctcaaccgcaacgacctcttggtcggcggcgtgcgcccccatcatttctgcctgcccgtactcaaacgcgaaacccaccgtcaggcattggttgccgccgttaccggcgagaaggcgcataaattcttcctcggcaccgactccgcgccgcacgccaaatccgccaaagaaaacgcctgcggttgcgccggtatgttcagcgcgatgaccgccatcgagctttatgccgaagtgtttgaaaaagcaggcgcgttggacaaactcgaagccttcgcctcgaaaaacggcgcaaggttttacggcattcctgaaaataccgacacgatcaccctcgtcaaacaaagccaaaccgtccccgcaagtattccctacggcgacggcgaacttgtcccgatgcgcgcgggcggcgaaatcggctggacggtacagtattga

SEQ ID NO: 29628 - DNA, 426 bp, Neisseria meningitidis
atgaaaacagcccgccgccgttcccgcgagcttgccgtacaagccgtttaccaatcccttatcaaccgcaccgccgcgcccgagattgctaaaaacatccgcgaaatgcccgactttgccaaggcagacgaagaattgttcaacaaacttttcttcggcacgcaaaccaatgcggcagagtacatccgacaaatccgccccctgctcgaccgcgacgaaaaagacctcaaccccatcgaacgcgccgtcctgctgaccgcctgccacgagctgtccgccatgcccgaaacgccctaccccgtcatcatcaacgaagccatcgaagtaaccaaaaccttcggcggcacggacgggcacaaattcgtcaacggcatcctcgacaaactcgccgcccaaatccgtcccgacgagcccaaacgccgttga

SEQ ID NO: 29629 - DNA, 477 bp, Neisseria meningitidis
atgaacaccatcgcccccaacctcgacggcaaacacctccgcatcggcatcgtacaggcacgcttcaccaacgaaatcggcagcgaaatgctcaaagtctgctgccgcaccctccaagaattgggcgtggcagacgaaaacattaccgtcgccaccgtacccggcgcgcttgaaatccccatcgcgctgatgaactttgcctcttctgaaaaatttgacgcactgattgccatcggcgtcgttatccgtggcgaaacctaccatttcgagctggtttccaacgaatccggagcaggggtcagccgcgtcgcactcgactacaacatcccgattgccaatgccgtcctgaccacggaaaacgacgcacaggcaatcgaacggattgaagaaaaagcctcggatgccgccaaagtcgccgtagaatgcgccaacctcgtcaacctcctgctcgaagaacagtttgaagacgaagaataa

SEQ ID NO: 29630 - DNA, 924 bp, Neisseria meningitidis
atggatattgaaaccttccttgcaggggaacgcgccgccgacggataccgttgcggcttcgtagcgattgtcggccgtccgaacgtgggcaaatcaacgctgatgaatcatctcatcggtcagaaaatcagtattaccagcaaaaaggcgcagacgacgcgcaaccgcgtaacggggatttataccgacgataccgcgcagtttgtgtttgtcgatacgcccggttttcaaaccgaccaccgcaacgcgctcaacgaccgtttgaatcaaaacgttaccgaggcactcggcggcgtggatgtggtggttttcgtcgtggaagcgatgcgttttaccgatgccgaccgcgtcgtgttgaaacaactgcccaagcacacgccggtcattttagtggtcaacaaaatcgataaggacaaggcgaaagaccgttacgcgctggaggcgtttgttgcccaggtgcgcgccgaatttgaatttgcggcggcggaggcggtcagcgcgaaacacggattgcggattgccaacctgttggagctgattaagccgtatctgcccgaaagcgtgccgatgtatcccgaagatatggttacggacaaatcggcgcgttttttagcgatggaaatcgtgcgtgaaaaattgttccgctatttgggcgaggaattgccttatgcgatgaacgtcgaagtggagcagtttgaagaggaagacggtttgaaccgcatctatatcgccgttttggtcgataaggaaagccaaaaggcgattttaatcggcaaaggcggggagcgtttgaagaaaatttccaccgaagcgcggttggatatggaaaaactgtttgataccaaagtatttttgaaggtctgggtcaaagtcaaatccggttgggcggacgacatccgcttcctgcgcgagctgggtttgtag

SEQ ID NO: 29631 - DNA, 780 bp, Neisseria meningitidis
atgaaagaacacaaagcccgcaagcgtttcgggcagaattttttgcaggacacgcggattatcagcgatattgtcaacgccgtgcgcccgcaggcggatgatgtcgtgattgaaatcggtccgggtttggcggcgattaccgaacctttggcgaaaaagctgaaccgcctgcacgttgtcgaaatcgaccgcgacatcgtatgccgtctgaaaacgctgccgtttgcggataaactggtgattcacgaaggcgatgtattgcagtttgatttcaacggcatcgcaggcaaaaagaaaatcgtcggcaacctgccctacaacatttccacgccgcttttgttcaagctggcggaggtggcggacgatgtcgtcgatatgcactttatgctgcaaaaagaagtggtcgatcgtatggttgccgcgccgaaaagcaacgactacggccgcttgggcgtgatgctgcaatatttcttcgatatggaaatgctgattgacgtgccgcccgaatcgttcgaccccgcgccgaaagtggattcggccgtcgtccgcatgattccggtgaaacaccgtatcggcaaggcggacgatttcgagcatttcgccaaactcgtgaaactcgccttccaccaacgccgcaaaaccatacgcaacaatctgaaagagcttgcaggcgacgatgatttgcaggcagtcggcatcaatccgcaagaccgcgccgaacatatcgcgccggagaaatatgtggcgttgagcaattatctggcgggcaaggccgtctga

SEQ ID NO: 29632 - DNA, 1203 bp, Neisseria meningitidis
atgaagaactaccacgcgcccgacgagaagggctttttcggcgaacacggcgggctgttcgtgtccgagaccctgattccggctttgcaagagctggcggatgcctataaggcagcgaaaaacgatcctgaattttgggaagcgttccgccatgatttgaaacattatgtcggcaggcccagccccgtttaccacgccgcgcggttgtccgaacatctgggcggcgcgcaaatctggttgaagcgcgaagacttgaaccacaccggcgcgcacaaagtcaacaacaccatcggtcaggcactgttggcaaaacgcatgggtaaaaaacgcgtcatcgccgaaaccggcgcgggtcagcacggcgtggcgagtgccaccgttgccgcacgcttcggtatgacttgcgacgtgtatatgggcgcggacgacatccaacgccaaatgcccaacgtgttccgtatgaaattattgggtgcgaacgtggtcggtgtagaaagcggcagccgcacgctgaaagacgcgatgaacgaagccatgcgcgaatgggtcgcccgcgtggacgacacgttctacatcatcggtaccgccgccggccccgcgccgtatcccgaaatggtgcgcgatttccaatgcgtgattggcaacgaagctaaagcgcagatgcaggaagccatcggcagacagcccgacgttgccgttgcctgcgtgggcggcggatcgaacgccatcggtttgttccacccgtatatcggcgaagaaaacgtgcgcctcgtcggcgtggaggctggcggtttgggcgtgaacacccccgatcacgccgcgccgattacttcgggcgcaccgattggcgtattgcacggtttccgcagctatctgatgcaggacgaaaacggtcaggttttgggtacgcactctgtttccgcaggcttggattaccccggcatcggcccggaacacagccatctgcacgacatcaagcgcgtcgaatacactgttgccaaagacgacgaagcactcgaagcctttgacttgctctgccgcttcgagggcatcatccccgcgctcgaatccagccacgccgttgcttgggcggtgaaaaacgcgccgaaaatgggcaaagaccaagtgattctggtcaacctatccggtcgtggcgacaaagacatcaataccgtcgcgaagctcaaagggattaaactgtaa

SEQ ID NO: 29633 - DNA, 5322 bp, Neisseria meningitidis
atgaaaaccaaacgttttaaaattaacgccatatccttatccatctttcttgcctatgcccttacgccatactcagaagcggcattggtcagagacgatgtcgattatcaaatattccgtgactttgcagaaaacaaaggcaaattttttgtcggcgcaaccgatttatcagtgaaaaacaaacaaggtcaaaacatcggcaacgcattatccaacgtaccgatgattgattttagcgttgcagatgtcaacagacgtacattaaccgtcatcgatccccagtatgccgtcagcgtcaaacatgtaaaaggagacgaaatctcttattacgggcatcacaatgggcacttagatgttagcaatgatgaaaacgaatatcgttcagttgcacaaaatgactacgaaccaaataaaaattggcatcacggtaatcaaggtcgtcttgaagactacaacatggcacgccttaataaattcgtaacagaagtcgcacctattgcaccaaccagtgcaggcggcggcgttgaaacctataaagataaaaaccgtttttctgagtttgtgcgagttggagcaggtacgcaatttgaatataacagccgctacaatatgacagagctttcacgagcttatcgttatgccattgcaggtacgccttatcaagacgtgaatgtcacatcgaatctaaatcaagaaggcttgattggcttcggtgataattcaaaacatcattccccagaaaaactcaaagaagttttatctcaaaacgcattgactaactatgctgtgttaggcgatagcggttcaccattatttgcttatgataaacaagaaaaacgctgggtctttttaggtgcttacgattattgggcaggctatcaaaaaaactcttggcaagaatggaatatctataaaaaagaatttgcagatgaaatcaaacaacgcgataacgccggcaccatcaaaggttatggcgaacatcattggaaaaccacgggcacaaacagccatatcggttcgacagcggtaaggcttgccggcaatgaaaggggtgcaaacaacggacagaatgttacctttgaaaacaacggcactttggtattggatcaaaacatcaaccaaggcgcgggcggtctgtttttcaaaggcgattacacagtcaaaggtgcaaataatggcatcacttggctaggtgcagggattgatgttgccgacggcaaaaaagtcgtttggcaagtcaaaaatccgaatggcgacagattggcaaaaatcggcaaaggcacattagaaataaacggcacaggcgttaaccaagggcaattaaaagtcggcgacggtacggttattctgaatcaacaagccgatgccgacaaaaaagtccaggctttctcccaagtcggcattgtgagcgggcgcggtacattggtgctgaacagtccggaccagattaacccgaataatctgtatttcggtttccgtggcggtcgtttggatgccaatggcaatgacttgacttttgaacacatccgcaacgtggatgaaggcgcgcgcattgtcaaccacaacacagaccgcgcctccacaatcacattaaccggcaaatcattaattaccgctcctcaaaatctttctgtttatgaaatccgaaatgattacgatgatgacgattattatggctattacagctatagaaaacccattccgcaaggcaaagatctttattacaaaaactatcgttattacgccctaaaatccggcggcagcgtgaacgcaccgatgcccgaaaacggacaaacggaaaataacgactggattttaatgggcagcacacaagaagaagccaagaaaaacgcgatgaaccacaaaaacaatcagcgtattagcggttttagcggtttctttggcgaagaaaacggaaaaggacataacggcgcattaaaccttaatttcaacggcaaaagcgcgcaaaaccgtttcttgttaacaggcggcacgaatttaaacggaaaaataagcgtaactcaaggcaatgtcttgttatcaggtcgtccaacaccacacgcaagagattttgtgaacaaatcttcagcccaaaaagacgcacatttctccaaaaacaatgaagtcgtatttgaagacgactggataaaccgcacattcaaagccacagaaattacggttaatcaatccgcatcattctcttccggcagaaatgtatccaacattaccgccaacatcaccgcaacagacaacgccaaagtaaatttgggttacaaaaacggcgatgaggtttgcgtgcgctcggactataccggttatgttacctgcaacacaggcaacttatccgataaggctttaaacagctttggagcgacaaagattaacggcaatgtgaatctgaaccagaatgcggcattggtcttgggcaaggctgcattatgggggcaaattcaagggcaaggaaacagccgtgtcagcctaaaccaacatagcaaatggcatttgactggcgacagccaagtacacaatctgtcattggcggatagccatattcatttgaacaatgcctccgatgcgcaaagtgcaaatcaataccacacgctcaaaatcaatcatttatccggtaacgggcattttcattatctgacgcacttggcggaaaatcttggggataaagtgcttgtgaaggaatccgcatccggtcattatcagctccatgttcaagataaaacaggcgaacccaatcaggaagggctgaatctctttgatgcatcatccgtacgagaccgttctcacctttccgtttccttggcgaatcatcacgtcgatttaggcgcattgcgttatacaatcaaaacagaaaacggtattacccgattgtacaatccttatgccgagaaccgccgccgagtcaaaccggccccgtctcctgccacaaacacggcttctcaagcacaaacggacagtgcacaaattgccaagcctcaaaatatcgtcgtcgcaccgcctagcccgcaggcaaatcaagccgaagaagcaaaacgccaacaagcaaaagcggagcaagtgaagcgtcagcaagcagaagcagagcgtaaatcggcagagttagcaaaacaaaaagcagaagccgaacgcgaagcaagagagctggcgacccgccaaaaagcagaacaagaacgcagcagcgccgaacttgcacgtcgacatgaaaaagaacgcgaagcggcagagttgtcggcaaaacaaaaagtcgaagccgaacgtgaggctcaagcattggcggtacgccgaaaagcagaagccgaagaggcaaaacgccaagctgcagagcttgcacgccggcatgaaaaagaacgcgaagcggcagagttgtcggcaaaacaaagggtcggggaagaggaacgccgtcaaacagcccaatcccagccgcaacgccgcaaacgccgtgccgcaccgcaggattatatggcagcttcccaagaccgtcctaaacgccgcggacaccgttcggtacagcaaaacaatgtggaaattgcccaagcccaagcagaacttgcgcgccgacagcaggaagaacgcaaagcggcagagttgttggcaaaacaaagggcagaagccgaacgtgaggctcaagcattggctgcgcgccgaaaagcagaagccgaagaggcaaaacgccaagctgccgaacttgcacatcgccaggaagcagaacgcaaagcggcagaattgtcggcaaaccaaaaagccgcagctgaagcccaagcattggcggcacgccaacaaaaagcccttgcgcgtcaacaggaagaagcacgaaaagctgcagagttagccgtcaaacaaaaagcggaaaccgaacgcaaaaccgccgaacttgccaagcaaagggcagcagccgaagcagcaaaacgccagcaagaagctcgccagaccgccgaacttgcacgtcgtcaagaagcggaacgccaagcagcagagttgtcggcaaaacaaaaagccgaaacagatcgagaagcggcagaatcggcgaaacgaaaagctgaggaagaagagcaccgtcaagcagcccaatcccagccgcaacgccgaaaacgccgtgccgcacctcaggattatatggcagcttcccaaaatcgtccgaaacgtcgcggacgcagatctactctgccggcaccgccctcgccatcatttgattcgtcagcttacgcagcacccagggccttgcataatccggactggtatgaaaatgactatgaagaaatccccttggatgcgttggaagatgaaaatgtatctgaatcggttgacacatcagacaaacagcctcaagacaatacggaacttcatgaaaaagttgagacagtgagtttgcaaccaagagccgcgcagccgcgagcccaagccgccactcagccgcaagcccaagccgccgcgcaagctgatgcagtcagcaccaataccaactcggctttatctgacgcaatggcaagcacgcaatctatcttgttggatacaggtgcttcattaacacggcacattgcacaaaaatcacgcgctgatgccgaaaaaaacagcgtttggatgtcgaacatcggttatggccgtgattatgcttccgcacaatatcgccggtttagttcgaaacgcacgcaaacacaaatcggcattgaccgcagcttgtccgaaaatatgcagataggcggcgtattgacttactctgacagtcagcatacttttgatcaggcgagcggcaaaaatacttttgtgcaagccaacctttatggtaagtattatttaaatgatgcttggtatatggccggcgatattggtgcaggcagcttgagaagccggttacaaacgcagcaaaaagcaaactttaaccgaacaagcatccaaaccggccttactttgggcaatacactgaaaatcaatcaattcgagattgtccccagtgcggggatccgttacagccgcctgtcatctgcagattacaagttgggtaacgacagtgttaaagtaagttctatgtcagtgaaaacactgacggccggactggattttgcttatcggtttaaagtcggcaaccttaccgtaaaacccttgttatctgcagcttactttgccaattatggcaaaggcggcgtgaatgtgggcggtaattccttcgtctataaagcagataatcaacagcaatattcagcaggtgccgcgttactgtaccgtaatgttacattaaacgtaaatggcagtattacaaaaggaaaacaattggaaaaacaaaaatccggacaaattaaaatacagattcgtttctaa

SEQ ID NO: 29634 - DNA, 885 bp, Neisseria meningitidis
atgagcagcggaaatatccacatccacagcatgaccggctttgccaacgcggcggcagagtgcggcagcaaacgcatcaacctcgacatccgcgccgtcaaccaccgctttttggacattcaaatcaggatgccggatgatttgcgctatttggaaagcggtatccgcgagaaaatttcatcccatatcgcgcgcggcaaagtcgaatgcaaaatccaaattcaagatacggaaaacagcagacagtccttggaactcaactcggatttggtgaaccagcttgccgaaatcaacaaaaacctccgcaagcatcacgatttggcaaaactgggcgttgccgacatcctgcgtttccccggcgtattggcaagccaaagggaaaatacggaggaattggcaaaaagcattaccgaactgaccgaaaaagcgttaaaagactttactgccgcacgccggcgcgaagggaaaaaattgggcgagcacctgttacaacgcctcgaaagcatggaagaaatcatagatgcattgagcgaactctttcctaccctgctggaaacacataaagaaaaaatccgcgcccgcctcgtcgaagcagtcggcgacatcaataatgacaggctgcaacaggaatttgccctctttatccaaaaatccgacatcgacgaagagttcagccgcctacgcacccacattgccgaagtgcgtcgtatcgttaccgaacacaaaggcagcagcggcaaacggctggacttcctgatgcaggaattaaaccgcgaagccaacactttgggcagcaaatccattgccgccgaatgcacccaagcctcggtcgagctgaaagtcctgatcgaacagatgcgcgaacaagtgcagaatatcgaataa

SEQ ID NO: 29635 - DNA, 1539 bp, Neisseria meningitidis
atggtttccaaactggacaaatactggcagcaccccgccctctactggcctttgctcatcctttttgccgccgccaccccctttaccttcgcaccctactaccacttttggctgatgcccttgattttcggtgccttcgtccgcctcatcgaactgcgtccgcgttttgctgtctcttccgcctacctgttcggcctgaccgcatacacgacacagttctactggatacacaccgccctgcacgacgtttccggcctgcccgacctctatgccgtaccgctgaccttcctactccccgcctaccttgccctttatccggcactgtgtttctggctgtggaaaaaatttaccctgcctcggggcataaaaatcggtttggtactgcccatcctgtggacactgaccgagtttgcccgcgaacgtttcctgaccggattcggctggggcgcaatcggctactcccaaatcaccccggacagcccgctcgccggctttgccccatttggcggcatccacatggttacactggcaaccgcctttctcggtgtctggctggttttggcgagtgataacaccgcacgttcgggcaaacgcctgcttccaattatcctgattgccgccctgcttgccgcaggctacaccgcccgacaaaccgacttcacccgccccgacggcagccgcagcaccgtcgccctgcttcaaggcaacatcgaccaaaccctcaaatggcgtgaagaccaagtcatcccgaccatacagaaatattacgaacaggtcggcaaaaccactgccgacatcgtcatcctgcccgaaaccgccatccccgtcatgcgccaaaacctgccggaaaacatactggcaaaatttgccgaacaggcgcaaaacaacggcagcgcgctcgccgtcggcatcagccaatacacttcggacggcaacggttacgaaaacgccgtcatcaacctgaccggttatcaggaaaacaatcaggacggcatcccctactacgccaaaaaccacctcgtccccttcggcgaatacaaaccgctgcccttcctgaccacgccgctttacaaaatgatgaatatgcccctttccgacttccgcaaaggcggcggtaagcaatccgccctgctgatgaaaaaccaaaaaatcgccttcaacatctgttacgaagacggattcggcgacgaactgattgccgccgccaaagatgccacactgcttgccaatgccagcaatatggcgtggtacggaaaatccaacgccatgtaccagcacctccaacaatcgcaggcgcgggctatggaactcggacgctatatggtccgtgccaccaacaccggcgcaaccgccatcatctcccccaaaggcaacatcatcgcccaagcccaacccgatacggaaaccgtattggaaggacacatcaaaggctatgtcggcgaaacgccctatatgaaaaccggcagttcatggtggttgatgggcatattgaccctagccgcactgattcttttcatcttccgaaacaaagaacactga

SEQ ID NO: 29636 - DNA, 1116 bp, Neisseria meningitidis
atgcttaaatttaccttacacaaaaaagacggatacgcccgacgcggcacgctggagttgaaccacggcaaaatcgaaacgccggtatttatgcctgtcggtacttacggctcggttaaggcgatgaacccgcaaaacctgcacgacatcaaggcgcaaattattttgggcaacacttatcatttgtggctgcgtccgggcttggaggtcgtcgaacagtttggagggcttcacggctttatcggctgggacaaaccgattttgaccgactcgggcggttttcaggttttttctttgtcggatatgcgcaagctgacggaagaaggctgtacgtttaaaagcccgattaacggcgacaagctgtttttatcgcctgaaatttctatgaaaatccaaacggttttgaactcggacatcgcgatgcagttggacgaatgcacgccgggcgaggcgacgcgcgaacaggcgcgaaaatcgttgcaaatgagcctgcgctgggcggaacggagcaaaaaagcctttgaagatttgaaaaacccgaacgcactgttcggcatcgtgcaaggcgcgatgtatgaagatttgcgcgaagagtcgctgaaaggcttggaagagctcgatttccccggcttggccatcggcggcttgtccgttggcgaacctaagcccgaaatgtaccgcatgttgcgcgccgtcggccctatcctgccggaacacaaacctcattatttaatgggcgtcggtacgcctgaagacttagtgtacggcgtggcacacggcgtggatatgttcgactgcgtcatgcctactcgcaatgcgcgtaacggctggctgtttacccgttttggcgatttgaaaatcaaaaacgccaaacacaagctcgacaagcgtccgatagacgaaagctgcacctgctacgcctgccaaaacttcagccgcgcctacctgcaccatctgcaccgcgccggcgaaatcttgggcgcacagttgaacaccatccacaatctgcatttctaccaagtcattatggcggaaatgcgcgaagccgtcgaacaaggcaaatttgccgactggcaagcacaattccacgaaaaccgcgcacgcggcacagactga

SEQ ID NO: 29637 - DNA, 1914 bp, Neisseria meningitidis
atgttgaacattaccttgccggacggctcagtccgccaatacgaatcccccgttaccgtggctcaaattgctgcgtctatcggtgccggtttggcgaaggcggcggtggcaggcagggtaaacggcaaattggtcgatgcgtgcgacccgattgttgaagattctgctgttcaaatcattactccgaaagatcaggaaggcatcgaaatcatccgccattcctgcgcccatcttgtcgggcatgccgtcaagcaactctatcctaatgcaaaaatggttatcggccccgtcattgaagagggcttttattacgacattgccacggaaaaaccgtttacaccggaagatgttgccgccattgaagcgcgtatgaaagaattgattgcccaagactatgatgtggtcaaaatcatgactccgcgtgcggaggcgattaaaatttttcaagagcgcggcgaagaatacaaactgcgcctgattgacgatatgcctgaagtggaagcgatggggatgtatcatcatcaggaatatgtcgatatgtgccgcggaccgcacgttccgaatactcgtttcctgaaaaacttcaaactgaccaagctggcgggcgcatactggcgcggcgacagcaacaatgaaatgctgcaacgcatctacggtacggcttgggcgacaaaagacgagttgaaagcctatattcaacgtatcgaagaagccgaaaagcgcgaccaccgcaaacttggcaagcaattggatctgttccatttgcaagacgaagcaccgggcatggtgttttggcatcctaaaggctgggctttgtggcaagtgattgaacagcatatgcgtaaagagttgaatgctgccggttataaagaggtgaaaacgcctcagattatggataaaactttctgggaaaaatccggccactgggaaaactataaagacaatatgttcgtaaccagttcggaaaaacgcgaatatgcggttaaaccgatgaactgtccgggtcatgtgcaaatttttaataacggtttgcgctcatatcgcgatttgccgatgcgtttggcggaattcggttcttgccaccgcaatgaaccaagcggtgcattgcatggtctgatgcgtgttcgcggttttgtgcaagatgatgcgcatatcttctgtaccgaagatcaaatcgtcagcgaggcccgtgcgttcaatgaattgttggttcgcatctacaaacagttcggtttccatgatgtatccgtcaagctttctcttcgccctgaacaacgtgcaggttcagatgacgtgtgggataaggcagagcagggtttgcgcgaggcattgactgcctgcggcgtggaatggggcgaattgccgggcgagggtgcgttttacgggcctaaaatcgaatatcatgtcagagatgccttgggtcgttcttggcaatgcggtacattacaactggatttcgtcttgccggaacgcttggatgcagaatatgtaaccgaaaacaatgaccgtgcgcgacctgttatgttgcatcgcgccattttaggttctttggagcgatttatcggcattttgattgagaaccatgcaggctctttcccgttatggctggctccggttcaattggtaattatgaatattaccgaaaatcaggcagattattgtcgggaagtggctgccaaattgcaggcggcaggattccgtgtcgaattggatttgcgtaacgaaaaaatcggttacaaaatccgcgacaacagccaataccgtttcccttatcaaatcgttgtcggcgataaggagaagcaggaaaacaaagtggcggtacgccgcaaagcagaagatttgggttctttggatttggatgatttcattgcgcaattgcagcaagaaatcactgatgccctcgtcaatcattaa

SEQ ID NO: 29638 - DNA, 522 bp, Neisseria meningitidis
atcatcgctcaagaacgcgaagcacgaatcaacggcgaaattaccgccaaagaagtgcgtttaatcagtgagtcaggcgaacagcttggtgtcgtttcagttcgtgaagctttggctatggccgaagggcaggatgtcgatttggtagagatttccccaactgctaaaccgcctgtgtgcaaactgatggattacggtaaatacaaataccagcaggccaagaaacgcgacgaagccaagaaaaaccaaaagcaggtgcaaatcaaggaaatcaaattccgtccgggtacggatgagggcgattatcaaatcaagatgcgcaacattaaccgcttccttgccgacggcgataaagtcaaagtgacattgcgtttccgcggccgtgaaatggctcaccagcaactcggcgcgcaacttttggaacgtgtaaaagaagatttggctgaagtggcgcaaatcgagtcctttcccaaaatggaaggtcgccaaatggtgatgatgattgcgccgaagaaaaaataa

SEQ ID NO: 29639 - DNA, 198 bp, Neisseria meningitidis
atgcctaaaatgaaaaccaagtctagcgcgaaaaaacgctttaaagtactgggtaacggcggtgtgaaacgcgctcatgcgttcaaacgccacatcttgactaaaaagaccaccaaaaacaaacgccaattgcgcggtacctctatggtaaacgatcgcgatttggcttctgttgctaaaatgttaccctacgcttaa

SEQ ID NO: 29640 - DNA, 360 bp, Neisseria meningitidis
atgccacgcgtaaaacgcggtgttaccgcccgtgcccgtcaccaaaaaatcttcgcgttagccaaaggctaccgcggccgtcgtaaaaacgtttaccgcgttgccaagcaggcggtaatgaaagccggccaatacgcataccgcgaccgccgccaacgcaaacgccaattccgtcaattgtggattgtccgtatcaatgcaggtgcgcgtgaaaacgggttgtcttacagcaaatttatgaatggtctgaaacgcgcctctatcgaaatcgaccgcaaagtattggctgatttggccgtgttcgataaagccgcttttgcacaattggttgaaaaagccaaagctgctttggctgcttaa

SEQ ID NO: 29641 - DNA, 993 bp, Neisseria meningitidis
atggaaaatgtaaaccgcatcgttgcagaaggcattgccgcagtagaagctgcgcaagacttcaacgctctagaacaaatcaaagcccgttatcttggcaaaaccggcgagttgaccggacttctgaaaactttggggcaaatgtcgcctgaagagcgcaaaaccataggtgcgcatatcaatgaatgcaaaaaccggtttcagacggcttttaatgccaaacgcgatgccctcaacgaagccaagctgcaagcccgacttgccgccgaagccctcgacattaccctgcccggacgcgctcaggaaggcggcagcctgcatcccgtaaccctgaccttgcaacgtgtggtcgaactctttcacggaatgggtttcgaagtggcggacgggcctgaaatcgaagacgattttcacaatttccaagccctgaacatccctgcaaaccatcctgcccgtgcgatgcaggatacgttttacgttgaaaacggtgatgttttgcgtacgcacacttccccgattcaaatccgttatatgctcgacaaaaaagagccgcccgtccgcattatcgcccccggccgcgtttaccgcgtggacagcgatgccacgcactcgcctatgttccatcaggcggaaggtttgtgggtggaagagggcgtgacttttgccgatttgaaagcagtgttcactgactttatccgtcgcttctttgaacgcgatgacctgcaagtgcgtttccgtccgtctttcttcccgtttaccgagccttctgccgaaatcgacatcatgggcgaaaacggcaaatggttggaagtcggcggttgcggtatggtacatcctaacgtgttgaaaaacgtcaatatcgaccctgaaaaatataccggtttcgcctttggtattggtctcgaccgcttcgctatgctgcgttacaacgtgaacgacttgcgcttgttttttgataacgatttgaattttttgaagcagtttgtaaaatga

SEQ ID NO: 29642 - DNA, 2364 bp, Neisseria meningitidis
atgcaattctcctactcatggctgaaaacccaagccgataccgaactttcctccgataagctggaacatctgttaacgatgtccggcttggaagtggaagaggctgaaactgccgcgcctgcgtttgcgggcgtggtgattgccgaagtgaaatccgttgaaaaacatcctgatgccgaccgtttgaacgttacccgagtcgatgtgggcacgggtgagttggtgcagattgtgtgcggtgcgccgaatgtgaaagcgggcatcaaagtgccgtgttcgctgccgggtgcggtgttgccgggcaatttcaaaatcaagccgactaaaatgcgcggtgtggtgtcgaacgggatgttgtgttccaccgacgaactcggtctgcccgacgacggtgtgaacggcctgcacattctgcctgaagacgcgcccgtcggtaccaatatccgtgaatacttggatttggacgatacgctgtttacgttgaaaattacgcctaaccgcgctgattgcttgagtgttaagggcattgcgcgcgaagtgtccgcattgacggggtgcgcgttcaggcagcccgaaatccggaaaatgccgtctgaaggcggtaaaacccgggctgtgaaaattgacgcgcctgccgattgcggccgttttatcagccgcgttattgaaaatgtcaatgcgaaagcggctactcccgattggatgaaacaacgtttggagcgcagcggcatccgcagtatttccgtgctggtggacatcggcaattatgtgatgctggaaatcggccagccgatgcacgttttcgatgccgacaaactttccggcagcctgcacatccgccgcgcgcgcgaaggggaaacgctggaatgcctgaacgagaaaaccgtttccctgtctgaaaatacgctggtcgtggcagacgaaaaaggcgcgttgagtttggcgggcttaatgggcggcgcggcgagcgcggtttcagacggcacgcaaaatatcgtgctggaagcggcttggtttgcgcccgaaatcatcgccggcaaatcgcgccaatacggtttcggttcggattcgtcgttccgcttcgagcgcggcgtggattaccgtttgcaggcggatgccattgaacgcgccaccgaattggttttgcagatttgcggcggtgcggcaggagaaatggtggaagcgcaaggcgaattgcctgaagtcaagcaggtcggattgcgtttgggtcgtctgaaaaccgtgttgggcgtggacattccctccgaacaggtggaaaccattttgcaacatttgggtttgcagcccgagaaaacggcggaaggcttccgcgttactgcgccgagcttccgtttcgacattgaaattgaggccgatttgattgaagaaatcggacgcgtttacggctatgaaaacatccccgacgattacacgtcaggccgtctgaaaatgctggaactgcccgaaacacgccgcccgcgttttgccgtttacaacgaaatggcggcgcgcggctaccgcgaagtggtcagctatgcctttgttaacgagcagtgggaacaagattttgccgccaacgccgaccccatccgcctgcaaaacccgctggcggcgcaatatgccgtgatgcgttccacactcatcggcggcttggtggaaattttgcaaaacaacctgaaccgcaaacaaaaccgcgtgcgcgtgtttgaaatcgcccgcgtgttcggcaaaggttcagacggccggtttgtccaaaacgaacgcatcggcggcttgtggtacggcgcggcaatgcccgaacaatggggcgggaaaacgcgcaatgcggatttttacgacatcaaggcagatgtggaaaatctgttgaaaaacaaagcggtcgagttcgttaaaaccggatatcccgccctgcatcccggacgcgccgccaatatcgtttcagacggcaaagtcatcggctttgtcggcgaactgcatccgaaatggctgcaaaaatacgacctgccgcaagcgccgctggtatttgaaatcgatatggcggccgtgttggaatgcgggaaaacgcgctatcgggccgtatcgaaattccagccggtgcgccgcgatttggcgtttgtgatgccggaagctatgagccatgatgatttgctgcttgtcttgaaaggcgcggcaaacaagttggtacaggaaatcagcgtgtttgacgtgtatcgcggcatgggactgcccgaagggatgaagagcgtggcggtcaaagtgattttgcaggatatggaaaacacgctgacggatgaggcggtcgagccgcttatcggaaaactgattggcgcggcaacggcggcaggggcgcggcttcgcagttaa

SEQ ID NO: 29643 - DNA, 1302 bp, Neisseria meningitidis
atgccgtctgaacatcaacacatatcatcattgctcgattttgaccgtacccatctgcttcatccctatacttccatgaccgatccgctgcccgtttatcctgtcaaacgtgcagaaggggtgtttatcgaattggcggacggcacgcggttgattgacgggatgtcgtcttggtggtgtgcgatacacggttacaatcatcctgttttgaatcaggtggttgagacgcagattaagcaaatggcgcacgtgatgttcggcggtttgacgcacgagtcggcggtggaactgggcaagttgttggtcggaattctgccgcaggggctggaccgtattttttatgcggattcgggttcggtttcggtggaagttgcgttgaaaatggcggtgcaataccggcaggcgcggggtctgatggcgaagcagaatattgcgacggtgcggcgcgggtatcacggcgatacttggaacgcgatgtccgtctgcgatccggaaacggggatgcaccatattttcggcagcactctgccgcagcgttattttgtcgataatccgaaaagccgtttcgatgatgaatgggacggggcggatttgcagcctgtccgcgccttgtttgaagcgcatcatgcggatattgccgcctttattttggaaccggtcgtgcagggcgcaggcggcatgtatttttatcatccgcagtatcttcgcggattgcgtgatttgtgcgacgaatttgatatcgtgttgatttttgacgaaatcgctaccggattcgggcgcacgggcaagatgtttgcctgcgaacacgcggaggtcgtgccggatattatgtgtatcggcaagggcttgagcggcggctatatgacgctggcggcagcaatcacttcgcaaaaagttaccgaaacgatttcgcgcggcgaagcgggcgtgtttatgcacggcccgacgtttatggcaaacccgctggcgtgtgccgttgcctgcgcttcggtcaaactgcttttgtctcaagactggcaggcaaatatccgccgcattgaaagcatcttaaaaggccgtctgaaagccgcgtgggatattcgcggcgtgaaagacgtacgcgttttgggtgcaatcggcgtgatcgagctggataaaggcgtggatatggcgcgttttcaagcggactgcgtggcgcagggcatttgggtgcgcccattcggcaggctggtgtacctcatgccgccttacatcatttcagacggcctcttgaccgaacttgccgacaaaaccgtacaaatcttgaaggaacacagcaaatga

SEQ ID NO: 29644 - DNA, 450 bp, Neisseria meningitidis
atgagccttatcggcgaaattttgcctttgtcccatattgttttggatatggaggtgggcagtaaaaaaaggctgtttgaggaagcgggcctgcttttggaacgcgaatcctcattgtcccatgctgatgttttcgaatgtctttttgcccgtgaaaaactcggttcgactggtttggggcagggcgttgccatcccgcacggccgtcatgccggcgtgaagcaggcgacgggcgcgttcatccgcacgcgcgaacccgtcggatttgacgcaccggacggcaaaccggtttccctggtttttatcttgctggttccggaaaatgcgacgggtgagcatttggaagtcttatccaaactggccggcaagttttcccaaaaaagcatcagagaatcgctgatgacggtttcttctgcggaagaagcccgcgccatcctgaccgaagaataa

SEQ ID NO: 29645 - DNA, 963 bp, Neisseria meningitidis
atgcccagtatctctgtccgccgactgtttgacgacaaccaatacaaactgcaactcgcctgggccgccggcaattcgggtgcggacaaccgtatcggcgtagaggcggacaagcccgtcctcgccttggtcggacacctgaatttcatccatcccaaccaaatccaagtggtcggtttggcagagtcggaatatctgaaccgtctcgaatcgggggaaacgggttatcagttcggagacctgttcgacatttctatgtctttggtcattgtggcaaacggcttgccggtttccccgggactgcgcgactactgccataaaaacgatattccactgctgacttccaaactcgaaagcccctatctgatggatgtgttgcggatttacctgcaacgcaccctggcggcatcgtccgtcaaacacggcgtatttctcgatgtgtttgaaatcggcgtgctgattaccggacattcgggtttgggtaagagcgaattggcattggaactgatttcgcgcggccacagcctgattgccgacgatgcggtcgagctgttccgcatcggcccggaaacattggaaggacgttgttcgcctatgctgcgcgattttttggaagtacgcggcttggggatactcaatatccgccatattttcggcgaaacttccatccgccccaaaaaaatcctgcaactcattatcaatttggtcgaggcggacgacgagtatatgaagcagcttgaccggttgagcatccgcaccgaaaccgaatccatcctcaacgtcaacgtccgttcggttacgctgcccgtcgccgtcggacgcaacctcgccgttttggttgaggcggcggtacgcaattatattcttcagttgcgcggtaaggatagtacgcgcgaatttttggaacgtcatcagacgcagcttaaagaaaacgagcaacacaatgaaaatcgtcctgattag

SEQ ID NO: 29646 - DNA, 855 bp, Neisseria meningitidis
atgaaaatcgtcctgattagcgggttgtccggttcgggcaaatccgtcgcactgcgccaaatggaagattcgggttatttctgcgtggacaatttgcctttggaaatgttgcccgcgctggtgtcgtatcatatcgagcgtgcggacgaaaccgaattggcggtcagcgtcgatgtgcgttccggcatagacatcggacaggcgcgggaacagattgcctctctgcgcggactggggcacagggttgaagttttgtttgtcgaggcggaagaaagcgtgttggtccgccggttttccgaaaccaggcgaggccaccctctgagtaatcaggatatgaccttgttggaaagcttaaagaaagaacgggaatggctgttcccgcttaaagaaatcgcctattgtatcgacacttccaagatgaatgcccaacagctccgccatgcagtccggcagtggctgaaggtcgaacgtaccgggctgctggtgattttggagtccttcgggttcaaatacggtgtgccgaacaacgcggattttatgttcgatatgcgcagtctgcccaacccgtattacgatcccgagttgaggccttacaccggtatggacaagcccgtttgggattatttggacggacagccgcttgtgcaggaaatggttgacgacatcgaaaggtttgttacgcattggttaccgcgtttggaggatgaaagcaggagctacgttaccgtcgccatcggttgcacgggaggacagcaccgtttggtctatattgtcgaaaaactcgcccgaaggttgaaagggcgttatgaattgctgatacggcacagacaggcgcaaaacctgtcagaccgctaa

SEQ ID NO: 29647 - DNA, 942 bp, Neisseria meningitidis
atggcaatccaatggtttcccggccatatgaacaaggcgaaaaaagccatcgccgagcgtgcaaaaagcgttgatatggtgattgaaatgctggacgcgcgtatgcccgcctccagcgaaaaccccctgcttgcccagctttccaaaggtaaacccaaacttaaaatcctcaacaaacaagatcttgccgaccccgagcgcaccaaaatctggctcgaacactataacagccgccccgacacctgcgccatcgccctcgattcctccgaaacaggcgcacacggcaaaattacccaagcctgtcgtgccatgattccccaccgccaaggcatagataaacccctgcgcgtcctcatctgcggcatccccaacgttggcaagtccaccctcatcaacggcatgataggcaaaaaatccgccaaaaccggcaacgaacccggcatcaccaaagccgaacaacgcctcttcctcgccgatgacttctggctgtacgacacccccggaatgctgtggccgaaaatcattgtcgaagaaagcggctacaacctcgccgccggcggttcagtcggacgcaacgcattggacgaagaagaagtcgccctcgaacttttagactacctccgccgccactacctccctatgctgcaagaacgctaccaagccgacaaagaccccagcagccactgggacgaaaacgtttggctcgaatggatagccaaaaaacgcggcgcagtcctcagcggcggacggatcaactaccaaaaagccgccgaaaacatcctcaccgacttccgtgaaggcaaaatcggcagaatcaccctcgaaacgccgaaccaatgggaaacttggctcaaaaaagcccgtcagaaagaagccgaactcaaagccatacgcgaagccagaaaagcagagcgtaaagggcagaagccttcggaagcataa

SEQ ID NO: 29648 - DNA, 738 bp, Neisseria meningitidis
atgggcggacagaaaacgcatttcgggttcagcacggtcaacgaagatgagaaagccggaaaagtggcggaagtgttccactccgtcgccaaaaactacgacattatgaacgatgtgatgtcggcagggctgcacagggtgtggaagcatttcaccatcaacacggcgcacctgaaaaaaggcgataaagtgttggacattgcgggcggtacgggcgatttgtcccgagggtgggcgaaacgcgtcggcaaggaaggcgaggtttggctgaccgatattaattcttctatgctgaccgtcgggcgcgaccgtcttttgaacgaaggcatgattttgcccgtgtcgcttgccgatgcggaaaaactgcctttccctgacaattatttcaacttggtttccgtggcgttcggcttgcggaatatgacgcataaagatgccgcgctgaaagagatgtaccgtgttttgaaacccggcgggacattgctggtattggagttttccaaaatctacaagccactcgaaggcgcgtatgatttctattcgttcaagctgctgccggcgatgggcaggctgattgcgaaagatgcggagagttaccagtatcttgccgaatccatccgtatgcaccccgatcaggaaactttgaaacagatgatgctggatgcgggcttcgacagcgtggattatcacaatatgagtgcgggcatcgtcgcgctgcataagggcgtgaaattttaa

SEQ ID NO: 29649 - DNA, 495 bp, Neisseria meningitidis
atgaacaacagacattttgccgtcatcgccctgggcagtaatcttgaaaaccctgcccaacaggtacgcgccgcattggacacgctgtcgtcccatcctgacatccgtcttaaacaggcttcctcactgtatatgaccgcgcccgtcggttacgacaatcagcccgatttcgtcaatgccgtctgcaccgtttccaccaccttggacggcattgccctgcttgccgaactcaaccgtatcgaagccgatttcggacgcgaacgcagcttccgcaacgcgccgcgcacattggatttggacattatcgactttgacggcatctccagcgacgacccccgactcaccctgccgcatccgcgcgcgcacgaacgcagtttcgtcatacgccctttggcagaaatcctccctgattttattttgggaaaacacggaaaggttgccgaattgtcaaaacggctgggcaatcaaggcatccgtcttttaccggataagtaa

SEQ ID NO: 29650 - DNA, 375 bp, Neisseria meningitidis
atgcagtatctgattgtcaaatacagccatcaaatcttcgttaccatcaccattttggtattcaacatccgtgttttcctactttggaaaaatccagaaaagcccttggcgggcttttggaaggcactgccccaccttaacgacaccatgctgctgtttacgggattgtggctgatgaaaattacccatttctccccgttcaacgcgccttggctcggtacaaaaatcctgcttctgctcgcctatatcgcattgggtatgatgatgatgcgcgcccgtccgcgttcgaccaagttctacaccgtttacctgctcgccatgtgttgcctcacctgcatcgtttaccttgccaaaaccaaagtcctgcctttctga

SEQ ID NO: 29651 - DNA, 876 bp, Neisseria meningitidis
atggaagaaggtttgatcgacaggctgcttgaaacgctgtggttggacaggcggctcaatcagaatactttaaacggttaccggcgcgatttggaaaaaatcgcccgccgcctgtcccaatcgggcagaatgctgaaggatgcggacgaagcggatttggcggcggcggtttatgttgacggagagcaacggagttcgcaggcgcgcgcattatcggcatgcaaacgcctgtatatatggatggagcgtgaaggcataaggacggacaatcccacccgtttgctgaaaccgcccaaaatcgacaagaatattccgaccctgattacagaacagcagatttcccgactgcttgccgcaccggataccgacacgccgcacggtttgcgggacaaggccctgcttgaattaatgtacgcgaccggcttgcgcgtcagcgaggcggtcgggctgaacttcggcaatgtggatttggacaggggctgtattaccgcgctgggcaagggcgacaagcagaggatggtcccgatggggcaggaatcggcgtattgggtgggacgctattacacggaggcgcgtccggccttgttgaagggcaggagttgcgatgccttgtttgtcagtcagaaaaaaacaggtatttcccgtcagttggcatggatgattgtcaaagaatatgcaagtcaggcaggcatcgggcacatcagcccgcacagcctgcgccatgccttcgccacgcacttggtgcagcacggattggatttgcgcgtggttcaggatatgttgggacatgccgatttgaatacgacgcagatttatacccatgttgccaatgtatggttgcagggtgtagtgaaggaacaccattcccgaaactga

SEQ ID NO: 29652 - DNA, 2121 bp, Neisseria meningitidis
atgttcgacaaacacgttaagaccttccaatacggtaatcagaccgttactttggaaaccggcgaaattgcccgccaagccgccgctgccgttaaagtctctatgggcgacaccgtggttttggttgccgttaccaccaacaaagaagtgaaagaaggccaagacttcttccccctgaccgtcgattatttggaacgcacttacgccgcaggtaaaatccccggcggtttcttcaaacgcgaaggcaaacaaagcgaaaaagaaatcctgaccagccgtctgatcgaccgcccgattcgtccgctgttccccgaaggtttctaccacgacatccaaatcgtagcgatggtcgtgtccgtcgatcccgaaatcgattccgacattcctgcaatgttgggcgcgtctgccgcgctggtgttgagcggcgtaccgtttgccggtccgattggtgcggcacgcgtgggttatataaacggcgtgtacgttttgaacccgactaaagccgaattggcgaaatcgcaattggacttggtggtcgccggtacttcaaaagccgtgttgatggtggaatccgaagccaaaatcctgcccgaagacgtgatgctgggcgcggtggtttacggccacgatcaaatgcaggttgccatcaatgcaatcaatgaatttgccgacgaagtcaatccggaactttgggattggaaagcacctgaaaccaatgaggaactggttgccaaagtccgcgggattgccggcgaaaccattaaagaagcgttcaaaatccgtcaaaaacaagcgcgttctgccaaattggacgaagcttggagtgcggtaaaagaagccttgattaccgaagaaaccgacacgctggcagccaacgaaatcaaaggcattttcaaacacttggaagccgatgtcgtccgcagccaaattttggacggccaaccgcgcatcgacggccgcgacacccgcaccgtccgtccgctgaacatccaaaccggcgtattgccgcgcacgcacggttccgcattgtttacccgtggcgaaacccaagcccttgccgtagcgactttgggtacttcgcgcgacgagcaaatcatcgacgcgctgtccggcgaatacaccgaccgctttatgctgcactacaactttccgccgtactctaccggcgaagtgggccgcatgggcgcgccgaaacgccgtgaaatcggtcacggtcgtttggctaaacgtgcattgttggccgtattgccgaaacctgaagatttcagctacaccatgcgcgtggtctccgaaattaccgaatccaacggctcttcctctatggcttccgtctgcggcggctgcttgagcctgctgtccgccggcgtgcctttgaaagcacacgttgccggtatcgcgatgggtctgattctggaaggcaataagtttgccgtcctgaccgacattttgggcgacgaagaccacttgggcgatatggactttaaagtggctggtacgaccgaaggcgttaccgcgctgcaaatggacatcaaaatccaaggcattaccaaagagattatgcaaatcgctttggcgcaggccaaagaagcgcgtctgcacatcttggatcagatgaaagccgccgttgcgggcccgcaagagctgtccgcacacgcgccacgcttgttcacgatgaaaatcaaccaagacaaaatccgcgaagttatcggtaagggcggtgaaaccatccgtgcgattaccgctgaaaccggtacggaaatcaatattgccgaagacggtacgattaccattgccgcaaccactcaagaagccggcgatgcggcgaaaaaacgcatcgagcagattactgccgaagtggaagtgggcaaagtgtacgaaggcactgtggtgaaaatcctcgacaacaatgtcggcgcgattgtcagtgtgatgccgggcaaagacggtttggtacacatcagccaaatcgcccacgagcgcgtacgcaatgtcggcgactacctgcaagtcggtcaggtggtgaacgtgaaagcattggaagtggacgacagaggccgtgtccgtctgtccatcaaagccctgctggacgcgcctgcccgtgaggaaaatgccgccgagtaa

SEQ ID NO: 29653 - DNA, 669 bp, Neisseria meningitidis
atgaaccacgacatcactttcctcaccctgttcctactcggtttcttcggcggaacgcactgcatcggtatgtgcggcggattaagcagcgcgtttgcgctccaactccccccgcatatcaaccgcttttggctgatcctgctgcttaacacaggacgggtaagcagctatacggcaatcggcctgatactcggattaatcggacaggtcggcgtttcactcgaccaaacccgcgtcctgcagaatattttatacacggccgccaacctcctgctgctctttttaggcttatacttgagcggtatttcttccttggcggcaaaaatcgagaaaatcggcaaaccgatatggcggaacctgaacccgatactcaaccggctgttacccataaaatccatacccgcctgccttgcggtcggaatattatggggctggctgccgtgcggactagtttacagcgcgtcgctttacgcgctgggaagcggtagtgcggcaacgggcgggttatatatgcttgcctttgcactgggtacgctgcccaatcttttggcaatcggcattttttccctgcaactgaaaaaaatcatgcaaaaccgatatatccgcctgtgtacgggattatccgtatcattatgggcattatggaaacttgccgtcctgtggctgtaa

SEQ ID NO: 29654 - DNA, 933 bp, Neisseria meningitidis
atgaaaattgcaaacagcatcaccgaactaatcggcaacacgcctttggtcaaactgaaccgtctgaccgaaggtttgaaggcggaggttgccgtgaaactggaatttttcaatccaggcagcagcgtcaaagaccgcattgccgaagcaatgatcgagggtgccgaaaaagcgggcaaaatcaacaaaaacaccgtcattgtcgaagcaaccagcggcaatacgggtgtcggtttggcaatggtatgtgccgcacgcggctacaagctggcgattaccatgccggaaagcatgagtaaggagcgcaaaatgctgttgcgcgcgtttggtgcggagctgattctgacccctgccgccgaaggtatggcgggcgcgattgccaaagcgaaatccttggtggacgcgcatcccgacacttattttatgccgcgccagttcgacaatgaggcaaaccccgaagtccaccgcaaaacaaccgccgaggaaatttggcgggatacggacggcaaagtcgatgtcttcgttgccggcgtcggcacgggcggtacgattaccggcgtgggcgaagtgttgaaaaaatacaaacccgaagttaaagtggttgccgtcgagcctgaagcttcacccgtattgagcggcggcgaaaaaggcccgcacccgattcaaggcatcggcgcaggctttattccgaccgttttgaataccaaaatttacgacagcattaccaaagtgtcgaacgaagcggcttttgaaaccgcccgcgcaatagcggaaaaagaaggcattttggtgggtatttcttccggtgcggcggtttggagtgcgttgcagcttgccaaacagcctgaaaacgaaggcaagctgatagtcgtgctgctgccttcttatggcgaacgctatctctctacgccactttttgcagatttggcataa

SEQ ID NO: 29655 - DNA, 879 bp, Neisseria meningitidis
gtgtttgccgctttgtccctgtttatgagctttaccgccgttttcctgattttcgttgtattgtgcggtacggcttggggggtatacaaataccgcctgaagactcatcccgaaatctcggaaagcagccacttcggcgattatttcggcagtttcttccctaccgttttggtattgttcctcatccggtcgtttattgccgaaccgttccaaatcccgtccagctcgatgcgcccgggcctgattaagggcgatttcattttggtcggcaaattttcctacggcctgcgcgtacccgttttaaacaatgtattcatccccacgggcaaaatcgaacggggcgatgtggtcgtttttaattatcctttgcaaccggagatgacctacatcaagcgtattgtcggcattccgggcgatgtggtcgaatatcggaataaagttttgacggtaaacggaaaacctgcttccgatattcctgacggcacataccgttatcccgacgacaccgacccatccgaaatccacaatacggatatgttccacagcggtttggacggcaaatccttcaatattctgaaaaaagaaggacagcctgccgtttccctgcccgtattgggcaaatatacctccgatattatgtctgaaaacggatattccatagagcaaagcggtttggaacactgccaatatgccgacgacggcagcggtttcgtgtgcaaagttcccgaaggacgctatttcgctatgggcgacaaccgcgacaacagtgccgattcgcgctactggggatttgtggatgacaagctggttgtcggcaaggcaatgttcattttgatgaacttcggcgatttcggcagggccggtacggcaatccgttag

SEQ ID NO: 29656 - DNA, 702 bp, Neisseria meningitidis
atgtctttgaaaacagtagccgttatcggcgcaatggaacaagaaatcgagcttttgcgcgagatgatggaaaatgtcaaagccgtctctttcggcaagtttgccgcctatgaaggcgaattagcgggaaaacgcatggtgcttgcattgagcggcatcggcaaggtcaacgcggcggttgcaacggcttggattatccgtgaattcgcaccggactgcgttatcaacaccggcagcgcgggcggcttgggcaagggtttgaaagtcggcgatgtcgtggtcggcacagaaatcgcgcaccacgatgtcgatgtaaccgcattcggctatgtttggggacaagtgccgcaactgcccgccgtatttgtttcagacggcctcttggtcggcaaagcaaaacaggcggcggaagtgtttgaaggcgcggcggtagaacaaggcctgattgtcagcggcgaccgcttcgtccacagcagcgaaggcgtggcggaaatccgcaagcacttccccgaagttaaggcggtagaaatggaagcggcggcaatcgcccaaacctgtcatcagttggaaacgcctttcgtcatcatccgcgcggtttccgattcggcagacgaaaaggcagacatcagctttgacgagttcttgaaaacggcggcggcaaattccgcaaaaatggtggcagaaatcgtcaaatctttataa

SEQ ID NO: 29657 - DNA, 978 bp, Neisseria meningitidis
atgatttatccgtggcatcaggaacaatggcggcagattgccgagcattggacgagccgtcccaatgcgtggctgtttgtcggcaaaaaggggacggggaagactgcgtttgcccgctttgcggcgaaggcgctgttgtgcgaaaaacccgtgacgggcaatgtgccttgcggggaatgcgcgtcctgccatttgttcgagcagggaagtcatcccgatttttatgaaatcacccccctgacggacgaacgggaaaacggacgcaaactgttgcaaatcaaaatcgatgccgtcagggaaatcatcgataatgtgtatctgacttcggtacggggcggtttgcgcgtgatcctgattcatcctgcggaaagtatgaatgtccaagccgccaacagtttgttgaaagtgttggaagagccgccgccacaagtggtctttttgctggtcagccacgcggcggacaaggttttaccgaccattaaaagccgctgccggaagatggttttgcctgcgccttcgcatgaggaagcatcggcgtatctgcgcgaaaggggcgtggcggagccggaagaatttttggctttccattcgggcgcgccgctgtttcaggaggaagacgggcttcgtgaattgagggcaaagctgctggatattttggcagaaccgaggttgttgaagattttggactacgccgcgcttttcgataaggagaaacttccgctcgccgtatttgtcgggtggatgcagaagtggctggtcgatttgggattgtgcctgcaacacatgaaacccgtctattatcccgcttatgaagacaggctgcttcagacggcatccggtttccgcccgcgcaatgtatttgcggcggaggatatgctcaaacagcttgccccttacggggttcatactttaaatgtcaaaatgcagatcgagcatctgctcatcaattatttggaatggaagaaagagaacgggtga

SEQ ID NO: 29658 - DNA, 780 bp, Neisseria meningitidis
atgcatatcatcgattcgcactgccacctcaattttgaaggtttgaaagaacgcctgcccgaagttttgtccaacatggaagcaaacggcgtggggcaggcgcttgctatcagcgtcagtagggaaagcttctccgaagtctttgccgtcgccgaagcgcacgaacacatctattgcaccataggcgtacatcccgacagcagggaagccgaagaattttccattgcggaaatggtcgaagccgccgcccatccgaaagtggtcggcatcggcgagacgggtttggattattactggtgcaaaggcgatttgtcttggcagcacaaacgctttgcagaccacatcgaggcagccaatcaaaccgggctgcccgttatcgtccatacgcgcgatgcggcggcggacaccttggcgattttgaaagaatgtaaaaccaattcgggtgtgatccactgtttttccgaagacacagcctttgcccgtgcagcaatggatttggggctttatatttctttctcaggaatcgttacgtttaaaaacgcacccttggttcaggaggcggcaaaatacgttccggacgaccgcattttggtggaaaccgatgcgccgttcctcgcccccgtacccaagcgcggcaggcagaacgagccggcttttgtgcgccataccgcagagcatatcgccaaattgcggaaccagaccttggaacaggttgcggcatacacgacggaaaacttttaccggctgtttaaaaaagtacccgatatgcgggccgtctga

SEQ ID NO: 29659 - DNA, 627 bp, Neisseria meningitidis
atgaacgttaacgttatcaaccatccgctcgtccgccacaaattaaccctgatgagggaggcggattgcagcacctacaaattccggacgcttgccaccgagctggcgcgcctgatggcatacgaggcaagccgtgattttgaaatcgaaaaataccttatcgacggatggtgcggtcagattgaaggcgaccgcatcaagggcaaaacattgaccgtcgttcccatcctgcgtgcaggtttgggtatgcttgacggcgtactcgacctgattccgactgccaaaatcagcgtagtcggactgcagcgcgacgaggaaacgctgaaacccgtttcctacttcgagaaattcgtggacagcatggacgaacgtcctgccctgattatcgacccgatgctggcgacgggcggttcgatggttgccaccatcgaccttttgaaagccaagggctgcaaaaacatcaaggcactggtgctggttgccgcgcccgagggtgtgaaggcggtcaacgacgcgcatcccgacgttacgatttacaccgccgcgctcgacagccacttgaacgagaacggctacatcatccccggcttgggcgatgcgggcgacaagattttcggcacgcgctaa

SEQ ID NO: 29660 - DNA, 1380 bp, Neisseria meningitidis
atggcaaaaacgcttaaaaccctttaccaatgcaccgaatgcggcggcacttcgccgaaatggcaaggcaaatgcccgcattgcggcgagtggaacacgcttcaagaaagcttagccgcgcccgagccgaaaaacgcccgcttccaatcttgggcggcggatacctcgaccgtccaatccctctccgccgttaccgctgccgaagtgccgcgcaacccgaccggcatgagcgaactcgaccgcgtattgggcggcggtttggtcgatggcgcggtcatcctgctcggcggcgatcccggcatcggcaaatccacgctgttgttgcaaaccatcgccaaaatggcgcaaagccgcaaagtgctgtacgtttccggcgaggaatccgcccaacaagtcgccctgcgcgcgcagcgtttggaactgcccaccgaaggcgtgaacctgcttgccgaaatccgcatggaagccattcagacggccttgaaacagcatcagcccgaagtcgtggttatcgattccatccaaaccatgtattccgaccaaatcacttccgcccccggctccgtgtcgcaggtgcgcgagtgtgcagcccaactgacgcgcatggcgaaacagatgggcatcgccatgatactggtcggacacgtgaccaaagacggcgcgattgccggcccgcgcgtgctggaacacatggttgataccgtgctgtatttcgagggcgaccaacattccaactaccgcatgatacgcgccatcaaaaaccgcttcggcgcggcaaacgaactgggcgtgttcgcgatgacggaaaacggtttgaaaggtgtgtccaacccgtccgccatcttccttgccagctaccgcgacgacacgcccggttcgtgcgttttggttacgcaggaaggcagccgaccgcttttggttgaaattcaggcattggtcgatgacgcgcacggattcacccccaaacgccttaccgtcggactggaacaaaaccgcctcgcgatgctgctcgccgtgttaaaccgacacggcggcatcgcctgtttcgatcaggatgtgttcctcaacgccgtcggtggcgtgaaaatcggcgaaccggcggcggatttggcagtcatcctcgcgatgctttccagcttccgcaaccgcccgctgcccgaaaaaatggttgcatttggagaaatcggtttgagcggtgaagtccgccccgtcgcgcgcggacaagagcggctcaaagaagcggaaaaactcggcttcaaacgcgccatcgtcccaaaagccaatatgccgcgcaacgtcaaagagtttccgaacctgaaaatctacggcgtttcgagtttgcaggaagccatcgatatttgccgcgacagcagggaataa

SEQ ID NO: 29661 - DNA, 1968 bp, Neisseria meningitidis
gtggggaacacctttaaatcaatccttgtctgggtcgccttgggtatcggcctgatggctgcgttcaacgctttagacggtaaaaaagaagacaacgggcaaatcgaatattctcagttcatccaacaggtcaacaacggcgaagtatccggcgtcaacatcgaaggatccgtcgtcagcggctacctgattaagggcgagcgcaccgacaaaagcaccttcttcaccaacgcgcctttggacgacaacctgattaaaacactgctcgacaaaaacgtccgtgtaaaagtaacgccggaagaaaaaccgagcgcgctggctgccctgttttacagcctgctgcccgtcctgctgctgattggcgcgtggttctactttatgcgtatgcagacgggcggcggcggaaaaggcggcgcattctcattcggcaaaagccgcgcccgcctactggacaaagatgccaacaaagttacctttgccgatgtcgccggctgcgacgaagccaaagaagaagtgcaggaaatcgtcgattacctcaaagcgccgaaccgctatcaaagcctgggcgggcgcgtgccgcgcggcatcctgctggcgggcagcccgggtacgggtaagacgcttttggcgaaagcgattgcaggcgaagccggcgtgccgttcttcagcatttcaggttccgactttgtcgaaatgttcgtcggtgtcggtgcaagccgcgtccgcgatatgttcgagcaggcgaagaaaaacgccccctgcatcatctttatcgacgagattgacgcagtcggccgccaacgcggcgcaggtttgggcggcggtaatgatgagcgcgagcaaacattaaaccaattgttggttgaaatggacggttttgagagcaatcagactgtaattgtgattgcggcaaccaaccgccccgacgtactcgatcctgcgctgcaacgccccggccgtttcgaccgccaagtggttgtccccctgccggacatccgggggcgcgaacagattttgaacgtccactctaaaaaagtgcctttggacaaatctgtggatttattgtccctcgcgcgcggcacgccgggtttttccggcgcggatttggcgaacttggtcaacgaagccgccctgtttgccggccgccgcaataaagtcaaagtcgatcagagcgattttgaagacgccaaagacaaaatctatatgggtccggaacgccgcagtatggtgatgcacgaagacgaaaaacgtgcgacggcgtatcacgaatccggacacgcgattgttgccgaaagcctgccctttaccgaccccgtccacaaagtaaccattatgccgcgcggacgtgcgctgggtctgacttggcagcttccggagcgcgaccgcatcagtatgtataaagatcagatgttgagccagctctccatcctgttcggcggacggattgccgaagacatcttcgtcggacgcatctccaccggcgcatcaaacgactttgaacgcgcaacccaaatggcgcgcgaaatggtaacgcgctacggcatgagcgacaaaatgggcgtgatggtttatgcggaaaacgaaggcgaagtcttcttgggacgcagcgtaacccgttcgcaaaacatttccgagaaaacccagcaggacatcgatgcggaaatccgccggattttggacgagcagtatcaggttgcctacaaaatcctcgatgaaaaccgcgacaagatggaaacgatgtgcaaagccctgatggaatgggaaaccatcgaccgcgatcaggtactggaaatcatggcgggcaaacaacccagcccgcccaaagattacagccacaacctgcgcgagaatgcggacgcggcggaagataacgcgccgcacgctccgactcgggaagaaaccgaagcacctgccccggcagacaccgcttcgacagagtccgagcagcagcctgaaaacaaggcttaa

SEQ ID NO: 29662 - DNA, 1017 bp, Neisseria meningitidis
atgattggagggcttatgcagtttccttaccgcaatgtttcggcttcgcgtatgcgccgtatgcgcagggacgatttttcacgccgcctgatgcgcgagcatacgctgactgccgatgatttgatttatccggtgttcgtattggaggggtcggcgcgcgaggaggatgtgccttctatgccgggcgtgaagcgtcagagtttggacaggctgctgtttacggcggaagaggcggtaaagctcggtattccgatgttggcactgttccccgtggttacggcaaacaaaaccgagcgtgcgcaggaggcgtacaatcccgaaggactcgtgccgtcaactgtccgcgccttgcgcgagaggtttcccgaactgggcattatgacggatgtcgcgctcgatccttatacggtgcacggtcaggacgggctgacggacgaaaacggttatgtgatgaacgatgaaaccgtagaggttttggtcaagcaggctttgtgtcatgcagaggcaggcgcacaggtcgttgctccttccgatatgatggatgggcgtatcggtgcgattcgcgaggcgttggaggatgccgggcatatccatacgcggattatggcgtattccgccaaatatgcttctgcattttacggccctttccgtgatgcggtaggcagttcgggcaatttgggcaaggcagataaaaagacctaccagatggatccggcaaataccgatgaggcgttgcacgaagtggcgttggacattcaggaaggtgcggatatggtgatggtcaagcccggtttgccgtatttggacgttgtccgccgcgtgaaggacgagttcggcgtgccgacttatgcctatcaggtttcgggagaatacgcgatgctgcaggcggcggttgccaacggctggctggacggcggcaaagtggttttggaaagcctgctggcattcaaacgtgcgggtgcggatgggattttgacctattacgccattgaggcggcaaagatgctgaagcgttga

SEQ ID NO: 29663 - DNA, 774 bp, Neisseria meningitidis
atgaacactattgcagacgtgcaatccagccgagatttgcgcaatctgccgatcaatcaggtcggtatcaaagacctgcgctttccgattaccctgcaaactgcagaaggcatccagtccacagttgcccgtctgaccatgacggtttacctgcctgccgagcagaagggtacgcatatgtcgcgctttgtcgcattgatggagcaacataccgaagccttggattttgcacaattgcgcaggctgactgctgaaatggtcgcgcttttggattcccgcgccggcaaaatcagcgtttctttcccatttttccgcaagaaaaccgccccggtttccggtattcggtccttactggattatgatgtcagcctcacgggcgaaatgaaagacggtgcatacggccacagtatgaaggtcatgattcccgtaacctcgctttgcccgtgttccaaagaaatttcccaatatggcgcgcacaaccagcgttcgcacgttaccgtcagcctgactgccgatgccgaagtcggtatcgaggaagtcatcgattatgtggaggcgcaggcgagctgccaactctacggcctgctcaaacgccccgatgaaaaatacgttaccgaaaaagcctacgaaaacccgaaattcgtggaagatatggtgcgcgatgtcgctacttcgctgattgccgacaaacgcatcaagagtttcgtcgtcgagagcgagaatttcgagtctatccacaaccattcggcttatgcctatatcgcctacccgtag

SEQ ID NO: 29664 - DNA, 891 bp, Neisseria meningitidis
atgaacagcccttttcacaacatcggcatcgtaacccgccccaacacgcccgacatccaagacaccgcacacacgctgattacctttttgaagcagcacggctttaccgtctatctcgacgaagtcggcataaaggaaggctgcatctatacccaagacaccgtcggctgccatatcgtcaacaagaccgaactggggcaatactgcgacctggtcgccgttttaggcggagacggcacctttctctccgtcgcccgcgaaatcgccctgcgcgccgttccgattatcggcatcaaccaagggcatttgggcttcctgacccaaattccccgcgaatatatgacggacaagctattgcccgttttagaagggaaataccttgccgaagagcgcatcctgattgaggccgcactcatccgcgaaggcaaaaccgccgaacgcgccatcgccctcaacgatgccgtcctctcccgtggcggcgccggacagatgattgagtttgaagtcttcgtcaatcgggaattcgtctatacccagcgttcggacgggctgattgtctccacccccaccggatcgaccgcctattcgcttgccgccggcggccccatcatgcaggcaggattgcacgccttcacgctcgtccccatctgcccgcaatccatgaccaaccgccccatcgccattccagacacgtccgaaatcgaaatcctcgttacccaaggcggcgacgcgcgcgtccatttcgacggtcaaacccatatcgacgtgcaaaacctcgaccgcatcaccatccgccgctaccgaaaccccttacgcatcctacatccgaccgactaccaatatttcaaaaccctgcgccaaaaactgcactggggcgaacaattggtctga

SEQ ID NO: 29665 - DNA, 1041 bp, Neisseria meningitidis
atgcaacccatccgataccgaaccgaccttaccccctacaacactttcggcctgcgcgcccaagcccgagcctttattgcgcttgaacacgccgacgggttgcgcgacatcgtccggctacccgagttcaaccgagatactgttttatggctgggcggcggcagcaatatccttttgatggaggactacgccggtctggtcgtacatatggaaaacaaaggcatacgcgaaattgctcgttcagacggcatggttctgattgaagcgcaggcgggcgaaatctggcacgattttgtcctgcacgccgtcgcgctgggtttgaacggtttggaaaacctgagcctgattccgggtacggtcggcgcgtcgcccgtgcagaacatcggcgcatacggcgtagaggcgaaagatgtgattcacagcgtgcgctgcttcgatttggatacggaaacctttgtaaccctttccaatgccgactgccgcttcgcctaccgcgaaagcctgttcaagcaggaaggtaaagggcgttatgtgattgtttcggtcgtatttgcattaaaaacgcattttgtgccgaacttgggttacggcgatttggcggccgccgttgccgaactgagcgcgggcagggtgccgacggcgaaagatgtttccgatgcagtgtgtgcaatccgcaacagtaaacttcctaatcctaacgtgcttggcaatgtcggcagtttctttaaaaaccccgtcgtcagcgcagaaaaagccgccaccttgttgcagcggcatcctgatatgccgcgctatccgcagcccgacggttcggtcaaactcgccgccggctggctgatcgaccaatgtcgtctgaaaggctttcaaatcggcggcgcggcggtacatgacaggcaggctttggtcttagtgaacaaaaacaatgcctcggcaaacgatgtccggcagttggcgcaacacatcaaatttacagtatttgctcggtttcaggtagaattgcacgccgaacccaattggctgcctgcttcgttcagcctgtaa

SEQ ID NO: 29666 - DNA, 1299 bp, Neisseria meningitidis
atggctaaaaatgttgtagtaatcggcgcacagtggggcgacgagggtaaaggtaaaatcgttgactggctggcggaagaagccggaggcgtggtgcgcttccaaggcggccacaatgcgggtcataccttggttgtcggcggcaaaaaaaccattttgcgcctgattccgagcggcatcctgcatgaaagtctggactgcttcatcggttcgggcgttgtcgtctcccccgaagccctgttgggcgaaatcgacgagttgaacgcggcaggcgtgaaaaacgtcgaaggccgtctgaaaatcgcgccgacctgcccgctgatcctgccttatcacatcgcgctcgaccaagcccgagaagcatcgcgcggcaaaggcaaaatcggcacgaccggccgcggcatcggccctgcctacgaagacaaagtggcacgccgcgccattcgcgccgccgatttgctgcatcctgaaaaactgcgtgaaaaactggatgccgtctttgcttattacaacgtccaactgcaacatctgcacaatgccgagtcggtgaaagcggaagacgtgatggcggttatcgaaaaagtcgcgccgcgcattacgccgatgattaccgacgtgtcccgcgtgttgaacgaaaaaaacaaaaacggcgaaaaactgctgtttgaaggcgcgcaaggtgcgttgttggacatcgactacggcacttaccccttcgttacttcgtccaactgcctcgccggcgcggcttcggcaggcgcgggcgtaggccctcaaatgctggattatgttttgggcatcgtcaaagcctataccacgcgcgtcggttcgggcccgttcccgaccgaattgttcgacgaagtcggagcaggtttggcagaacgcggacacgaattcggttcggtaaccggacgcgcacgccgctgcggctggtttgatgccgccgccctgaaacgctccatccaaatcaacggcatttccggtatgtgtattaccaaactcgatgtaatggacggcgttgaaaccatcaatatctgcgtcggctacgaattgcccgacggcggcaaaaccgacatcctgccttgcggctctgatgcggtagaagcctgcaagccgatttacgaaaccatgcccggttggagcgaatccactttcggcgtgaaaagctacgacgcattacctgccaatgccaaagcatatttgaaacggattgaagaagtctgcggtgcgccggtcgccatcgtctccaccggccccgaccgcgaagaaacgattgtgctgcatcatccgttcgcataa

SEQ ID NO: 29667 - DNA, 648 bp, Neisseria meningitidis
atgaaagcattacttttaggcgcgccgggcgcgggcaaaggcactcaggcgcaattcatcaccgccgcgttcggcattccgcaaatctctaccggcgacatgctccgcgccgcgattaaggctggcacgcccttgggtttggaagcgaaaaaaatcattgacgaaggcggcttggtgcgcgacgacatcattatcggcatggtcaaagaacgcatcgcgcaagacgactgcaaaaacggtttcctgttcgacggtttcccgcgcacattggcacaagccgaagcgatggttgaagcaggcgtggatttggatgcagtcgttgaaatcgacgtgcctgacagcgtgattgtcgaccgtatgagcggccgccgcgtgcatttggcttccggccgtacttaccacgttacctacaacccgcccaaagttgaaggcaaagacgacgtaaccggcgaagatttgattcagcgcgacgacgacaaagaagaaaccgtgaaaaaacgccttgccgtttaccacgagcaaaccgaagttttggtcgatttttacagcaaactggaaggcgaacacgcgcctaaatacatcaaagttgacggcactcagccggtagaagccgtgaaagccgaagtattgggcgcattgggcaaataa

SEQ ID NO: 29668 - DNA, 972 bp, Neisseria meningitidis
atgtccgccaagttccaacaagaaaccctcaaatcccgtttcgcgcaagccaaagtcctggttgtcggcgacgtgatgctcgaccgctattggttcggcgatgtgtcccgtatttcgcccgaagcccccgtgccggtggcgaaaatcggacgaatcgaccaacgcgcgggcggagcggcaaatgtcgcgcgcaacatcgcttcgctgggcggcaaagtagggctgttgtcggtaaccggtaacgacgaagccgccgacgcgctcgacgcgctgatggtgcaggacggcgtcgcctcctatctgatgcgcgacaaacaaatcgccaccaccgtcaaactgcgcgtcgtcgcccgcaaccagcagcttatccgccttgattttgaagaacatcccaaccgcgaagtgttggaacaaatcaagcggaaataccgcgaaatcttgcccgaatacgacgcaatcattttttcagactacggcaaaggcggcctgtcgcacatctccgatatgatcgattgggcgaaacacgaaggcaaaaccgtattaatcgaccccaaaggcgacgattacgaaaaatacgccggcgcaaccctgattacgcccaaccgcgccgaattgaaagaagtggtcggcagctggaaaaacgaaaatgatttgaccgaaaaagcccaaaacctgcgccgccacctcgacttgaccgctattttactgacccgaagcgaagaaggcatgaccttgttcagcgaaggcgaacccatttaccagcccacccgcgcccaagaagtttacgacgtatccggtgcgggcgacaccgtcattgccggaatgggcttgggtttggcggcaggctgcaccatgcccgaagccatgtaccttgccaatactgcggccggggttgtcgtggcgaaactcggtacggcggtttgctcgtttgccgaattgaccaaggcattgtcagggcaatcaacaatgtag

SEQ ID NO: 29669 - DNA, 1119 bp, Neisseria meningitidis
atgccggattttcaaagaattactattgaaaacatagagtattttattgtcgatagtattcaaaatttacgtgcggaagatagttttattcacaggaataacaagttatctgtttttggtggtaatggggaagcacgcaaatatgtaggtagttatattgatgatagtggtcgaaaactaagtacattttttgagtatgaaaattgggggattactgagacaaaaaatggaaggagggtagaatatcctctcattcagaaaaattgtttttttaataagaaaaatttacagcgttatttggttgatgcaaaagttgaatatcacaaacaagaacagaaatatcatcatgatatttcaaggttttatgatgattacgttttaagtattaataatctgcctacagaaaatattttcttttcaatccatgatatatcagaccatttggaaaattctaaaggttaccgtaggggttatatccgttcggaggatgatatatggtcaatttggcgtaagattgtattgtccaaaattagttatttatcaattcttaaactattgcctgtcaaagatatagaagattcagaaccattattttatttccgaatatttttggattatcaatttcgctctatcgtgcacccgcaactcttatcaagagaaaaattagaaataccggcttcagaatttaatcaattcgtagagcaagaaatcattaaacagaaaagtagaaaagggcagcagaaatatcgcaaggatgttataaatcatatgccgcaatgtccatttacattaattacagatgagattttgttaagggctagtcatattaaatcttatatggtttgtattactgagaaaaatgagaaagaggcattagattatttaaatgggttagctttaacgccgacttatgattggttgttcgatcaaggttatattactttcttggatgatggtcgtttgatttgcggtactcgactaagccgttacacatgggaaaaacttaatatcaatccaaatgcaaaaaataagatgagaatatatcccgaaggaagagaaaaatatttggaatatcatcgcaaatttgtgtttcaggacaatatcgatgatttcttgtaa

SEQ ID NO: 29670 - DNA, 1545 bp, Neisseria meningitidis
atgatgaccgaaatacaacaacgcgcccaactgcaccgccaaatttggaaaattgccgacgaagtacgcggcgcggtggatggctgggacttcaaacaatacgttctcggcacacttttctaccgctttatcagcgaaaactttaccgactatatgcaggcaggcgacagcagtattgattacgccgctatgccggacagcatcatcacgcccgaaatcaaagacgatgccgtcaaagtcaaaggctatttcatctaccccggccagcttttttgcaatattgccgccgaagcccatcaaaacgaagagctcaacaccaagctgaaagaaatttttaccgcgattgaaagctccgcctccggctatccgtccgaacaagacattaaaggcctgtttgacgacttcgacaccaccagcagccggctcggcagcaccgttgccgacaagaacaaacgccttgccgccgtcctaaaaggcgtggcggaactcgatttcggcagttttgaagaccaccacatcgaccttttcggcgatgcctacgaatacctgatttccaactacgctgccaacgcaggcaaatccggcggcgaatttttcaccccgcaaagcgtatccaagctgattgcgcggctggcggtgcacgggcaggagaaagtaaacaaaatctacgacccagcttgcggctcgggcagcctgctcttgcaggcgaaaaaacagtttgacgagcacatcatcgaagaaggcttcttcgggcaggaaatcaaccacaccacctacaacctcgcccgcatgaatatgtttctgcacaacgtcaattacaacaaattccacatcgaattgggcgacacactgaccaatcccaaactcaaagacagcaaaccctttgatgccgtcgtttccaatccgccctattccatcaactggataggcagcggcgaccccaccttaatcaacgacgaccgctttgcccctgcaggcgtactcgccccgaaatccaaagccgattttgccttcattctgcacgcactgaactacctttccggcagaggccgcgccgccatcgtctcattccccggcattttctatcgcggcggcgcagagcagaaaatccgccaatatctggtggagggcaactacgtggaaaccgtcatcgcccttgcgcccaatctcttttacggcaccggcatcgccgtcaatatactggttttgtccaaacacaaagacaataccgacatccaattcatcgacgcaggcggcttctttaaaaaagaaaccaacaacaacgtcttaaccgaagaacacattgccgaaatcgtcaaactcttcgccgataaagccgatgtgccgcatatcgcccaaaacgccgcccagcaaaccgtcaaagacaacggctacaacctcgccgtcagcagctatgttgaacccgaagacacccgcgaaattatcgacatcaaacagcttaacgccgaaatcagcgaaaccgttgccaaaatcgaacggctgcggcgtgaaattgacgaagtgattgcagagattgaagcatga

SEQ ID NO: 29671 - DNA, 576 bp, Neisseria meningitidis
atgccgtctgaacgcggcggcattctgttaaaatgcgctattggaaaaaattcgagaaccaagatgtttgaacaagaagacgagtggatcagtaaaacccaaatgaaaaagcagatgaacggtttgcaggatttgggtatggaactgaccaagctctcaaacgatacgctgaaaaaaatcggcttggacgaagatttgtacgaagccgtcgttacctataaaaaaattacgtccaacggcgcgctcaagcggcaggcgcaatttatcggcaggctgatgcgcgacacggatcccgcgcccatcgaggcgtttcttgccaagctgcgcggcgacgatgcggcgcacaacgcctttttgcaacgcgtggaacaggcgcgcgtacggctgttggcagacgacggcgcgttgacgcagtttatgtcggattttccgcatgcggacgccggtaaattgcgtaccttgatccgcaacaccaaaaaagagcaggagcaaaacaaaccgccgaaaaatttccgcgccctgtttcaagaattgaaaaccgttatggaaagccaaggcggaacaggggaagcctag

SEQ ID NO: 29672 - DNA, 1701 bp, Neisseria meningitidis
atgtccgtcaaaatccaaacccgatccgtcaataccgacgttttcaatcatttgctcaccgccggcgccgatcctttaatcgcccggctttgtgcctcgcgcggtgtgcaaagtcctgccgaattggacgacaaactcgcttccctcctgccttatcaaacgctgacgaattgcgaagccgccgcccgccgtttggcggatgcggttgagcgtcaggaaaaaatcttgattgtcgccgactacgatgccgacggcgcgaccgcgtgtgccgtcggtttggacggtttggcggcgatgggggcaaaagtagatttcctcgtgcccaaccgctttgaacacggctacggtttaacgcccgagctggccgaaatcgccgccgcgcaaggcgtggatttgctgattacggtcgataacggcattgccagcatcgcaggcgtggcgcgcgcgcaggctctgggtttggatgtcatcgttactgaccaccacttgccggccgagaccgtgcccgactgcatcatcgtcaatccgaaccaaaaaggctgcggttttccaagcaaaagcttggcgggcgtgggcgtgattttttatgtattgatggcgttgcgtgccgaattgcgccgccgcaattatttttcagacggcctaaaagagccgaatctgggcgaccttttggatttggtcgcactcggtaccgttgccgacgtcgtctccctcgatcacaacaaccgtatcctcgtgtcgcaaggtttgaaacggatgcgttcgggcaaaatgcgccccggcatccgcgccttgtttgaagtggcgcggcgcgattggcgcaaggcccagccgtttgatatgggctttgcgttgggcccgcgcatcaacgccgccggacggctggacgatatgtcggtcggcatcgcctgcctgttggcgcgagatgattccgaagctcaggaactggcggctcagttaaacaacctcaatatcgagcgtcgcgaaatcgagcagtctatgctgcaagacgcgctgaatgcttttcctgaaaccctgccttcaggtcagatgactttggtggcgtatcgcgacgacttccatcaaggcgtggtcggcatcgttgccagccgcctcaaagaccgtttttatcgtccgaccatcgtgtttgcgcctgccgacaacggcgaagtacgcggttcgggacgttccattcccaatttgcacctgcgcgatgctttggacttggtgtccaaacgccatcccgatttgattttgaaattcggcggacacgcgatggcggcgggtttgagcatacttgaacacaacattcccgcgtttcagacgacctttgaagaagccgtgcgcgaaatggtgtgcgaagacgatttgtcgcaaaccttcatcaccgacggcagcctgcccgcctgcgacatcacgttggaacaggcgcaaaaccttgcccgtcacgtttgggggcagggcttcgcgccgccgagctttaccgacgagttccacgtcgtccgccagcaacctttgggcgcggagggcaaacacaaaaaagtctggctgcaaaaagacggctgcgaatttgaagcgatgttttggcgttgcagcgaagacattcccgaatacatccgcacggtttaccgccccgttgccaacgaatggcgcaacaatctcgaattgcagctgtatatcgattactgggaagccgcgtag

SEQ ID NO: 29673 - DNA, 1362 bp, Neisseria meningitidis
atgctgaaaaaatggttgaataagatgctgccttccggtcggagcagtaaaaaagcggaaagtaaaacggtcattcctgccgaaagacacaacatccgtgccgaaatgttgagctttgccgccgaaaacgtcatacgccgtctgaaaggggcggggtttcaggcttatgtggtcggcggcgcgatcagggacctgctgctcggcatcgaacccaaggatttcgatgtcgcaaccgatgccatgcccgaacaggtgcacaaactcttccgccgcagccgcatcgtcggcaggcgttttcaaatcgtccatgtgatgaacggtgcggagattatcgaagtaacgacgtttcgcggcggtgcgaaagttcatcagaacgcgcacggcaggattatgaaggacaacacctacggcagcatcgaagaagatgcgatgcggcgcgattttacctgcaatgccttgtattacgatccggaaaaagaagagattttggatttccacaacgggattgccgatgttgccgcccgcaggctggttatgattggcgatgccgccgaacgctatcaggaagaccctgtcaggattttgcgcgccatccgcctgtcgggcaaattgggctttgagctgtcggaagaaaccgccgcaccgattgccgaatcgatatgccgtctgaagcacgaaccggtagcgaggctgttcgacgaaattatgaaactgctgttttcagggcacgcgcgcgagtgtctaaaacgtttgaacggatttgacataccggacgacatccatccgctgctcaatgccttgcgcgtttcagacggcatcgccggaaaaatgacggtgcttgccctgaaaaataccgatgagcggctgcgtgccgacaaatcggtttcggtcggtttcgtactggcggccctgatgtggcccgagttggaacgccattggaaaagcaatctgcaacagggtttgaaacccgtgcccgccctgtccgatgcaatcaatacgatgcgcgaaaccgtcgaacgcggttggggcgtaccgcaacgcttttccgccacgatgcgcgaaatttggatgttccagccgcagtttgaaaaccgcaaaggcgcaaggccgcacaaactgtttgcacaggcgcgtttccgtgccgcctatgatttcctgctcttgcgcgccgaaaccggcaatgcggaccgcgcccttgccgagtggtggacggcgtttcagacggcatcgcaggaacaacggacggagatgaccaaaaacgaagccgccgcccgacacgaaaaaaacgaaggacaggcgaaaaaacgccgccgtcgcaggcgcaaacccaagccgaaggttgtgggaacggattgggaataa

SEQ ID NO: 29674 - DNA, 693 bp, Neisseria meningitidis
atggcagtacctccccccaacatactgggcggaatattcaaccgaccgtttgaacaaagagaaaaaaacaacaaaccgcatttcgtgttctgcaccgtctcgcaccttcgccgtctcaaaggacacgatgtcctactcactgcctttgcccgggcgttggcacaatgcccgcaactgcgcctgaacatcggcggcagcggacaggaagaacagcggctgaaacagcaggcggcagacttgggcattacccatgccgttacatttttgggcgcattgcagcccgaagcagtcttggatttgatgaggaacagcgacgcattcgtccttgccagccgcaccgaaaccttcggcgtggtctatatcgaagcactgtcccaaggattgcccgtcattgcgacacgctgcggcggtgcggaatctattgtttcagacggcaacggatatttggttcctgttgacgacgacgatgcccttgccgacgcactcatcaaaatgtatgaacaccactctgattttgaacctgcccgacttagggaaaactgtctgaacgaatttggcgaaaatgccgttataggcaggttgatcggcattttccgacaggcaatcgcagaatacggtaagaaaataccggtgaaatatagtggattaacaaaaatcaggacaaggcgacgaagccgcagacagtacaaatag

SEQ ID NO: 29675 - DNA, 1458 bp, Neisseria meningitidis
atgaaaccaaccatcgcgcttgtcggccgccccaacgtcggcaaatctactttattcaaccgtttgacgcgcaccaaagacgcactcgtacacgacctgcccggcctgacccgcgaccgccattacggacacggcaaagtcggcagcaaaccttatttggtcatcgataccggcggtttcgagccggttgtggacagcggcattttgcacgaaatggcaaaacaaaccttacaggctgtcgatgaagccgatgcggttgtgtttttggtggacggccgtaccggtctgacgccgcaagataaaatcattgccgaccgtttgcgccaaagcccgcgccccgtttatttggccgtgaataaaggagaaggcggcaacagggccgtgcttgccgccgagttctacgaacttgctttgggcgacccttatgttatttcaggtgcgcacggtgacggcgtgtattatctgattgaagatattttggaaaccttccctgagcctgaaaaagaagaggaagaggcgaaacatcctgtttttgccgttatcggtcgtccaaatgtcggtaaatcaaccttggtaaacgccattctcggcgaagagcgcgtcatcgccttcgatatggcaggtacgacgcgcgacagtatccatatcgatttcgagcgcgaaggcaaaccgtttaccatcatcgataccgcaggtgtgcgccgtcgcggcaaagtggatgaagcagtggaaaaattctccgttatcaaagcgatgcaggcggttgaagcggcaaacgtcgctgttttggtattggacgcgcagcaggacatcgccgaccaagatgcgacgattgcaggtttcgctttggaggcaggccgtgctttggtggtggcggtcaataaatgggacggcatcagcgaagaacgtcgcgagcaagtgaaacgcgatatcaaccgcaaactgtatttcctcgattttgccaagttccactttatttccgcattgaaagagcgcggtatagacggtttgtttgacagcattcaggctgcctacaacgcggcgatgattaagatgccgacgccgaaaatcacgcgcgtcctgcaaagcgcaatcgagcgtcagcaaccgccgcgtgccggcttggtgcgtccgaaaatgcgttatgcccaccaaggcggcatgaaccctcccgtaattgtggtacacggcaattcgctgcacgcgatttccgacagctatacgcgctatctgacccaaacgttccgcaaagccttcaacctgcaaggcacgccgttgcggattcaatacaatgtttcggaaaacccgtatgaaaacgccgacgacaaaccgaagaaaaaaccgctgcgccgcgtcagcctgagcaaccgtattgagaaacgcgaaggccgcaaagaagagaaaaaccgcttcaagaagaaaaccaaagtcagtgtgaaaaaacaattcagcaaataa

SEQ ID NO: 29676 - DNA, 1296 bp, Neisseria meningitidis
atggcacaaaaaatccaatccgtcaaaggcatgaacgaccttctgcctgtcgagcaaaaagatttcaaactgacggctgcgttttggcaggcgtttgaagatacggtcggccgctggacacgcacttacggttatcagcaaatccgtacgccgattgtcgagcaaaccggtttgtttgtccgctccatcggcgaggaaaccgatgtggtcggcaaggaaatgtacaccttctccgattcaaacgattctttgagtttgagcttgcgtcctgaaggtacggcttcctgcctgcgtgcggtggtcgaacacaactttctgtacaacagcccgcaaaagctgtggtatatggggccgatgttccgccgcgagcgtccgcaaaaaggccgttatcgtcagttccatcaggtcggtatcgaggctttgggttttgaagggccggatatcgatgcggaaattatcgcgatgtctgccgacttgtgggaaaaattgggtatccgcgaatacctgactttggaaatcaacagcttgggcaaccgtgaggaacgcgcggcacaccgtgcggcattggttgaatatctgacccgttatgaagataaattggatgaagacagcaaacgccgtctgaaaaccaatcctttgcgcgttttggatacgaaaaaccctgatttgcaggaaatctgcaatgcggcaccgcgtctggtggattatttgggcgaggcttcgcaaaaccactatgcacgcttcaaagcgatgttggacggtttgggtatccaatatattgaaaatccgcgcttggttcgcggtttggattattacaatcaaacggtttttgagtggacgaccgacaaactcggcgcgcaggcaactgtgtgcggcggcggccgttacgacggtttgattgaggaacttggtggtaagcctgcgccgtctatcggctttgcaatgggcatcgagcggctgctgcttttggtgagcgaatacggctcgctggaagtaaacgccgcgcctgatgtctatgcaatgcaccaaggcgaaggggcggacttgcaggtgatgaaatacgcacaagccttgcgcgcgcaaggtttcaatgtgatgcagcattccggctatcagagcctgaaagcgcaaatgaaaaaagccgacaacagcggcgcacgctttgccctgattgtcgcgcaagacgaactggcgaacggtacggttacgctcaaagatatgaacggcgcacacgatcagcaaaccgtcgccgccgctgatttgacaaacactttacaacaatggaagaacgcataa

SEQ ID NO: 29677 - DNA, 870 bp, Neisseria meningitidis
atgaagcgcatctttttgcccgccttgcccgccatcctgcctttatccgcttatgccgacctgcccttgacgattgaagacataatgaccgacaagggcaaatggaaactggaaacttcccttacctacctgaacagcgaaaacaaccgcgccgaacttgccgcaccggtttacatccaaaccggcgcaacctcgtttatccccattccgaccgaaatccaagaaaacggcagcaataccgatatgctcgttggcacgctcggtttgcgctacggactgaccgggaataccgacatttacggcagcggcagctatctgtggcacgaagaacgcaaactcgacggcaacggcaaaacccgaaacaaacggatgtccgacgtatccctcggcatcagccacaccttccttaaagacgacaaaaaccccgccctaatcagctttcttgaaagcacggtttacgaaaaatcgcgcaacaaagcctcgtcgggaaaatcctggctcatcggcgccaccacctacaaagccatcgaccccgtcgtcctctcattgaccgctgcctaccgtatcaacggcagcaaaaccctttcaagcaacaccaaatacaaagcaggcaattactggatgctgaatcccaatatatccttcgccgccaacgacagaatcagcctcacgggcggcatccaatggctgggcaagcagcccgaccgtctggacggcaaaaaagaatccgcaagaaacacatccacctatgcccatttcggcgcaggtttcggtttcaccaaaaccacggctttaaacgcatccgcacgtttcaacgtttcagggcaaagcagttccgaactgaaatttggcgtacagcatacgttttaa

SEQ ID NO: 29678 - DNA, 792 bp, Neisseria meningitidis
atgattactgtgaacacactgcaaaaaatgaaggcggcgggcgagaaaatcgctatgctgaccgcttacgaatccagttttgccgcgctgatggacgatgccggcgtggatgtgctgctggttggggattctttgggaatggcggttcaagggcggcagtcgacgctgcccgtcagcctgcgcgatatgtgttatcacaccgaatgtgtagcacgcggtgcaaaaaatgcgatgattgtcagcgatttgccgtttggtgcatatcagcagagtaaggagcaggcgtttgccgccgccgccgaactgatggctgccggcgcgcatatggtcaaactcgaaggcggtgtgtggatggcggaaacgaccgaatttctgcaaatgcgcggtattccggtctgtgcccacatcggtctgaccccgcaatccgtgtttgccttcggcggatacaaggttcaggggcgcggcggcaaggcgcaggcgttgcttaacgatgccaaggcgcatgatgatgcgggggcggcggtcgtgctgatggagtgtgttcctgcggaactggcaaaaaaggtaactgaatccgtttcctgtccgaccatcggcatcggcgcgggtgtcgattgcgacgggcaggttttggtgatgcacgatatgctcggcattttcccgggtaagacggcgaaattcgtcaaaaactttatgcaggggcaaagcagcattcaggcggcggttcgggcgtatgttgccgaagtcaaagccaaaaccttccctgctgcggaacatatttttgcagactga

SEQ ID NO: 29679 - DNA, 984 bp, Neisseria meningitidis
atggctgcgtacgacagtttgatggtatttacaggcaatgccaatcccgaattggcacaacgtgttgtcaggcatttggacatttctttgggcaatgcttccgtatccaagttttcagacggcgaagttgccgtcgaactgttggaaaacgtacgcgggcgcgatgttttcatccttcagccgacctgtgcgccgaccaatgacaacctgatggaaatcctgacgatggcggatgcactgaagcgtgcttcggcaggtcgtattaccacagccattccgtatttcggctatgcgcgccaagaccgccgtccgcgttccgtccgcgttccgatttctgccaaactggtggcaaatatgctgtattcggcagggatcgaccgtgttttgactgtcgatttgcatgccgaccagattcaaggtttcttcgatattccggtggacaatatttatgccaccccgattctgttgaacgacatcaaacaacagcggattgaaaatctgaccgtcgtcagcccggacatcggcggtgtcgtccgcgcccgcgccgtggcaaaatccttgaatgccgacttggcaatcatcgataaacgccgcccgaaagccaatgtggcagaagtcatgaacatcatcggcgatattcaaggcagaacctgtctgattgtggacgatatgattgacactgcaaatacgctgtgcaaagccgccgtcgccctgaaagagcggggggcggaacgtgttctagcctatgccagccacgctgtattctccggagaggcggtcagccgtatcgcctcatccgaaatcgaccaggtggtcgtaaccgataccattcctttgtctgaagcggctaaaaactgcgaccgtatccgtcaggtaacgattgccggtctgttggccgaaaccgtccgccgcattagcaatgaagaatccgtctcatatcttttcaatgaagaagtgatgacaggcagcatgttgctgccataa

SEQ ID NO: 29680 - DNA, 573 bp, Neisseria meningitidis
atgacttatgaaattcaagcttctgttcgtgaagcacaaggcactggtgcgagccgccgcctgcgtcgcgaaggccaaatccccggcattctgtacggtgaaggtcaagagcctgttgcaatcgctgtggatcacaaaaccgtattctacgcattggaaaaagaatctttccatactgcgttgattaagttgtctctgaacggtgaaaccaaagacgttatcgtccgcgatttccaaatgcacccgttccgccgcgaagttcaacacatcgacttccaagctgtgaaagcagaccaacccgtacgcatccgcgttcccctgcacatcgttaacgctgaaaattcccaagcggtcaaactgcaaggcggccgcgtatctctgttgaacacgactgttgaagtagttgctttgcctgccaacatccctgctttcttggatttggattgtgccgaagtggttgccggcgacattctgcacttgtcagacatcaaactgcctgaaggtgtagaaagcgtttccctgaaacgtaacgaaaatctggctgttgctaccgttaccggtaagaaacgctaa

SEQ ID NO: 29681 - DNA, 1407 bp, Neisseria meningitidis
atgaacgattacacagctatgccgtctgaagaccgtgaggtcggcgcattgtcgctgcctccacattcgatggaggcggaacaatccgttttgggcgggttgatgctggaaaatccggcttgggacaggattgccgatgtggtttcgggagaggatttctaccgccacgaacaccgcctgattttccgatccattgccaaattaatcaatgagagccgtcccgcagatgtgattacggttcaggaagatttgcagcggaacgaagaattggaagcggcaggcggattcgaatatctgattacgctggcgcaaaacaccccgtctgccgccaacatccgccgctacgccgaaatcgtgcgcgagcgttccattatgcgccaactcgccgaagtggggacggaaatcgcccgcagcgcctacaatccgcaaggcagggacgcggggcagcttttggacgaggcggaaaacaaagtattccaaatcgccgaaagcacggccaaatccaagcagggctttttggagatgcccgatttgctgaaagaagtcgtacagcgcatcgatatgctctactcgcgcgacaatcccgatgaagttaccggtgtgtcgacagggttcatcgacctcgacaaaaaaacctcgggtctgcaacccggcgacctgattatcgttgccggtcgtccgtctatgggtaagaccgccttttccatcaatatcgccgaacacgttgccgtagaaggcaagctgccggttgccgtcttctcaatggagatgggcggggcgcaactggtcatgcgtatgctcggctcggtcggacgcttggatcaaagcgttttgaaaaccggcaggctcgaagacgaacactggggtcgtctgaacgaagcagtcgtcaaactctccgacgcgcccgtgtacatcgacgagaccccgggtctgactgcgctcgaactgcgcgcccgcgcccgtcgtctcgcccgtcaatttaacaataagctgggattaatcgtcatcgactacctgcaactgatggcgggatccggccgttccgacaaccgtgcttcggagcttggcgaaatttcacgttcgctcaaagcgttggcgaaagaattgcaagtccccatcatcgccctgtcgcaattgagccgtaccgtcgaatcgcgtaccgacaaacgcccgatgatgtccgacctccgcgaatccggtgctatcgagcaagatgccgacctgattatgttcatgtaccgcgacgaatactacaaccaagactcgcccatgaaaggccttgccgaatgtatcatcggcaaacaccgcaacggtcccgtcggtaaaatcttcctcacatggacggggcaattcaccaaattcgacaatgctgcctatattcccgaggaggcaaagatagaggattaa

SEQ ID NO: 29682 - DNA, 1188 bp, Neisseria meningitidis
atgaataccttactcaagcagctcaaaccctatccctttgcccgactgcacgaggcgatgcagggcatttccgcgcctgaaggcatggaagccgtccccctgcacatcggcgaaccgaaacatccgacaccgaaagtcattacggatgcgctgaccgcctcattgcacgagttggaaaaatatccgctgactgcgggtctgcctgaactgcgtcaggcgtgtgcaaactggttaaaacgccgttacgatggcttgacagtggatgcggataatgaaattctgccggttttaggcagtagggaggcgttgttttcttttgttcaaaccgtgttgaaccctgtttcagacggcatcaaacccgcaattgtcagcccgaatcccttttatcagatttacgaaggtgcgacacttttgggcggcggtgaaatccattttgccaattgccccgcgccgtctttcaaccccgattggcgtagtatttccgaagaggtttggaaacgcaccaaactggtgttcgtctgctcgcccaacaaccccagcggcagcgtgctggatttggacggatggaaagaagtttttgatttgcaggacaaatatggtttcattattgcctcggacgaatgctattccgaaatctatttcgacggcaacaagcctttgggctgcctgcaggccgctgcacagttggggcgaagcaggcaaaaactgcttatgttcaccagtttgtccaagcggtccaatgttccaggcctgcgttccggttttgtcgccggcgatgccgaactgcttaaaaattttctgctttacagaacctatcacggcagcgcaatgagcattcccgtgcagcgcgcaagcattgccgcttgggatgacgaacagcacgttatcgacaaccgccgcctgtatcaggaaaaatttgagcgcgttattcccattttgcaacaggtatttgacgttaaattaccggatgcctcgttttacatctggttgaaagtccccgatggcgacgatttggcatttgcacgcaatttatggcaaaaagccgctatccaagtattgcccggacgctttttggcacgggataccgaacagggcaatcccggggaaggttatgtccgtatcgctttggttgccgatgtcgcaacttgtgtcaaagctgcggaagacatagtttcactgtatcggtaa

SEQ ID NO: 29683 - DNA, 1008 bp, Neisseria meningitidis
atgagcaccttcttccggcaaaccgcacaagccatgattgccaaacacatcgaccgcttcccactattgaagttggaccaggtgattgattggcaaccaatcgaacaatacctgaaccgtcaaagaacccgttaccttcgagaccaccgcggccgtcccgcctacccgctgctgtccatgttcaaagccgtcctgctcggacaatggcacagcctctccgatcccgaactcgaacacagcctcatcacccgcatcgacttcaacctgttttgccgttttgacgaactgagcatccccgattacagcaccttatgccgctaccgcaactggctggcgcaagacgacaccctgtccgaattactcaaactgattaactgccaactgaccgaaaaaggcctaaaaatagagaaagcatccgccgccgtcgttgatgccaccattatccagaccgccggcagcaaacagcgtcaggccatagaagttgacgaagaaggacaaatcagcggtcaaaccacaccgagtaaggacagcgatgcccgttggataaagaaaaacggcctctacaaactcggttacaaacaacatacccgtaccgatgcggaaggctatatcgagaaactgtacatcactcccaccaatgcccatgagtgcacacacctgtcgccgttgttggaaggactgcccaaaggtacgaccgtctatgccgacaaaggctatgacagtgcggaaaaccggcaacatctggaagaacatcagttgcaggacggcattatgcgcaaagcctgccgcaaccgcccgctgtcggaagtgcaaaccaaacgcaaccgatatttgtcgaagacccgttatgtggttgaacagagcttcggtacgctgcaccgtaaattccgctacgctcgggcagcctatttcggactgattaaagtgagtgcgcaaagccacctgaaagcgatgtgtttgaacctgttgaaagcggccaacaggttaagtgcgcccgctgccgcctaa

SEQ ID NO: 29684 - DNA, 447 bp, Neisseria meningitidis
atgcagcacgaagaaggcaaccgccaacgccctcaaggcgaactgctcctgcgtaccgtcgctatgccgcgcgataccaatcccaaccaagacattttcggcggctggattatgtcgcagatggatttgggcggcggcatattggcggcggaaatcgcgcggggacgcatcgttaccgtcgccgttcaggaaatgaacttcatccgcccggtcaaggtcggcaacgtcgtctgctgctacgggcattgcgtccgcgtgggcaacacttccctccagcttaaagtcgaagtctgggtgaaaactttgatgaacgattgcgttaccgaagaccgccacctcgtaaccgaagccgtgttcacttatgtcgccatcgatgcggaaggcaatccgcgcccgattccgaaagaaggcaaccccatattggcgggcttattgcctactccgtaa

SEQ ID NO: 29685 - DNA, 276 bp, Neisseria meningitidis
atgaaaccgaatattcatcctgacaattaccggaccgttctttttttcgacagcagtgccaatgaaggctggctgattcgttcttgcgccgaaacacacggaaaaacgatggtttggacagacggcaaagaatatccactgttttcgctggatacttcttccgcatcccatcccgtctataccggcaaacagcgtaacgtcaataccgaaggccatgccagcaaattcaaccaacgtttccaatccgtcatgtcatcgtttagaaaggacaaataa

SEQ ID NO: 29686 - DNA, 879 bp, Neisseria meningitidis
atgaattacgcaaaagaaatcaatgcgttaaataacagcctttccgatttgaaaggcgacatcaacgtttcgtttgaattttttccaccgaaaaacgagcaaatggaaacgatgctgtgggattccatccaccgtctgcaaaccctgcatcccaagttcgtatccgtaacctacggcgcaaactccggcgaacgcgaccgcacgcacggcatcgtcaaacgcatcaaacaggaaaccggcttggaagcagcaccgcacctgaccggcatcgacgcatcccccgacgaattgcgccaaatcgccaaagactattgggacagcggcatccgccgcattgtcgccctgcgtggcgacgagccgcccggttatgagaaaaaaccgttttacgccgaagacttggttaagctattacgctccgtcgccgacttcgacatctctgtggcggcatatcccgaagtgcatcccgaagccaaatccgcacaagccgatctgattaatctgaagcgcaaaatcgatgcgggtgcaaaccacgtcatcacccaatttttctttgacgtagaacgctacctgcgcttccgcgaccgctgcgtgatgttgggtatcgatgtggaaatcgtccctggtattttgcctgttaccaacttcaagcagctcggcaaaatggcgcaagtaaccaacgtcaaaatcccaagctggctgtcgcaaatgtatgaaggtttggacgacgaccaaggcacgcgcaacctcgtcgccgccagtatcgccatcgatatggtcaaagtcctgtcccgcgaaggcgtgaaagatttccacttctacacgctcaaccgcagcgagctgacttacgccatctgccatattttaggcgtgcgcccttaa

SEQ ID NO: 29687 - DNA, 1764 bp, Neisseria meningitidis
atgggctttcctgttcgcaagtttgatgccgtgattgtcggcggtggtggtgcaggtttacgcgcagccctccaattatccaaatccggtctgaattgtgccgttttgtctaaagtgttcccgacccgttcgcataccgtagcggcgcagggcggtatttccgcctctctgggtaatgtgcaggaagaccgttgggactggcacatgtacgataccgtgaaaggttccgactggttgggcgaccaagatgcgattgagtttatgtgccgcgccgcgcctgaagccgtaattgagttggaacacatgggtatgccttttgaccgtgtggaaagcggtaaaatttatcagcgtcctttcggcggccatactgccgaacacggtaaacgcgcggtagaacgcgcctgtgcggttgccgaccgtacaggtcatgcgatgctgcatactttgtaccaacaaaatgtccgtgccaatacgcaattctttgtggaatggacggcacaagatttgattcgtgatgaaaacggcgatgtcgtcggcgtaaccgccatggaaatggaaaccggcgaagtttatattttccacgctaaagctgtgatgtttgctaccggcggcggcggccgtatttatgcgtcttctaccaatgcctatatgaataccggcgatggtttgggtatttgtgcgcgtgcaggtatcccgttggaagacatggaattctggcaattccacccgaccggcgtggcaggtgcgggcgtgttgattaccgaaggcgtacgcggcgagggcggtattctgttgaatgccgacggcgaacgctttatggaacgctatgcgccgaccgtaaaagacttggcttctcgcgacgttgtttcccgcgcgatggcgatggaaatctacgaaggtcgcggctgcggtaaaaacaaagaccatgtcttactgaaaatcgaccatatcggcgcagaaaaaattatggaaaaactgccgggcatccgcgagatttccattcagttcgccggtatcgatccgattaaagacccgattcccgttgtgccgactacccactatatgatgggcggtattccgaccaactaccatggcgaagttgtcgttcctcaaggcgacgaatacgaagtgcctgtaaaaggtctgtatgcggcaggtgagtgcgcctgtgcttccgtacacggtgcgaaccgcttgggtacgaactccctgctggacttagtggtattcggtaaagctgccggcgacagcatgattaaattcatcaaagagcaaagcgactggaaacctttgcctgctaatgccggcgaactgacccgccaacgtatcgagcgtttggacaatcaaactgatggtgaaaacgttgatgcattgcgccgcgaactgcaacgctccgtacaattgcacgccggcgtgttccgtactgatgagattctgagcaaaggcgttcgagaagtcatggcgattgccgagcgtgtgaaacgtaccgaaatcaaagacaagagcaaagtgtggaataccgcgcgtatcgaggctttggaattggataacctaattgaagtggcgaaagcgactttggtgtctgccgaagcacgtaaagaatcacgcggtgcgcacgcttcagacgaccatcctgagcgcgatgatgaaaactggatgaaacatacgctgtaccattcagatgccaataccttgtcctacaaaccggtgcacaccaagcctttgagcgtggaatacatcaaaccggccaagcgcgtttattga

SEQ ID NO: 29688 - DNA, 249 bp, Neisseria meningitidis
atgatggtttttgacgatattgccaaacggaaaatccgttttcaaacccgccggggattgttggagttagatttaatcttcggcaggtttatggaaaaagaattcgagcatttgagcgataaagagctgtccgagttttccgaaatccttgaatttcaagatcaagaattgcttgccttgattaacgggcattcggaaacggacaaagggcaccttatcccgatgcttgaaaaaatcagacgggcatga

SEQ ID NO: 29689 - DNA, 1284 bp, Neisseria meningitidis
atgtccaaatcaatcaaactcaacgtaccgggtcaggcaggtttggagctgccggtattggaagccagcatcgggcacgatgtggttgacattcgggggctgacaaaaaatacaggtttgttttccttcgaccccggatttgtttcaaccgcaagctgtgagtctaaaattacttacatcgacggcgatcaaggcttgctttattatcgcggataccccatcgagcagctggccgaaaagtccgattatttggaagtctgctacctgttgatttacggcgaactgccgactcccgagcaaaaggcagaatttgacaataccgtccgccgccacacgatggtgcatgaacagctgacttggttcttccgggggttccgccgcgacgcgcatccgatggcgatgatggtcggcgtggtcggcgcactgtctgcgttctaccaagacagcttggacattagcaatcccgaacaccgcaaaatcgcgatttaccgcctgatttctaaaatcccgaccattgcggcaatgtgctaccgctattcaaacggtctgccgttcaattatccgaagaataatctttcttattccgaaaacttccttcatatgatgttcgccacgccgtgtgaagactacaaacccaatcccgttttggcacgcgcgctcgaccgcatctttattttgcatgccgaccacgagcaaaacgcctcaacttcaaccgtccgtctggcagggtcttcgggtgcgaacccgtttgcctgtattgctgccggtatcgcctgcctgtggggtgcttcgcacggcggtgcgaacgaagccgtgttgaaaatgttggacgaaatcggcgatgtgtctaatgttgccgcatacatggaaggtgtgaaacaacgcaaataccgtctgatgggcttcggtcaccgcgtgtaccgcaatatggatccgcgtgccagcattatgcgcgaaacctgctatgaagttttgaaggaattgggcttggaagacagtccgaaattcaaactggcgatggaattggaacagattgcgctgaaagacccgttctttatcgaacgcaaactgtatccaaacgtcgatttctattccggcatcgtcctgtccgcgctgggcatcccgaccgaaatgtttaccgtcatcttcgccctgtcgcgcagcgtgggctggatttcgcactggcacgagatgattagcgatccttcgctgaaaatcggccgcccgcgccagctttataccggttcggaacgccgcgattatgtgccgccaggcgagaggtaa

SEQ ID NO: 29690 - DNA, 2829 bp, Neisseria meningitidis
atgatggacgaaaaactcaatttctcttacctgttcggttcaaacgcaccttacattgaggaattgtacgaggcttttttggaaaaccccgatgcggttgatgaaaaatggaagcagtatttcaccgatttgagcaaacagccggggacggttgctgtcgatgtcgcacacacaccgattcgcgaatcatttgttactttggcgaaaaagaaaattgcatctgccgttgcgggcggtgcggatgaggcaatgctgaaaaagcaagtcagcgttttacggctgatttccgcctatcgtatccaaggcgtgggtgcagcccaacttgatccgctcaaacgtatccccccgcgcgatattgaagccctcgatccgaaattccacggtctgtcagatgccgatatggcgcttcaattcaatatgggcgagggcgattttgccaatcgcggcaaactgcctttgtcccaaatcatcagcaacctcaaacaaacctactgcggccacatcgcattggaatatatctatattcccaataccgaagagcgccgctgggtacgcaattattttgaaagcgtattgtccacaccgcattacaatgccgatcaaaaacgccgtatcttgaaagagatgactgctgccgagactttggaacgttatctgcataccaaatatgtcggtcagaaacgtttcggtgtcgaaggcggcgaaagcgcgattgccggtttgaactacctgattcaaaacgccggtaaagacggcgtggaagaagtcatcatcggtatggcgcaccgtggccgtctgaatgttttggtgaacattttgggtaaaaaacccggagatttgttcgctgagtttgaaggccgtgccgaaatcaaattgcctagcggcgacgtgaaataccacatgggcttcagctccgacatcgccactccacatggtccgatgcacgtttctttggcgttcaacccgtcacacttggaaatcgttaacccggtagtcgaaggttctgcacgcgccaagcagaaacgtttgggcgaaaacggccgcgataaagtcttgcccgtattgattcacggcgactccgcatttatcggtttgggtgtcaaccaagcgacattcaatctgtctaaaacgcgcggttataccaccggcggtacggttcatatcgtcatcaacaatcaaatcggctttaccacttccgatatccgcgatacccgttcaaccgtacactgtaccgatatcgcaaaaatggtttccgctccggttatccatgtgaacggcgatgatcctgagcgtgtttgctttgccatccaagccgctttggattaccgcaaaaaattccataaagacatcgtgatcgacgttgtctgctaccgtaaatggggccacaacgagggcgacgatccgaccttgacccaaccgatgatgtacaaaaaagtatcgcaacacccgggtgcgcgtgctttgtacaccgagcaactgattgccgaaggcgtggtaacccaagccgaggctgacggttacatccaagcctaccgtgatgctttggataaaggcgaacacgtcgagcaaacaacgttgagcaacttccaacgcacacaaattgactggagcaaataccaaggtaaagattggcgcgaacacatcgaaaccggtttgcctgccgcggatattgagcgtcttaccgagaaatttaccgccgtaccggaaggctttgccctgcatccgactgcaaaacgtgtgattgaagcgcgtaaagccatggcatccggcaaacaagccatcgactggggtatggccgaaaccttggcatacgcaagccttgtaaccaaaggtcatggcgtgcgtatctccggtgaggactccggccgcggtacgttctcgcaccgccacgccgtattgcacgatcaaaaacgcgaaaaatgggacgacggtacttatgttcctctgcgccatatgggcgaaggaatgggcgagttcctggttatcgactccattttgaacgaagaagccgtgatggcgttcgagtacggctttgcctgctccgcgcctgacaagctgaccatttgggaagctcaatttggtgacttcgccaacggcgcgcaagtgacgattgatcaattcctgtcgtcaggcgaaaccaaatggggtcgcttgtgcggtctgaccaccatcctgccgcacggttacgacggtcaaggccctgagcactcttctgcacgcgtagaacgctggttgcaactgtgttctgagaacaatatgcaagtcatcatgccatctgaagcgtcgcaaatgttccacctcttgcaacgtcaagtcttaggttcataccgcaaaccgctggtaattttcatgtccaaacgcctgttgcgattcaaaggggcaatgagcccgctggaaaacttcaccgaaggttcgactttccgtccggttatcggcgataccgccgaacgcgcaagcaacgacagcgtgaaacgcgtggtattgtgtgccggtcaggtttactatgacttggaagccggtcgagccgaacgtaaactggaagatgatgttgcgattgtccgcgttgagcagctgtatccgttcccatacgatgaggttaaagctgaactggcgaaatatccgaacgcaaaatctgtggtttgggcgcaagaagagccgaaaaaccaaggcgcgttctaccaaatccgccaccgcatcgaagacgttatcagcgaagagcaaaaactgtcttatgctggtcgtccaagcagcgcatcgcctgcagtgggctactcaagcaaacacattgctcaattgaaacaattggttgaagacgctttggcgttgtaa

SEQ ID NO: 29691 - DNA, 891 bp, Neisseria meningitidis
atgagcgtattgattaataaagacaccaaagtattggttcaaggtttcaccggtaaaaacggtactttccactccgaacaagctctggcttacggcactaaagttgtcggcggcgttaccccgggcaaaggcggtcaaacccacctggatctgcctgtattcaacaccatgaaagaagcggttaaagaaaccggcgcggatgcatctgtaatttacgttcccgctccgtttgtgttggattctatcgttgaagccgttgattcaggcgtaggcttggtcgttgtgattaccgaaggcgtaccgactctggacatgctcaaagccaaacgttatttggaaaccaacggcaacggcacacgtttggtgggccctaactgcccgggcgtgattaccccaggcgagtgcaaaatcggtattatgccgggccacatccacactccgggccgcatcggtattatttcccgttccggtacattgacttacgaagccgtggcacaaaccaccaaactgggcttgggtcaatcaacctgtatcggtatcggcggcgacccgattcctggtatgaaccaaatcgacgcactgaaacttttccaagaagacccagataccgacgccatcatcatgatcggtgaaatcggcggtactgcggaagaagaagcagccgaatacatccaatccaacgtaagcaaacctgttgtcggctacatcgccggtgttaccgctcctaaaggcaaacgcatgggccacgccggtgcgattatttccggcggcaaaggtactgccgaggaaaaattcgccgcgtttgaaaaagccggtatcgcttacacccgcagccctgccgagttgggcactaccatgctggaagtgttgaaaacaaaaggtttggcataa

SEQ ID NO: 29692 - DNA, 2847 bp, Neisseria meningitidis
atgtgcaaccatcatcccaaacattcgcacggcaacgacaccatccgcatccgcggcgcgcgcacgcataatttgaaaaacgtcgatttggacattccgcgccacaagctcgtggtggtaacaggattgtcgggcagcggcaaatcgtcgctagcgtttgatactttatatgccgaaggccaacgccgttatgtcgagagcctgtccgcctatgcgcggcagtttttgcagatgatggacaaacccgatgtcgatttgatcgaaggcctgtcgcccgcgatttccatcgagcagaaatccaccagccacaatccgcgttccaccgtcggcacggttacggaaatccacgactatctgcgccttttgtacgcacgcgtcggcacaccctactgccccgaacacaagctgccgctatccagccaaaccgtatctcaaatggttgatgccgtcttaaaactgccggaagacacgcgcgtgatgattctggcgccggcggtacgagagcgtaagggcgagtttgtcgatttctttgccgacttgcaggcgcagggttttgcgcgcgtgcgcgtggacggcgaagtctatcagttggacgaagtgccgaagctggaaaaaaacatcaagcacaatatcgacgtggtcatcgaccgtgtaaaagtgaaggcggacatcaagcagcggctggcggaaagttttgaaaccgcgttacgccacggcaacgagcgcgcgctggcgatggagatggacagcggcgaagaacattggttttccgcgcgtttcgcctgccccgtatgttcgtacagcctgccagaattagagccgcgcctgttttccttcaacaacccgatgggttcctgcccgacttgcgacggcttgggcaacaccaatttcttcgaccccgaaaaagtggtcgcccaccccgaattgtcgctggcttcgggcgcgattgacggctgggacaaacgcaaccagttctatttccaaatgattcagtcgctggcacggcattacggttttgatgtgcaggctgcttgggaaaccctacctgcaaaaatcaaaaaagtcgtgttgcacggttcgggcaaggaagtcattgatttcacctacctatccgaacgcggcaccaccttcaaccgcagccacgccttcgaaggcatcattcccaatctcgaacgccgctaccgcgaaaccgacagcgaaaccgtgcgcgaaaaattgcgcgaataccaaaaccaccgcgcctgcccgagctgcggcggtgcacgtttgcgcaaagaagcgcgctacgtttacgtcagcggcgaaccgttgcacgaagtctccgcctggccgctgaccaaaacccaccgattctttgaaacgctggatttggacggcaacaaaaaacaaatcgccgaaaaaatcctcaaagaaatcaccgagcggctcggctttttgattaacgtcgggctggattacctcaatctctcccgctccgccgaaaccctttccggcggcgaagcccagcgcatccgcctcgccagccaaatcggcagcggtctgaccggcgtgatgtatgtgttggacgagccctccatcggcctgcaccagcgcgacaacgaccgcctgcttgccaccctcaaacgcctgcgcgatttgggcaacagcgtgattgtggtcgaacacgacgaagacgccatccgcgaagccgatttcgtcgtcgatatgggccccggcgcaggcgaacacggcggcaacgtactgattgccgacacgcccgaaaacgtcgccaaatgcgaaaactccgttaccggacaatacctcagcggcaaaaaatccattgccgtgccgtctgaacgcacgcccgtcaatcccggccgaatgctcgtcctcaaaggcgcgcgcggcaacaacctcaaaaacgttaccctcgaactgccgctcggtttgattacctgcatcaccggcgtatccggcagcggcaaatccaccctgattaacgacaccctcgccaaaatcaccgcccgcgaactcaaccgagcccaagaagaacccgccccatacgacgacatccgcggcctcgaacacctcgacaaagtcatcaacgtcgaccaatcccccatcggccgcaccccacgctccaatcccgccacctacaccggcctgttcacccccatccgcgaactcttcgccagcgtacccctctcgcgtgaacgaggctacaacgtcggcagattctccttcaacgtcaaaggcggccgctgcgaagcctgccaaggcgacggcgtgattaaagtcgaaatgcacttcctgcccgacgtgtacgtcccctgcgaagtctgccacggcaaacgctacaaccgcgaaaccctcgaaatccaatacaaaggcaaaaacatcagccaagtcctcgacatgaccgtcgaagaagcctgcgaatttttcgacgccgtccccaccgtatcgcgcaaactgcaaaccctgatggacgtaggtctcggctacatccgcctcggccaatccgccaccaccctctccggcggcgaagcccagcgcgtcaaactcgccttggaactctccaaacgcgacaccggcagaacgctctacatcctcgacgaacccaccaccggcctgcacttcgccgacatcgccctgctgctggaagtcataggccgtctgaaaggcaaaggcaactcgattgtgattattgagcataatctggatgtgattaaaactgcagattggattgtggatttagggcccgaggggggcgatggcggagggaggattattgcttcaggtagcccggaggaagtggcgaaggttaaggggagttatactgggaagtatttgaagaatatactttaa

SEQ ID NO: 29693 - DNA, 1059 bp, Neisseria meningitidis
atgattacaccgcaacaggccatcgaacgattaatcagcaataacgagttgttttacgatgaaatgaccgacttgatgcgtcagattatgagaggacaggttctgccggagcagatagcggccattttgacaggattgcgtatcaaggttgaaaccgtttccgaaattaccgcagctgcagccgtcatgcgtgagtttgcgacaaaagtgccgctggagaatgcagaggggctggtcgatatcgtcggtacgggcggggatggcgcgaaaaccttcaatatttcgacgacttcgatgtttgttgccgcagcggcaggcgcgaaggttgccaaacacggaggccggtcggtctcttcctccagcggtgcggctgacgtggtggagcagatgggcgcaaacctcaacctgactcccgaacaggttgcccaaagtatcaggcagaccggcatcgggtttatgttcgcgcccaatcaccacagtgccatgcgccatgtcgcccctgtacgccgttcgctcggtttccgaagtattttcaacatattgggtccgttaacgaatcctgcgggcgcgccgaaccagcttttgggcgtgttccacaccgatttgtgtggcattttgtcgcgggtcttgcaacaacttggttcaaaacacgttttggttgtttgcggggagggcggtttggatgaaattacactgacgggcaaaacacgcgttgccgagctcaaagacggaaaaatcagcgaatacgacatccgcccagaagatttcggtatcgaaacccgccgcaatttggatgaaatcaaagttgccaatactcaggaatctttgttgaaaatgaatgaggtgctggaaggaagagaaggggctgcgcgcgatatcgtattgctcaacaccgccgccgccctgtatgccggaaatgtcgctgcttcgctttcagacggcatatctgccgcacgggaagccatcgattcaggcagggccaaatcgaaaaaagaggagtttgtcggttttcaaccacaacaaagatgccattttcttggaaagatggagcttgggtga

SEQ ID NO: 29694 - DNA, 1542 bp, Neisseria meningitidis
atgaaaatcggtatcccacgtgagtcattatccggcgaaacccgcgtcgcctgtacgcccgccaccgtcgccctgctgggcaaactgggctttgaaaccgttgtcgaaagcggcgcaggtttggcggcaagtttggacgatgccgcttaccaagcagcaggcgcaaccgttgccgacaaagcagcggtttgggcataccctttaatttataaggttaacgcgccgtccgaagacgagctgccgctgctcaaagaaggacagaccatcgtcagcttcctgtggccgcgccaaaacgaggctttggtcgaagccttgcgcgccaagaaagtgaacgcgctggcaatggacatggtgccccgcatttcgcgcgcgcaggctttggacgctttgtcttcgatggcaaacatcagcggctaccgcgccgtgattgaagccgccaacgccttcggccgtttcttcaccggccaaattactgccgcaggcaaagtgccgcccgcgcaggttttggtgattggtgcaggtgtggcaggtttggcggcgatcggtacggcaaactcgctcggcgcagtggtacgcgcgttcgatacccgcttggaagtggcggaacaaatcgaatcgatgggcggcaagttcctgaaactcgacttcccgcaagaatcgggcggcagcggcgacggctacgccaaagtgatgagcgacgaatttatcgccgccgagatgaagctttttgccgagcaggcgaaagaagtggacatcatcatcaccaccgccgccattccgggcaaacccgcgcccaagctgattaccaaagaaatggtcgaaagcatgaaacccggctccgtcatcgtcgatttggcggcggcgacgggcggcaactgcgaactcaccaaacagggcgaattgttcgtaaccggcaacggcgtgaaaatcatcggctacaccgacatggcaaaccgccttgccggacagtcttcgcagctttacgccaccaacttggtcaacctgaccaagctgttaagcccgaacaaagacggcgaaatcacgctggacttcgaagacgtgattatccgcaacatgaccgttacccgcgacggcgaaatcaccttcccgcctccgccgattcaagtttccgcccaaccgcagcaaacgccgtctgaaaaagccgcgcctgccgccaagcccgaaccgaaacccgttcccctgtggaaaaaactcgcgcccgccgtcatcgccgccgtgttggtactgtgggtcggcgcggtcgcacccgcagcattcctgaaccactttatcgtcttcgtcctcgcctgcgtcatcggctactatgtcgtttggaacgtcagccactcgctgcacacaccgctgatgtcggtgaccaacgccatttccggcatcatcgtcgtcggcgcgctgctgcaaatcggtcagggcaacggcttcgtttcgctgctgtcgtttgttgccatcctgattgccagcatcaacatcttcggcggcttctttgtaacgcggcggatgctgaatatgtttaggaaagggtaa

SEQ ID NO: 29695 - DNA, 1008 bp, Neisseria meningitidis
atgagcaccttctttcaacaaaccgcacaagccatgattgccaaacacatcgaccgcttcccactattgaagttggaccaggtgattgattggcaaccaatcgaacaatacctgaaccgtcaaagaacccgttaccttcgagaccaccgcggccgtcccgcctacccgctgctgtccatgttcaaagccgtcctgctcggacaatggcacagcctctccgatcccgaactcgaacacagcctcatcacccgcatcgacttcaacctgttttgccgttttgacgaactgagcatccccgattacagcaccttatgccgctaccgcaactggctggcgcaagacgacaccctgtccgaattactcaaactgattaactgccaactgaccgaaaaaggcctaaaaatagagaaagcatccgccgccgtcgttgatgccaccattatccagaccgccggcagcaaacagcgtcaggccatagaagttgacgaagaaggacaaatcagcggccaaaccacaccgagtaaggacagcgatgcccgttggatcaagaaaaacggcctctacaaactcggttacaaacaacatacccgtaccgatgcagaaggctatatcgagaaactgcacatcacccccgccaatgcccatgagtgcaaacacctgtcgccgttgttggaaggtctgcccaaaggtacgaccgtctatgccgacaaaggctatgacagtgcggaaaaccggcaacatctgaaagaacatcggctgcaggacggcattatgcgcaaagcctgccgcaaccgtccgctgtcggaagcgcaaaccaaacgcaaccgatatttgtcgaagacccgttatgtggtcgaacaaagcttcggtacgctgcaccgtaaattccgctatgcgcgggcagcctatttcgggctgattaaagtgagtgcgcaaagccacctgaaggcgatgtgtttgaacctgttgaaagccgccaacaggttaagtgcgcccgctgccgcctaa

SEQ ID NO: 29696 - DNA, 885 bp, Neisseria meningitidis
atgagcaccttcttccggcaaaccgcacaagccatgattgccaaacacatcgaccgtttcccgctattgaagtcggaccaggtaattgattggcagccgatcgaacaatacctgaaccgtcaaagaacccgttacctccgagaccaccgcggccgtcccgcctacccgctgttgtccatgttcaaagccgtcctgctcggacaatggcacagtctctccgatcccgaactcgaacacagcctcattacccgcatcgatttcaacctgttttgccgtttcgacgaactgagcatccccgattacagcaccttatgccgctaccgcaaccggctggcgcaagacgacaccctgtccgaattgctggaactgattaaccgccaactgaccgaaaaaggtttaaaagtagagaaagcatccgccgccgtcgttgatgccaccattattcagaccgccggcagcaaacagcgtcaggccatagaagtcgataacaaaggacaagtcagcggacaaactacaccgagtaaagacggcgatgcccgttggacaaagaaaaacggcctctacagactcggttacaaacaacatacccgtaccgatgcggaaggctatatcgagaaactgcacatcaccccagccaatacccatgagtgcaaccacctgttgcctttgctggaaggcattaccgaaggcacgaccatctatgccgacaaaggctatgacagtgcggaaaaccgaacatctggaagaacatcagttgttagacggcattatgcgcgggcagcctatttcggactgattaaagtgagtgcgcaaagccacctgaaggcgatgtgtttgaacctgttgaaagcggccaacaggctaagtgcgcccgctgccgcctaa

SEQ ID NO: 29697 - DNA, 750 bp, Neisseria meningitidis
atgccatccgttgaactgctgttggtgattgtcggactgccacgcggcaccttctattaccaattggccgtccaatcggcagaagacaaatatgccgatttgaaacggcatatccatgatatttatcgacgacataagggaagatacggctaccggaggattgcggcagccatccgtcacgcaggaacaccggtcaatcacaagaaagtcagccgtctgatggcgaagacggggctgaaggcagtgatatggcggcgcaaataccgctcgttcaaaggagaagtcggcaaaattgcgccgaatatcctgcgacgctgtttccatgcagaaaagccgaatgagaaatgggtaacggacgttaccgagttcaatgtaggcggagaaaagatatacctttctccgattatggatttgtttaacggggaaatcgtcagttaccgtattcaaacccgcccgactttcgatttggccggcgagatactgaaaggtgcgccggagaaaccgagatcgtctgaaaagccgatactgcattcggatcaaggttggcaatatcagatgtttttttatagtggattaaatttaaatcaggacagggcgatgaagccgcagacagtacaaatagtacggcaaggcgaggcaacgccgtactggtttaaatttaatccactatacaacaacgatagaatcaagttgaaattaaaagggctgagccttgttcagtacagaattcagtccctgaaagccgcttga

SEQ ID NO: 29698 - DNA, 1056 bp, Neisseria meningitidis
atgaaaacctacgcaccggcactctataccgcagccctgctcaccgcctgcagccccgcagccgattcaaaccatccgtccggacaaaatgccccggccaataccgaatccgacggaaaaaacattaccctgctcaacgcctcatacgatgtggcacgggatttttacaaagaatacaaccccttatttatcaaaacataccaatccgaacaccccggcacatccgtcagcatccaacagtcccacggcggctccagcaaacaggcattatccgtagccaacggccttcaagccgatgtcgtaaccatgaaccaatcctccgacatcgacctgctcgaaaaaaaaggactggtagaaaaaggctggcaacaagccctccccgaccacgccgcgccctacaccagcactatggttttccttgtccgaaaaaacaaccccaaacagatccgcgattggaacgaccttgccaaagacggcgttaacatcgtcatcgccaatcccaaaacctcgggcaacggacgctacgccttcctcggcgcatacggttacggtctgaaaaccaccaacggcaacgaacaggaagcccaaaaactcgtcgcatccatcctcaaaaacacccccgtttttgaaaacggcggacgcgccgccaccaccaccttcacacaacgcaacatcggcgacgtactcatcacttttgaaaacgaagccaactacgtcagcaaaaaactgacccaaggacagtttgaaatcgtctatccgagctacaccatttccgccgaaagccccgtcgccgtcgtcaacagcgtcgtcgcgaaaaaaggcacgcaaaaaaccgcccgcgcctatctcgaatacctttggagcgaaccggcgcaagaactcgccgcctcactctacctgcgcccccgcaaccccgaagtattggcaagacacaaagccgacttcccagacttagacaccttctctcccgaagaaaaattcggcggatgggacaacatcatgaaaacctacttcgccgacggcggcatattcgaccgcctgaccgcacaaaaatga

SEQ ID NO: 29699 - DNA, 1911 bp, Neisseria meningitidis
atgaatatattatctgtagaaaacgcttcctttgccgtcggccacgtcgccctgctcgacaaaacttccttccaactcgacagcggcgaaaaaatcggcttaatcggtcgtaatggtgcgggtaagtcttcgtttttaaaaatcctcgccggcgtgcaaaagcttgatgatgggcagattattgtccaaaacaacctcaaaatcgtttatgtaccgcaggaatccttttttgataaggaagcaaccgtatttgatactgttgccgaaggtttgggcgaaattcgcgatttattgcgccgttatcatcatgtcagccatgagttggaaaatggttcgagtgaggccttattgaaagagctcaacgaattgcaacttgagatcgaagcgaaggacggctggaagttggatgcggcggtgaagcagactttgggcgaactcggtttgccggaaaacgaaaaaatcggcaacctctccggcggtcagaaaaagcgcgtcgccttggcgcaggcttgggtgcagaagcccgacgtattgctgctcgatgaaccgaccaaccatttggacatcgacgcgattatttggttggaaaacctgctcaaagcgtttgaaggcagcctggttgtgattacccacgaccgccgttttttggacaatatcgccacgcggattgtcgaactcgatcgcggtattttgcgttcctatcccggctcgttctccaaatatagcgagaaaaaagcgcaagagttggcagtcgaagcggaacacaaccgcctcttcgacaaattccacgcgcaggaagaagcgtggatacgcaaaggcatcgaagcgcgccgtacccgcaacgaaggccgcgtgcgccgtttggaagaactgcgccgccagcgtgccgaacgccgcaacgtacaagggcaggtcaatttcaagctcgacagcggcgagaaaagcggcaaaatcattgccgaactggaacatgcctcgtttacctatggcgacaaagtcatcatggacaaattctccgccatcttgcagcgtggcgacaaaatcggcttaatcggcccaaacggtatcggcaaaaccaccttcctcaagctgattttgggcgaattgcagccgacctacggcagaatccgtatcggcagtaagcaggaagttgcctatttcgaccaattccgcagcacgttgaacgaaaacgacaccgtgttttacacgctcggtcaaggcaacgattacgtcgaagtcggcggcaagaaaaaacacgtaatgagctatctggaagatttcttattccatccagcccgcgcacaaagtcccgtttcatcgctctccggcggcgaacgcaaccgccttttgctggcaaaactctttacccgtcctgctaatattttgattttggacgaaccgaccaacgacttggatatcgatacccaagagctgcttgaagatttgctgcgcgattatcaaggcacggtattccttgtctcacacgaccgtatgttcctcgataacgtgattacccaaagcattatttttgaaggaaatggaaggttaaaagaatatatcggcggctatcaggactacatcgacgcaaaatcacgcgaagcgaagattcagacggaatccgcacccaaaacagccgatgccgaaccggtgaaagaaaaacccaaagccaaccgcacggtcaaactgtcctacaaagaacagcgcgaactcgacgccctgcccgacgaaatcgccgccttggaagccgaacaggcagaaatcaacgcgcagctttccgatcccgaaatcttcaaagattacgaaaaagccggcgcactgcaaagccgcgccgaagaaatcgaaatgctgcttttggaaaagctggaacgctgggagctgctggaaaccaaacagaacggcaatgccgtctga

SEQ ID NO: 29700 - DNA, 1008 bp, Neisseria meningitidis
atgagcaccttcttccggcaaaccgcacaagccatgattgccaaacacatcgaccgtttcccgctattgaagttggaccaggtgattgattggcagccgatcgaacaatacctgaaccgtcaaaaaaaccgttaccttagagaccaccgcggccgtcccgcctaccctctgctgtccatgttcaaagccgtcctgctcggacaatggcacagcctctccgatcccgaactcgaacacagcctcatcacccgcatcgatttcaacctgttttgccgtttcgacgaactgatcatccccgattacagtaccttatgccgctaccgcaactggctggcgcaagacgacaccctgtccgaattactcaaactgattaactgccaactgaccgaaaaaggcctaaaaatagagaaagcatccgccgccgtcgttgatgccaccattatccagaccgccggcagcaaacagcgtcaggccatagaagttgacgaagaaggacaaatcagcggtcaaaccacaccgagtaaggacagcgatgcccgttggataaagaaaaacggcctctacaaactcggttacaaacaacatacacgtaccgatgcggaaggctatatcgagaaactgcacattactcccgccaatgcccatgagtgcaaacacctgtcgccgttgttggaagggttacccgaaggtacgaccgtctatgccgacaaaggctacgacagtgcggaaaaccggcaacatctggaagaacatcagttgttggacggcattatgcgcaaagcctgccgcaaccgcccgctgtcggaagtgcaaaccaaacgcaaccgatatttgtcgaagacccgttatgtggttgaacagagcttcggtacgctgcaccgtaaattccgctacgctcgggcagcctatttcggactgattaaagtgagtgcgcaaagccacctgaaagcgatgtgtttgaacctgttgaaagcggccaacaggttaagtgcgcccgctgccgcctaa

SEQ ID NO: 29701 - DNA, 1251 bp, Neisseria meningitidis
atgttttcaaaaagcgttaccctcgcacaatatgaccccgatttggcagcagccattgcccaagaagaccaacgccagcaagaccacgtcgagctgattgcctctgaaaactacgtcagctgcgccgtaatggaagcgcaaggttcccagctgaccaacaaatacgccgaaggctaccccggcaaacgctactacggcggctgcgaatacgtcgatattgtcgaacaattggcgattgaccgcgtcaaaaaactgttcggcgcgcaatacgccaacgtccaaccgcactccggctcgcaagccaaccaagccgtgtacgcttccgttttaaaaccaggcgacaccattttgggtatgtctctggcgcacggcggccacctgacccacggcgcgagcgttaatatctcaggcaaactctacaacgctgttacttatggtttggatgaaaacgaagtgctcgattatgccgaagtcgaacgcctcgcgctcgaacacaaacccaaaatgattgtggcgggtgcgtctgcctacgcgttgcaaatcgactgggcaaaattccgcgaaatcgccgataaagtcggcgcatacctctttgtcgatatggcgcactatgccggtctggttgccggcggcgaatatcccaatcccgtgccgttctgcgacttcgttaccaccaccacccacaaaaccctgcgcggtcctcgcggcggcgtaattttgtgccgcgacaatacccacgaaaaagcgttgaactcttccatcttcccaagcctgcaaggtggcccgctgatgcacgttatcgccgccaaagccgtggcgtttaaagaagcattgcaacccgagttcaaacaatacgcaaaacaagtgaaaatcaatgcagccgccatggcggaagagttggttaaacgcggtttgcgcatcgtttccggccgcaccgaaagccacgttttcctcgttgacctgcaaccgatgaaaattaccggcaaagccgccgaagctgctttgggcaaagcgcacatcactgtcaacaaaaacgccatcccgaatgatccggaaaaacccttcgttacctccggcatccgcatcggttccgccgccatgaccacacgcggttttaacgaagccgacgcgcgcgtattggcgaacttggttgccgacgtattgtctaaccccgaagacgaagccaacctcgccaaagtccgcgaacaagtaactgctttgtgcaataaataccccgtttacggcgcgtaa

SEQ ID NO: 29702 - DNA, 1776 bp, Neisseria meningitidis
gtggctaaaacatatttattgactgcattgataatgtctatgacaatctctggatgtcaagtcatccatgccaatcaaggtaaggttaatactcattctgctgtcatcacaggtgcagacgctcacacgcctgaacatgcaacgggactgaccgaacaaaagcaggtgattgcaagtgattttatggtagcgtcagccaatccattagcaacacaagctggctatgatatcttaaagcaaggcggtagcgctgcagatgcgatggtggcggtgcagacgacactaagcttggtagagccacagtcgtcaggcttgggcggtggtgcatttgtgttgtattgggataataccgccaaaacattgaccacatttgatgggcgtgagacggcaccgatgcgtgcgacgccggaattatttttggataaagatggtcaaccattgaaatttatggaagcggtggtcggtggtcgctcggtgggtacgcctgctatccctaaactgatggagacaatacatcagcgatacggtgtattgccttggggaaaattatttgatacaccgatccgcttggcaaaacaaggctttgaggtgtcgccaaggcttgccatctcggttgagcaaaatcagcagcatttggcacgctatccaaaaacagccgcttattttttgccgaatggtgtgccgctacaagcaggcagcttgctgaaaaatttagaatttgctgacagtgttcaggcgttagcagctcaaggtgcaaaagctctgcatactggtaaatatgcccaaaatatcgtttcagttgtccaaaatgctaaggataaccccggtcaattatccttacaagatttatctgattatcaagtggtggaacgcccgcctgtttgtgtgacttatcgtatttatgaagtatgcggtatgggtgcaccaagctcaggagggattgctgtgggtcagattttggggattttaaatgaattttcacccaatcaggtggggtatgatgccgaaggtttacgtctcttgggcgacgcttctaggcttgcgtttgcggatcgtgatgtatatttgggcgaccctgattttgtaccagtacccattcgccagttgatttctaaagactacctaaaacatcgcagccagctgcttgagcagtcggataaggcattgcctagcgtatctgcaggcgattttattcatgagtgggtgtcctcacaagcgattgagttaccttctaccagtcatatatcaattgtggataaggcgggcaatgtgctatcaatgacgacttccattgaaaatgcgtttggctcaactttgatggcaaatggctacctgctgaataatgagctgacagactttagttttgagccaataaagcagggcaaacaggtcgccaatcgtgtcgagcccggcaagagaccacgctcctcaatggcaccaaccatcgtatttaaagcaggcaagccttatatggcaatcggctccccaggtggtagccgtatcattggctatgtcgctaagacgattgtggcacatagtgactggaatatggatatccaagatgccatcagtgcacccaatttattaaatcgctttggtagctatgaactagaaacgggtacaaccgccctccagtggcaacaagcattaaatgatttgggctataagactgacgtgcgtgagctaaattcaggtgttcaagccattattatcgagccaagcaggctggttggtggtgccgatccacgccgagaaggtcgagtgatgggtgattag

SEQ ID NO: 29703 - DNA, 846 bp, Neisseria meningitidis
atgctcagttacagacacgcattccacgccggcaaccacgccgatatgctcaaacactttaccttgtttttagtgctgcaatatttcaaccgcaaagacaagccctactggtacatcgacacgcacggcggcgcgggtgtgtacaatctcgaaggcagcgaggcgcagaaagtcggcgaataccggcaaggcatcgccctgctccgacaggcgcaaaacctgcctgccgaactctctgactttgccgcgcacatacaaaaaatcctgccctcgcccgaactttactgcggttctccgtggctggcacaatcgctgacccgcgtcggcgacaaattacgcctgtttgagctgcaccccaccgactttgtccatctgcaaaacaatatgggcgaagcaggattgggcaaacgcggacaagtgttgcgcgaagacggttacaaagggctgatttccctgctgccgcccccgccgcgccgtgccgccgtcctcatcgacccgccttacgaggaaaaacaggactactggcgtgtaacggaaacgctgaaatccgctttaaaacggtttgagtccggctgttatctcatctggtatccctgcctcagccgcgaagaaagccgcaagctgcccgaagaactgaaaaaactcgttcccgacaactaccttcacgccgaactgcacgtccacgcgccgaaagccgacggtttcggtatgcacggcagcggaatgttcgtcatcaatccgccctatctgttggcggaacaattggcggcaaacctccccgccctgacgcggctgctggcgcaagacgaaggcgcgcgctaccttttggacagcaaaatccgctga

SEQ ID NO: 29704 - DNA, 603 bp, Neisseria meningitidis
atgttcaacataccggctgttgccgtttcctatctgatcggctcactttctttcgccgtcatcgtgtccaaatattacggcatggacgacccgcgcacctacggatcgggcaatccgggggcaaccaatgttttacgcagcggcaaaaaaaaggcggccgcgctgacgctcttgggcgatgccgccaaaggtttggttgccgttttgcttgcacgcgtgcttcaagaaccgctcggtttatccgacagcgcaatcgcggccgtcgcactcgccgcgctggtcgggcatatgtggccggtgtttttcggatttaaaggcggcaaaggcgtggcaacggcattgggcgtgcttctggcactctctcccacaactgccttggtctgcgcgttgatttggcttgtgatggcattcggcttcaaggtgtcctcccttgccgcattaaccgccacaatcgccgccccccttgccgcactgttttttatgccgcatacttcttggattttcgcaaccctcgcaatcgccatattggtgttgctccgccataagagcaacatcctcaacctgattaaaggcaaagaaagcaaaatcggcgaaaaacgctga

SEQ ID NO: 29705 - DNA, 1263 bp, Neisseria meningitidis
atgtcaaacacacaaaaacagcttgcccttgccaaagcggcaaaaaaatccgtcaacacggcggatacggaagaaaaaaaccgcgcgctgtttgctatggcggacagcttggaagcggcggcggcagatattttggcggcaaaccgtcaagacttggaagccgcggcaggcaacattcccgaaagcatgaccgaccgccttttgttggacggcaaacgcatttgcgcgatggcggacggcatcagggcggttgccgcgctgcccgaccccgtgggcgaaatactggaaacctcgactttgcccaacggcttggaaatcgtcaaaaagcgcgtggcgatgggcgttatcggcattatttacgaaagccgcccgaacgttacgtccgatgcggcggctttggcactgaaaagcggcagcgcggtcgtactccgcagcggcaaagatgcattccaatccgcacgcgccatcgttgccgccctgaaaacggggttggcacaaacccgcatcgaccccgacgcgctccagttgattgaagacaccgggcgcgaaagcagttacgaaatgatgagggcgaaagattatctagacctgctgattccgcgcggcggggcggggctgatacgggcggtggttgagaatgccgtcgtgccggtcattgaaacggggacgggcattgtccacatttatatcgacaaggacgcggattgggacaaggcgctccgtatcgtgtacaacgccaaaaccagccgcccgtccgtgtgcaactcgatggaagtgctgctggtgcatgaagacattgctgccgacttcctgcccaagctcgaacggctgttggttcgcaaccgtatagaagccggactgccgcccgtccgcttccgtttggatccgcaggcggcgcggcatatcggcggcgaagcggcgggtgcagacgatttcgataccgagtttttagactacatcctcgccgtgaaaaccgtcgcttcggtcgaagaggcggttgggcacatcgaagcccacggcacgcaccattcagacggcatcgttaccgaaaaccgccacgctgcggactatttcacgacccatatcgattctgccgccgtgtatgtcaacgcgtccacgcgctttaccgacggcggcgaattcggcttgggttgcgaaatgggcatctccacgcaaaaactccacgcccggggcccgatgggtttgaaagaactgacgagttacaaatacatcgtacaaggcacgggacaggtcagggaataa

SEQ ID NO: 29706 - DNA, 1131 bp, Neisseria meningitidis
atgattaaaatcagcacccgcttcgatgccggctcggtcgtcgtcaaagacctgaccgatccttccaacatccgcctcgccctgcgtcccgacaacgcctccgattttgcacaatggttctacttccggctgcaaggcgcggcatatcaaaactgcatcatgcattttgaaaacgcggcagaagccgcctacccgaaaggctgggaaggctatcaggcgtgtgcctcatacgaccgccgcaactggttccgcgtaccgacttcctacgaaaacggcgtactgaccgtcaatcatacgccgctgtccaacagcgtgtattacgcctatttcgaaccttactccgaagaacagcatttaaacctcctcggcgacgcgcaaggcagcggcctgtgccgcatcgacgacttgggcagcaccgtgcaagggcgcgacatcaatctgctgaccatcggcaatcaggtcgaaagcgatctgaaaatctggattaccgcccgccagcatccgggcgaaaccatggcggaatggtttgtcgaggggctgctcggcaggctgctcgatccgcaagacccgacagcgcgcaccctgctcgaccgcgccacgttctatatcgtccccaatatgaaccccgacggttcggcactgggcaaccttcgtaccaacgccgccggtgcgaacctcaaccgcgaatgggaaaatccgactttggaaaaaagccccgaagtgttcttcgtgcgcgaaaaaatgctggaaaccggcgtggatttgttcttggacatccacggcgacgaagggctgccctttatctttgttgcaggaactgaaggcgtgccaaactacaatccgcgcatttccgcgttggaaacacagttcaaaaccgcccttttgaacgccagccccgatttccaagacgaatacggttacgaaaaagatgcgcccggtcaggcaaacatgaccttggcaacaaactgggtcggcaaccgtttcaactgccttgcctatacgttggaaatgccgttcaaagacaatgccaacctgcccgacgacgatttcggatggaacggtcaacggtcgttgcgcttgggcgaagccgcgttgtccgccatcctcaacatcatcggcgatttgcgctga

SEQ ID NO: 29707 - DNA, 606 bp, Neisseria meningitidis
atgaccatctatttcaaaaacggcttttacgacgacaccttgggcagcatccccgaaggcgcggttgccgtccgcgccgaagaatacgccgcccttttggcaggacaggcgcagggcgggcagattgccgcagattccgacggccgccccgttttaaccccgccgcgcccgtccgaataccacgaatgggacggcaagaaatgggaaatcggcgaagccgctgccgccgcccgtttcgccgaacaaaaaaccgccacggcattccgcctcgcggcaaaggcggacgaactcaaaaacagcctcttggcgggctatccccaagtggaaatcgacagcttttacaggcaggaaaaagaagccctcgcgcggcaggcggacaacaacgccccgaccccgatgctggcgcaaatcgccgccgcaaggggcgtggaattggacgttttgattgaaaaagttgtcgaaaaatccgcccgcctggccgttgccgccggcgcgattatcggaaagcggcagcagctcgaagacaaattgaacaccatcgaaaccgcgccaggattggacgcgctggaaaaggaaatcgaagaatggacgctaaacatcggctga

SEQ ID NO: 29708 - DNA, 771 bp, Neisseria meningitidis
gtgcggcaaaacgctaaaatacccccgaccgaccaccaaaaaggaaaaagtatggcgacactgtccgacaaaaccatcttaattaccggcgcatcgcaaggtctgggcgaacaggtcgccaaagcctatgcggcggcaggcgcaaccgtgattctggtggcacgccatcagaaaaaactggaaaaagtctatgacgcgattgtcgaagccagacaccccgaacccttcgccatccgtttcgacctgatgagtgcggaagaaaaagaattcaatcagttcgccgccaccattgccgaagccacgcaaggcaaactggacggcatcgtccactgcgccggctatttttacgccctctcgccgctggatttccaaaccgtcgccgaatgggtcaaccaataccgcatcaacaccgtcgcacctatggggctgacccgcgccctgttcccgctgctgaagcagtcgcccgacgcgtccgtcatcttcgtcggcgaaagccacggcgaaacacccaaagcctactggggcggcttcggcgcgtccaaagccgcgttgaactacctgtgcaaagtcgccgccgacgaatgggaacgcttcggcaacctgcgcgccaacgtcctcgtccccggacccatcaattccccgcaacgcatcaaatcccatccgggcgaagccaaaagcgaacgcaaaagctacggggacgtgctgcccgcatttgtctggtgggcaagtaccgaaagcaaagggcggagcggcgaaatcgtttacctctaa

SEQ ID NO: 29709 - DNA, 402 bp, Neisseria meningitidis
atgaaagacaagcacgattcttccgccatgcggctggacaaatggctttgggcggcacgttttttcaagacccgttcccttgcgcaaaagcacatcgaactgggtagggttcaagtaaacggctcgaaggtcaaaaacagtaaaaccatagacatcggcgatattatcgacctgacgctcaattcccttccctataaaatcaaggttaaaggtttgaaccaccaacgccgcccggcatccgaggcgcggcttctgtatgaagaggacgcgaaaacggcaacattgagggaagagcgcaaacagctcgaccaattcagccgcatcacttccgcctatcccgacggcagaccgaccaagcgcgaccgccgccaactggacaggctgaaaaaaggagactggtaa

SEQ ID NO: 29710 - DNA, 960 bp, Neisseria meningitidis
atgaaacctgtttttttggattttgaacaacccatagccgaactgaccaacaaaatcgatgagctgcgtttcgtccaagacgagtctgccgtcgatatttcggacgaaatacaccgtttgcagaaaaaaagcaacgacctgaccaaatcgattttcagcaaactcacacccgcccaaatttcacaggtttcccggcatccgcagcgtccctatactttggattacattgaggcactgtttaccgattttgaagaactgcacggcgaccgccactttgccgacgattatgcgattgtcggcggattggcgcgtttcaacggacaaagcgtgatggtcgtcgggcatcagaaagggcgcgacaccaaagaaaaaatccgccgcaacttcggtatgccccgtcctgaaggctaccgcaaagccctgcgcctgatgaagacggcagaaaaattcggcttgcccgtaatgacctttatcgatacgccgggcgcgtatcccggcatcggcgcggaagaacgcgggcagtcggaagccatcggcaaaaacctgtacgaactgacgcgcctgcgcgttcctgttttgtgtaccgttatcggcgaaggcggttcaggcggtgcgttggcggtcgccgtaggcgattacgtcaatatgctgcaatactcgacctattctgttatctcccccgaaggctgcgcgtctattttgtggaaaaccgccgaaaaggcggcggatgcggctcaggctttgggcattactgctgaccgcctgcaaaagctggacttggtcgataccgtcatcaaagaaccattgggcggcgcgcatcgggatttcgggcaaaccatgaaaaacgtaaaagccgttttggaaaaacaactgcacgaagcgcaaagcatcccgcttgccgatttgctttcgcgccgtttcgaccgcattatggcttacggcaaattttcggaacaataa

SEQ ID NO: 29711 - DNA, 1281 bp, Neisseria meningitidis
ttgaaggattgttttcctcaaggtctgaatggaaaaaaaacagcggtggcattaagcggcggcttggattccgtcgttttgctgcatctgcttgtccgcgccggaaaaaagggcggttttattccggatgcattgcatatccatcacggcttgagtccccgtgccgacgattgggcagatttctgccaaaactattgcgatatgctcggggtggggctggaaacggttaaggtctgcgtggaaaaaaacggtttgggcatcgaggcggcggcaaggcaaaagcgttatgccgcgtttgccgaaaaaggctttgacgttttggcgttggcgcaccacagggacgatcaaatcgaaacctttatgctggcggtcgcgcgcggcggcggtttgcgcgctttggcggctatgcccgccgtccgcccttttggggaaaaaggcatcatctggcggcccttgctgcctttttcgcgccaagatatatgggattatgcccaaaaacacggtttgccgaatatcgaggatgaaagcaataccgatacggcttatttgcgaaaccgcttccggcaccgtattttgcccgaactttcggcgcagattccccatttcgggcggcatgtgctgaacaatgtccgcgctttgcaggaagatttggctttgttggacgaggtcgtcgttcaggactgccgttgggtttgcggggccggttatttcgatacggcgcggtggctgacgttttccccgcgccggaaaacccatattttgcggcattttctgaaggaaaacggcattcccgtgccgaatcagaatgcccttgccgacattgcccgggttttgacggaggcaaaaaccggacgttggaacttgcaaggctttgaattgcatcattatgcaggcaggctgtttgtgttccgactggaaaaaacggataaactgcggtttttgaaagacaggcagataagcggaaatttaagggaaatattgacggggcagggatttgtgttgaagcggcatccgtttgggcttcctgagcatcttttggagcaggacggaattttgaggacggtagcggcatcggatacgttggccatgggcggcatccataaggatgtgaaaaaaatccttcaggggaaacgggttttgcctgtcctgcgcccaatttggccgcttgttgccgacagcggaaaccgtccattggcgttggcaaactgttgtgcggatttccaatactcggtttcagacggcattttgcccgtccatcctgactttcccattttattttga

SEQ ID NO: 29712 - DNA, 786 bp, Neisseria meningitidis
gtgaaacacatcagttcgaccaataatgaacacatcagacacctgcaccgcctgttgtcgcaaggaaagttcagacggcaatacgcccaaaccgttttggagggcgtgcacctgcttcaggttttcctgcaatccggcgggatgccggtcggggtatatattcccgaagcgaaaatgccgtctgaagaagtccgtaaattgacggcggttttgccggaagacgggtttttttccgtttcagacggcatattgaagaaaatcagcagcctgacttgtgcggatgatgtgcttgcgctgattgatattccagatgcgggtgctttgccggccggcggcgattgcgtggttttggacggcgtgcaagacccgggcaatgtcggcacggtgttgcgaagcgcggcggcggcgggaatcggcgcggtcattttgggcaaaggttgtgcggacgcgtggtcgcccaaagtgctgcgagccggaatgggcgcgcatttcttgtcggagatttatccgcaggcggatttggaaatatggttggtgcgctataaaggccgtgtgtttgccaccgccttgcgcgaggaaaagcaggcggttttgtacggcgaagatttgtgcgaaccgacagcctgggtgtttggcaacgaaggcgcgggggtcggtaaagcagttttagatagggcggacaagtgtgtcaggataccgatgcacgatgcaaccgagtctttaaatgtcgcgatggcggcgacaatctgcctgtttgaacaaatgcgccaacgggcggcgtattga

SEQ ID NO: 29713 - DNA, 1053 bp, Neisseria meningitidis
atgaccgtatcccccgtagccttgcgccgcaagaccgagtgcaagccgcatcccaccgcgcgctattggaaaaaatgcgatgtcgaagccctgttcggacttcccttcctcgacctcatttaccaagccgccgaaatccaccgccaaaatttcaacccgcgcgaaatccagctttccacgctgttgtccatcaaaaccggcggttgtcccgaagattgcgcctactgtccgcaatcggcgcaccacaacaccaatctgggcaaagagcagatgatggatgtggatgaaatcgtcgaaaaagccaaaatcgccaaatcgcgcggcgcaagccggttttgtatgggcgcggcatggcgcggccccaaacccaaagacgtggagacggtttccgcaatcatcaaagccgtcaagggcttgggtatggaaacctgcggcacgttcggtatgctcgaagaaggtatggcggaagacttgaaagaggcgggcttggattattacaaccacaacctcgacaccgaccccgaccgctacaacgacatcatccatacacgccggcatgaagaccgtatggacaccttgggcaaagtccgcaacgccggtttgaaagtctgctgcggcggcatcgtcgggatgaacgaaactcgtgccgaacgcgccgggctgattgccagcctcgccaacctcgacccgcagcccgaaagcgtgccgattaaccggttggtcaaagtggaaggcacgccgcttgacgatgccgaagatttggactggacggaatttgttcgcaccatcgccgtggcgcggattacgatgccgcaaagttatgtccggctgtcggcagggcgcagcaatatgccggaagcgatgcaggcgatgtgctttatggcgggcgcgaattcgattttttacggcgacaagctgttgaccacaggcaatccggacgaagacggcgacagaatcctgatggaaaagcttaacctgtatcccttacagtttgagctggaaggcgaggtcgccgaagtggaaaaagcctcggggattaaagtggattattga

SEQ ID NO: 29714 - DNA, 1860 bp, Neisseria meningitidis
atgccagaataccgctccaaaacctccacccacggtcgcaatatggcgggcgcgcgcgcgttgtggcgcgccaccggcgtgatggaaaccgacttcggcaaaccgattatcgccgttgccaactcgttcacccaattcgtgccaggtcatgtccacctgcacaatatgggccagctggttgcccgcgaaatcgaaaaagccggcgccatcgccaaagaattcaacaccatcgccatcgacgacggcatcgctatgggacacagcggtatgctgtattccctgcccagccgcgatttgattgccgactccatcgaatatatggtcaatgcccactgcgccgacgcgctggtgtgcatttccaactgcgacaaaatcaccccgggcatgctgattgccgcgatgcgcctgaacatcccgaccatcttcgtttccggcggtccgatggaagcaggtaaagttatcggcgtggcaaacatccagcccgaacgccgtttggacttgattgacgcgatgattgaatcggcggacgacaatatcagcaaccggcaagttgaagaagtcgaacaaaacgcctgcccgacctgcggctcgtgttcgggtatgtttacggcaaactcgatgaactgcctgaccgaagcactcgggctgtccctgccgggcaacggttcttacctcgccacccacgtcggccgcaaagaactgttcctcgaagccggccgtatgattgtcgaaatcaccaaacgctattacgagcaaaacgatgaaaccgtgttaccgcgcagcattgccaccaaaaaagcgtttgaaaacgctatgaccatggacattgccatgggcggcagcaccaacactattttgcatttactcgccgttgccaacgaagcgggcgtggatttcaaaatggcagacatcgaccgcttaagccgcgttgtgccctgcatctgcaaaaccgcacccaacaaccacgactactatatggaagacgtgcaccgagccggcggcatcttcgccatcctgaaagaattggacaaagcgggcaagctgcacaccgacgtgcacactatccacgcgccgacgctgaaagacgcgattgaaaaatgggacgtaaccaaccctgaaaacacccacgccatcgaacgcttcaaagccgcgcccggcggcgtacgcaccacccaagcgttctcgcaaaaccgtatgtggaaaaccctcgacctcgaccgcgaaaaaggctgtatccgcgacgtggcacacgcctactcgcaagacggcggtttggcggtcttgttcggcaacatcgccgagcgcggctgcgtggtaaaaaccgcaggcgtggacgagagcatcctcaaattcaccggccgcgcccgcgtgtttgaaagccaagaagacgcagtagaaggcattttgggcaaccaaatcgtcgccggcgacatcgtcatcatccgctacgaaggcccgaaaggcggcccgggcatgcaggaaatgctgtatccgacttcctacctgaaatctaaaggcctcggcaaagcctgcgctctcttaaccgacggacgcttctccggcggcacatcaggtttgtccatcggacacgcctcgcccgaagcggcggaaggtggcgcgatcggtttggtacacgaaggcgataccgtcgaaatcgacatccccaaccgcagcatccgccttgtcatttccgacgaagaactcgccgcccgccgtgccgaaatggaagcacgcggcagcaaagcgtggaaaccggaaaaccgcgaccgctacgtctccgccgcattaagagcttacggcgcgatggcgacttccgccgacaaaggcgcggtgcgcgacgtagcgcaaatcgaaagataa

SEQ ID NO: 29715 - DNA, 1461 bp, Neisseria meningitidis
gtgaattatttccccattttcgccaacctcgccggccgccccgtattggtcgtaggcggcggcgcagtcgccgcacgcaaaatcagcctgctgctgaaggcgggcgcagaggtcagggttgccgcaaaacacctgaatgccgaactctccgcgttggcggcggaaaacaaaatcctgtggcttgccgaagaatttcgtgccgaacacatccgcacggttttcctcatcattgcggcaagcagcgaccaagccctcaaccggcgcgttttccatcttgccgaaagctgccaaaagccggtcaacgtggtggatgaccgcgaccattgcagcttcatcttcccatcggttatcgaccgcaacccggttcagattgccgtttccagctccggcagcgcgcccgtcctcgcccgactgctgcgtgaaaggctggaagccctgctgccgccgtctttgggcgatatggcggaaatttcaggaaggtggcgcgatgccgtcaagggcaaactgaaatccgttaccgaacgccgccgcttttgggaaaagcagtttaacggacgtttcgccgccctcgtcaaaaaccggcaaaacacccttgccgaacgggaattggcaggccaattggaacaaagtcgtcaaaatgatcaaggcggctccgtctcgctggtcggcgcgggtcccggcgatgcggggctgctgacgctcaaagggctgcaggaaatccagcaggcagacgtggtgctttacgacgcgctggtttcagacggcatactgtccctcgtccgccgcgatgcggaacggatttttgtcggcaagcgcgcccggggcggccgcaccccgcaagaggacaccaatgcgcttatggtcaggctggcccgcgaaggcaggcgcgtggtgcgtttgaaaggcggagaccctttcgtgttcggacgcggcggcgaagaattggaaaccttggcacgccatcagattccgttttcggtcgtccccggcattaccgccgccgtcggcgcgaccgcctatgccggcatcccgctcacgcaccgcgattatgcccaaagtgcggttttcgtaaccggccaccgcaaggcggatgcgcccgacatcgaatggcagacccttgcccgcagccgccagaccttggtgatttatatgggtgcgctcaaagccgccctgattgccgaacggctgcaacagcacggacgctcgcccgacacgccggcagccgtcatcagccaaggcacgctgccggctcaaaaaaccgcaaccggcacgctcgccaaccttgccgaactcgccgaaaccgcgccgaatccggcattgattgtcataggcgaagtggtggggctgcacgaaaaactggcttggttcggcgaaaacgccaaaaaagaaagcaatccggccgaacacgcgtattttgcattggacggactgggcaccggacaagaacaacaagccgcataa

SEQ ID NO: 29716 - DNA, 1812 bp, Neisseria meningitidis
atgaaacaaatccgcaacatcgccatcatcgcccacgtcgaccacggcaaaaccacattggtcgaccaactgctgcgccaatccggcacattccgcgccaaccagcaggttgacgagcgcgtgatggacagcaacgaccttgaaaaagaacgcggcatcaccatcctcgccaaaaacaccgccatcgattacgaaggctaccacatcaatatcgtcgacacgccgggacacgccgacttcggcggcgaagtagagcgagttttggggatggtggactgcgtcgtcttgttggtggacgcgcaggaaggcccgatgccgcaaacccgtttcgtgaccaaaaaagccttggctttggggctgaaaccgattgtcgtcatcaataaaatcgacaaaccgtccgcccgtccgagctgggtcatcgaccaaactttcgagctgttcgacaacttgggcgcgaccgacgagcagttggatttcccgattgtttatgcttccggtctgtccggtttcgccaaattggaagaaaccgacgagagcaacgacatgcgtccgctgttcgatactatcttaaaatatacgcctgcaccgagcggcagcgcggacgaaacgctgcaactgcaaatttcccaactcgactacgacaactacaccggccgcctcggtatcggtcgtatcttgaacggacgtatcaagcccggtcaagttgttgccgtcatgaaccacgatcaacaaatcgcccaaggccgcatcaaccagcttttgggtttcaaaggtttagaacgcgtgccgcttgaagaagccgaagccggcgacatcgtgattatttccggtattgaagacatcggcatcggcgtaaccatcaccgacaaagacaaccccaaaggcctgccgatgttgagcgtggacgaaccgacgctgacgatggactttatggtcaacaccagcccgttggcaggtacggaaggcaaattcgtaaccagccgccaaatccgcgaccgcctgcaaaaagaattgctgaccaacgtcgccctgcgcgtggaagataccgccgatgccgacgtgttccgcgtatccgggcgcggcgagctgcacctgaccattttgctggaaaacatgcgccgcgaaggctacgaactcgccgtcggcaaaccgcgcgtcgtgtaccgcgacatcgacggtcaaaaatgcgaaccgtatgaaaacctgaccgtggacgtacccgacgacaaccaaggcgcggtaatggaagaactcggccgccgccgtggcgaactgactaatatggaaagcgacggcaacggacgcacccgcctcgaataccatattccagcgcgcggcttgatcggcttccaaggcgaatttatgaccctgacgcgcggggtcgggctgatgagccacgtgttcgacgattacgcgcccgtcaaacccgatatgcctggccgccacaacggcgtgctggtgtcccaagagcagggcgaggcagtcgcttacgccttgtggaatctggaagaccgcggccgtatgttcgtatcgcccaacgacaaaatctacgaaggtatgattatcggcatccacagtcgcgacaacgatttggtggtcaacccgctcaaaggcaaaaaacttaccaacatccgtgccagcggtaccgacgaagccgttcgcctgaccacgccgattaagctgacgctggaaggtgcggtcgagtttatcgacgatgatgagctggtagaaatcacgccgcaatccatccgtctgcgcaagcgttacttgagcgaattggaacgccgccgccatttcaaaaagctagattga

SEQ ID NO: 29717 - DNA, 2559 bp, Neisseria meningitidis
atgcctgcaaacctgtcttcagcactggaaaccttcaaacagcagcgcgatgccgccgaagcgcattatttgaaagccaaccgcgtgtcggtatttttcagagaatacacggcggcagtcgaaaccttactggcggcattgtgggcagagtattttcaaaacagcgcgttatgcctgatggcggtaggcggcttcggacgcggagaactgtatccctgttcggatgtggatttggcggttgtctcccctgccccgctttcagacggcattcaggaacagattgcccggtttgtccaaaccctgtgggactgcaaactgatgccgtctgtaaaaagcggcagcgttgatgaactatgtgaaagcgtgcgcaatgatattacgggggacacagcgtttttagaggctaggtttttgtttggcaaccgccaaacggcggataaactagcggaaaaaatgaacgcgcagcgcaatgtggcggcgtttgtcgaggcaaaactggtggagatggaacaccgccacgccaaatcgcaaggttcgggggcagtattggagccgaatatcaaaagctgtccgggcggtctgcgcgatatccacaccctgctttggatagcgaaggcgcaaggcttggcgaccgacctgcccgacctgctcaaacagcggattttgacgcgtgccgaagccggtatgctttcgcacggctaccgccgcctcgcccacatccgcatccatctgcatttaaacgccaagcgcgccgaagaccgcctgctgttcgatttgcagccgcaagtcgccgaaagcatgggttatgaaggcttgaacctccgccgccaaagcgaagaactgatgcgcgtgttttaccgcgcgattaaaaccgtcaaacaactgagcggcatcctcacgcctatgctgcgaagccgcgtttcctccgcgccgatgcgcgttaccctgcggattgacgacgactacatccaagtcaacaaccaaatcgccgcgcggcacaccgatatttttttcagacggcccgaacacattttcaaaatcgtcgaaatcatgcagcagcgcaacgatattaccgcgctcgaaccgcaaaccctgcgcgcatggtggggcgcgacgcgcaaaatcaaccgcagcttctaccaaaattctgaaaaccgccaccgcttcgccggctttttccgcaacggcaacggactgacccaaaccctgcgcttcctcaacctctatggcgtattgggacgctacctgcccgcgtgggaaaaaatcgtcggcctgctccaacacgacctgttccacatctatcccgtggacgaccacatcctcaccgtcgtccgcaacgtccgccgccttgccttggatatgcacagccacgagctgccctacgcctctgcactgatgcagtcctttgaaaaacaagacatcctctaccttgccgcctttttccatgacatcgccaaaggacgcggcggcgaccatgccatacaaggcatcgcagacgcgcgccaatttgccgctgaccacttcctgaccggagaagaaagcgacctgctcgcctggctggtcgaaaaccacctgctgatgtctgccgtcgcccaaaaagaagacatccaagaccccgacgtactcgatgctttctgcaaacgcgtccaaacccacgaacgcctcagcgcgctctaccttctgaccatttccgacatacgcggcaccaatcccaagctgtggaacgcatggcgcgccagcctgctggaaagcctcttccatgccgccggacgctaccttacaggcaacggcggcaacccgcacaccctcttcggccgccgccggcaggaagccgccgacttactcacccgcgccgccgtccccgaaaaacagcagaaaaaactatggaacgcgctcggttccgcctacttcgcccgccaccagtcccgcgaaatcctgtggcacgccgccaacctagtccacgattttgaaacccccatcgtccgcagccgcatcctgttcaaaagcgacagctttcaagttatggttttcatgcccaacgggccgcgcttgtttgcccgtctctgccgtatcttcagccgccacggcttcgacattctcgccgcccgcgcctttatcaccgaacacgactacatcctcgacaccttcatcgtgcaaattccctcgcagcacgcccccgaagactaccccgacatccaaagcgcgctcgaagccgaactcaacagctttatccacggacacaccgttgccgaaacccaaagccacagccgccgcatcagccgccgcagccgctatatgcccattgcaccgagcatcaccatcacccccgaagaagactaccccgactggtactccgtcgaaatcaccgccgtcaaccgccctttcctgctcgccgatatggcggaagtctttttcgcccacaacgtcagcctgcgctacgccaaaatttccacgctggatgaacgcgccgaagacagttttaccgtttttagcctagacctgaaaaacccaaaaatccagtcctcattgaagcagacgctgctggaacaattatcataa

SEQ ID NO: 29718 - DNA, 984 bp, Neisseria meningitidis
atgagtgaaatcaaaaccgacgaccccaaacgcggcatcaaactcagaggcgcggacaaaaccgcccgcatccccatcaaagtcgtcccccttcaggaaaaattaaaaaagcccgaatggatacgcgccaaacttccatcgcgcaaattctttgaaatcaaagacattttgcgcgaacaaaaaatgcacaccgtttgcgaggaagcctcctgccccaacatcggcgaatgcttcagcaaaggcacggcgaccttcatgattatgggcgacatctgcacccgccgctgcccgttctgcgacgtgggacacggccgcccgaatatgctcgaccccgacgaaccgaaaaacctcgccgaatccgtcaaagccatgaacctgcgttacgtcgtcatcacctccgtcgaccgcgacgacctgcgcgacggcggcgcacagcatttcgccgactgcatcaaagccatccgcgaaaccagcccgaacaccaaaatcgaaatcctcgtccccgacttccgaggacgcttggacatcgcactcaaaatccttgccgaaaccccgcccgacgtgatgaaccacaacctagaaacccatccgagcctgtacagaaaagcccgtcccggtgccaattatcaacattctttagacttattaaaacgttataaagaaatgatgccgcacatcccgaccaaatccggcatcatggtcggcttgggcgaaacagacgaagacgtgcgtgaaattatgcgcgatatgcgggcgcacaatatcgaaatgattaccatcggacagtacctccagccttcagacggacacctgcccgtcctgcgctacgttacgcccgagcagttcaaaatctttgaaaaagaagcatacgaactgggcttcagcaatgccgccatcggcgcgatggtacgttccagctaccacgccgacgaacaggctgccgaagccttacgcgaaagccacggcggttgcgggcatcattaa

SEQ ID NO: 29719 - DNA, 270 bp, Neisseria meningitidis
gtgaacaagtctgaattgatcgaagcgattgctcaagaagccgacatttccaaagccgccgcacaaaaagctttggatgccactaccaatgcagtaaccaccgccctgaaacaaggcgacaccgttactttggtcggtttcggtactttctacgtgggcgaacgtgcggaacgccaaggccgcaaccccaaaaccggcgagcctctgaccattgccgccgccaaaacgcctaaattccgtgcaggtaaagcattgaaagacgcactgtaa

SEQ ID NO: 29720 - DNA, 2463 bp, Neisseria meningitidis
atgacacaaaaagaaaagcattttgaggaatatgccgccttggcaacccttcctttgcgggatgtcgtcgtttacccgcatatggttctgccgctgtttgtcggcaggccgaaatccatcgccgcactggaaaacgccattacccgcgaggagccggttttcctgttggcgcaaaccgatgcggcggtagaagaaccggttgccgccgacctgtatcagaccggtacggtcgcacaagtcctgcaagtgttgaaactacccgacggcacggtaaaagtattggtcgaagggctgtatcgcggacgtgttctgaccattgaagacacgggcgggctgttcgtttcccatatagaggcggtcgtggaagaagacacgggcggcaataccgacctcgaagccgtgcgccgcaccctgttggcgcagtttgaacaatacgccaaactcaataaaaaaatccccgccgaaattatcggcagcattaacggcattgccgaaaacagccggctaaccgatacggtcgcagcgcatttgcagttgaaactggcgcaacgccaacagattttggaaattcccgaaatcggcaaacggatggaattcctgctggcacagctggaatccgaactcgacattatgcaggccgaaaaacgcatacgcggacgcgtcaaacgccaaatggaaaaatcccagcgcgaatattatctgaacgaacagattaaagcgatacacaaagaactgggcgaagaagacgaaaacggcgaactggatgccttggaagcagatatcaaaaaggcgggtatgaccaaagaagcggaagaaaaatgcctgtccgaactgaaaaagctcaaaatgatgccgccgatgtctgccgaatccaccgtcgtacgcaactacatcgacaccctgctcgaactgccgtggaagaaaaaatcccgcgtcagcaaagacatcgccaaagccggattggtgctggataccgaccactacggcctggaaaaagtcaaagaacggattttggaatacctcgccgtccaaaaacgtatggacaaactcaaaggcccgattctgtgcctggtcggccctccaggcgtgggcaaaacctctttgggcgaatccatcgccaaagcaacggggcggaaatatgtccgcatggctttgggcggcgtgcgcgacgaaagcgaaatccggggacaccgccgcacctatatcggctccatgcccggtaagattttgcagaatatggcaaaagccggcgtaaaaaacccattgttcctgctcgacgaaatcgacaaattgggtagcgacttccggggcgatcccgccagcgcgttgctcgaagtgcttgatcccgagcaaaacaacaagttcgccgatcattatgccgaagtggattacgatttgagcgatgtgatgtttattgcgacttcaaacagcctgaatatcccgaccccgctgctcgaccgtatggaaatcatccgtctgtccggctacaccgaagacgaaaaaatcaatatcgcgatgcagtacctcgtgccgaagcaaatgaagcgcaacggcgtgaaagaaggcgaattgctcgtcgaagaaagcgcggtgcgcgatattatccgttactacacccgcgaggcgggcgtgcgttcgctcgaccgcgagattgccaaaatctgccgcaaggtggtgatgcagattaccttggacgaagataagaagaggttgtctgaaaccaagaaaaccagcaaagccaaacctaaagcggttaaagtaaatgagaaaaatctgcacgactatttgggtgtgcgccgcttcgattacggcgttgccgaaagcgaaaaccgtatcggacaagtaaccggtctggcgtggacagaagtcggcggcgaattgctgaccgtcgaagccgcagcattgccgggtaagggcgtgattcagtgcaccggccagttgggcgatgtgatgaaggaatccgtgtctgcagcgtggtcggttgtccgctcccgcgcggaatcagtgggcttggcttctgatttttacgagaaaaaagacatccatgtccatgttcccgaaggtgcaacgccgaaggacggtccgagtgcgggcattgccatgactttggcgatggtgtctgcattttccaaaatcccggtacgcgccgatgtagcgatgacgggcgaaattaccctgcgcggcgaagtcctgccgattggcggtctgaaggaaaaactgttggctgcgcttcgcggcggcatcaaacacgttttaattccaaaagacaacttcaaagacttggaagaaatccctgaaaacgtgaaaaccggcctgaccatccatccggtcaaatggatagacgaggtattggctctgggtttggaaagccagcctgagccttgggcagaaccttctggtgcggaagcggtggcggaatccgcttcaaaaccaaaaccccgcagcagggcaaccaaacattga

SEQ ID NO: 29721 - DNA, 1746 bp, Neisseria meningitidis
atggaacggcagacagatgaatttgcccaagcggcggcaagggcggcaatccgttttttggaacactatgcgagttccggcgacgaagtgcttgcaaactgcaccgaacgcctgtttcaggcattgcaaaacggtcattcgtttatccgtttgagcggtggcgaggctgacgcgctgtcggcactcgcacccgttgtcggaacatccgccgcgcctttgattttggaaggcagaaggctgtttttgggcaggatgtggcagttggaatacgatttggctgccgagataaaacgcttggcggcagccgacacgtccgcccccgacgcggcaggcgcgaggcaaaacctcgcaaaatggtttcaaggcacgggcagcgaagggcagcgcgatgccgccgccttggcactgttgcagtcttttatggtgattaccggcgggccgggaacgggcaaaacgacaacggttgccaaactgctggcgctgatttgcggtaaagacgaaaatcttcccaacatcgcgcttgccgcaccgacgggcaaagcggcggcacatatggcgcgcgcgctgcaccgtgcaatcaacggttttgacgcgctggaggccgtccgccgccatttgctcaaactggaagggcaaaccgtccaccgactgctgaagctgcgcccgcccaaaatgcaggcggcgttcaaccctgtttacccgctgccgtttgacgtattggttatcgatgaagcctctatgctggatacggcattgatgctgcaacttttaaaagcggtcaaaaccggcgcgcgcgtgattctgctgggggatgaaaaccagctcccgtccgtcggaataggggcggtgctgtccgttttgtcacaaaaaaccgttttggacggagaaacgcaccaaaggctggccggcttccttccggaacacggtttcagcgtcagcgcaaatccacccgtgttggcgcaaaacaccgcccatctgtcgttcagccaccgcttcggcgacaacagcggcatcggctgccttgcccgtgccgccgtatcgggcgatgaaggggcgtgggcattgtttgaccggtttccggacgaactggaacattcggaatgcagtccgaacgctcgagtcgaaaggttgtaccgggcacacaaagcctattggcaggcggtaaaagacggcaatatcgaagccgcatacgcgggcatttcggatatcgtggttctggcagcttggcggcaggatgcggaagacttcaacgaagcctattgccgccatgtacgccgcaaaatgaacataccggaacatttggcatattttgccggagagccgattatgatcaggcagaacgactacgcgcttgaactgttcaacggcgacatcggactgattatggaagatgtcggacggcagggcagccttgccgcctattttgccgatgcggacggatttaaaaaggtagcggtaagctgcctgcccgaatttgaacccgcattcgccatgaccgtccacaaaagccaaggttcggaatatcgggaagtctggctgctgccgccttccgccgcaccttcggacgaaggggacgatgcattgtccggattgagtaaggagctgttatataccgccattacccgcgcgagggagaagttcgtattcttcggcggagaagaaaccttccggcaagctgccgccactgtcaaaacgcgtcagacggcattgggcagtatgcttgagcgggtattttcacaaggataa

SEQ ID NO: 29722 - DNA, 618 bp, Neisseria meningitidis
atgagccacaaaaaacaagatgccttccaaggattgatcgacgcgctgaaggttttacccaacgtcgggccgaaatcggcacagcggatagcgtatcatttgctccaacacaagcgcaaagaggctgaaaaactggtggatgccttgcagacggcattgaagcaggtcgatcattgcgcgaggtgcaacacgttttgcgaaggcggattgtgcgatatttgtgccgatgaaacacgcgacgggcgacggctgatggtggtgcatatgcctgccgacgtgtcgaatatggaagcggcaaactgccacgacgggctgtatttcgtcctgatggggcaaatcaatacggcattgggaatggacgtatccgccatcgcattggacaggctggcgcaacggctgggcggcggggaagtcgaagaaatcattattgcaaccgcttttaccgcagaaggcaatgcgacggcgtatgtcctgtccgagttttttaaaaacctgccttacaaagtcagcaggctgtcgcagggcattcccttgggcggcgaattggaatatgtcgatgcgggaacgctggcgcaggcggtgtacgaacgccgcctgattaaagaaggcggggcataa

SEQ ID NO: 29723 - DNA, 1629 bp, Neisseria meningitidis
atgatttctaccaacggcatcaccatgcagttcggcgcgaagccgctgtttgaaaacgtatccgttaaattcggcgaaggcaaccgctacggtttgatcggcgcgaacggctcaggcaaatccaccttcatgaaaatcctcggcggcgatttggaacagacagccggcgaagtggcgattgaaaacggcgtgcgtttgggtaaattgcgccaagaccagtttgcctacgaagatatgcgcgtgctggacgtggtaatgatgggtcacaccgaaatgtgggcggcgatgaccgaacgtgatgcgatttacgccaatcccgaagccaccgaagacgactacatgaaagccgcagaactggaagccaagttcgccgaatacgacggctacaccgccgaagcgcgtgccgccgagttgttgagcggcgtgggcatttccgaagatttgcacaatgcaaccatggcagaagttgccccgggcttcaaactgcgcgtattgctggcgcaagccctgttctccaagccggatgtattgctcttggacgaaccgaccaataacttggacattaataccatccgttggttggaaggcgtgttgaaccagtacgactccacgatgattatcatctcgcacgaccgccacttcttgaacgaagtctgcacgcatatggcagatttggattacaacaccatcaccatctatccgggcaactacgacgactatatgctcgcctccgcccaatcgcgcgaacgcgccctgaaagacaatgccaaggcgaaggaaaaattgcaggaattgcaagaatttgtggcgcggttcagtgccaacaaatccaaagcccgtcaggcaaccagccgtctgaaacaggcagacaaaatcaaatcggagatggtcgaggtcaaaccctctacccgtcaaaacccgtatatccgttttgaagccgatgaaaaagccaagctgcaccgtcaggctgtggaagttgaaaaactggcgaaacgctttgaaacccagttgtttaaaaacctgaactttatccttgaagcgggacaacgcctcgccatcatcggcccgaacggcgcgggcaaatccaccctgctgaaactcttggccggcgcgtacaaccccgaatattcagacggtctgctgccggacgaaggcagcatcaaatgggcggaaaaagccagcgtcggctactatccgcaagatcacgaaaacgacttcgatgtcgatatggatttgagcgaatggatgcgccaatgggggcaggacggcgacgacgaacaagtcatccgcggcactttggggcgtttgctcttcggcagtaacgatgtcgtgaaaaaagtgaaggttctctccggtggtgaaaaaggccgtatgctttacggcaaactgttgctgttgaaacccaatgtcttagtcatggatgaaccgaccaaccacatggacatggaaagcatcgaatccttgaacatggcgctggaaaaatacaacggcacgctgattttcgtctcccacgaccgtcagttcgtttcttccctggctacccaaatcattgaattggacggcaaaggcggatatgaacactacttgggcgattacgaaagctatctcgagaaaaaaggcgtagcataa

SEQ ID NO: 29724 - DNA, 1254 bp, Neisseria meningitidis
atgcagacttatctcgtcggcggtgccgtccgcgattatcttttgggcttgcccgtcaaagaccgcgattgggtggtcgtcggcgcagacgcacaaaccatgctggcgcaaggcttccagccagtcggcaaagactttcccgtgtttctccatcccgaaacacacgaagaatacgccctcgcccgcaccgagcgcaaaaccgccaaaggttacgtcggtttcagtttccacgccgacaaagacgttacgctggagcaggatttgatgcgccgcgacctgaccatcaacgcgatggcgcaagatgcggacggcaagattatcgaccctttcggcggacaacgggatttggcggcaggcattttgcgccacgtttccccagcctttgccgaagaccccgtccgcatcctgcgtactgcccgctttgccgcgcgttacaagtttgaaatcgccgaagaaaccataaagctgatgcggcagatggtggaaaacggcgaagcggacgcattggttgccgaacgcgtctggcaggagtttgcgaaaggtttgatggaaaaaaatccgcgcaaaatgattgaagtgttgcgcgaatgcggcgcgctcaaagtcttgctgcccgaagtcaatgccctcttcggcgtgccgcaacgcgccgactaccatcccgaaatcgacagcggcatccataccctgatgacgctgcaacgcgccgccgatatgggtttgagcctgcccgaacgctatgccgccctgctgcacgacttgggcaaagccaaaacaccgtccgacatcctgccgcgccaccacggacacgacctcgccggtgtcgaacccgtgcgcaaagtcaatcaaaggctgcgtgcgccgaaacattgtgccgagcttgccgaattggtttgccgttggcacattattttccaccaagtcggacagcttaaaagccaaaccattctgaacgtattgaaaaaaaccgacgctttcagacgacccgaacgctttcagacggcattgaacgtctgcattgccgacacgcaaggccgtctgaaccgcgaacacacgccctacccgcaacgcgcgcactggctcgccttactcgaagccgccaatcaggcggattcgggcaaaatcgccgccgaatgccgctcgcagggaaaagcgcaccttatcgccgaacaaatcgaccgggcgcggctggcacaaatcgccccattgcaaaaagcgtttcgagcggcgcaagacaaaacagaaaaacattaa

SEQ ID NO: 29725 - DNA, 435 bp, Neisseria meningitidis
gtgccactgcctgctccctgccgttttgccaaacctgccgcctcttttttaagtatggctttgctttcctgccagctttcccacgccgccacggcttatatccccctgaacgattttcaaccgaactgcgacatacgccggctcggactgacacagggtcagcacaatgaactgcgtaaaatccgcgccgccttcaaaatggcgggcgacagggcgcgtttgaaggttatgcattccgaacacagccgccgtcggtctgtcgtcgaaatcatttcctcggatgtttttaatcggaacgaggcgcgcgattatgtcgaaagccgctatttgtccggtatggattttgcggtggacgaattggaaatccaacaccggttcttccatatcctcacaccgcaacagcagcaaatgtggctttcttcctgcctcaaataa

SEQ ID NO: 29726 - DNA, 663 bp, Neisseria meningitidis
atgctacaatttgcaccatttttaccgacacagggaaacaggattatgtttacaggcattgttcaaggattgggaaaactgacggcaatccaccgcccgtcggaggcatttcagacttatgtcgtcgagcttccgcaagaggcggcggacaatctgcaacgcggcgcatcggtcgccaacaacggctgctgcctgacgattaccgaaatcgaaggaaaccgcgtcagtttcgatttaatggcggaaactttggcaaaaaccaatttagggctgctgaaggaaggcgattgcgtcaacatcgaacgggcggcgcgtttcggagacgaaatcggcggacacgtcatgagcggacacattatggcaaccgtgcctattgtcgaaatcgaacgggacgggtacaaccgcacggtttggttttcgctcccgcacgaactcaaaccctatatcctgaccaaagggttcgtcggcttggacggttgcagcctgaccataggcaaagtcgaagacagccgtttcaatgtccatttgattcccgaaactttggaacggacgctgttcggcagcagaaaggtcggcgacagaatcaacatcgaaatcgatccgaatacgcaggcaatcgtcgataccgtcgaacggctgatggcgcaaagatatgcaaagtga

SEQ ID NO: 29727 - DNA, 1773 bp, Neisseria meningitidis
atgatactgccagcccgtttttcagacggcatcagcctttccctgcgcctgaaactcctgaccggactgtgggtcgggttggcggcattgtctgtcgttttgacactgctgctctctttgcgtctggaaaacgcggcctccgtcatcgaagaggcgggcaacttgagaatgcaggcataccgtctggcatacatggcgggtgaaggctcgccccgtgcgcaaattgacaatcaggttgccgaatttgaaaaaagtttaaaacgcattgcccaaagcgatgccatccatccgctgattccttcggacacccctcttgcttatgatttgatacaatccatgctgattatagattggcaggcacacatcctccccccgctccagtcctaccggcgaccgactcaggtcgatctctaccgctttgccggaaacatcgaactgtttttgcaggcattggaaaatgccaacgaaaaaaacacatggtggctcaggcgttttcaatgggcaattatgttgatgacgctggtgtcgtctgtactgatgctgttttggcaccagatttgggttatccggccgctgcaggcgttaagggaaggtgcggaacgcatcggacggaggtgtttcgatattccggttcccgaaggcggtacgccggaattcaaacaggtcgggcgttgtttcaatcaaatgggcggcaggttgaaaattttatatgatgatttggaaggacaagtcgccgagcagacacgcagtctcgaaaaacaaaatcaaaacctgaccctgctgtaccaaactacacgggatctgcaccaatcctacataccgcaacaggctgcagaacattttctaaaccgtatcctgcccgccgtaggagcagattccggcagagtttgtttggacggcggatccgatgtttatgtttccattcatcatgcggattgcggcacagcagcttcggatttggggaagtaccatgaggaaatcttccccattgagtaccagaacgaaacattgggcaggctgttgctcagctttccaaacggcatttctcttgatgaagacgaccgcatcctgcttcaaacactaggcaggcaattgggcgtatcgcttgccggcgcaaaacaggaggaagaaaaacgcctgcttgcagtattgcaggaacgcaacctgattgcgcaaggattacatgacagcatcgcacaagcattaacgttcctaaacctacaggtacagatgctggaaaccgcctttgccgaaaacaaacgggaggaagccgcagaaaacatcggcttcatcaaaacaggcgtgcaggaatgttatgaagatgtccgcgaactgctgctcaacttccgtaccaaaatcagtaataaagaatttcccgaagccgttgccgacctattctcgcgctttacgcaacagaccggcacgactgtcgaaaccgcttgggaaaacggcacgcacctgcctacacaggacgagcagctccaaatgattttcatcctgcaagaaagcttgtccaacatccgaaaacatgcccacgccacccatatcaaattcagactgctcaaacaggatggaagttttacaatgaccattcaagacaacggacagggttttgacacggaaaacattggagaaccatcgggcagccatgtcggactgcatatcatgcaggagcgtgccaaacgcatccatgccgttttagaaatccgttcccaagctcaacagggaaccaccgtctcattgacggttgcatctgaagaaagcttgaaatga

SEQ ID NO: 29728 - DNA, 1092 bp, Neisseria meningitidis
atgtcccatatttcccccatccccgaaatcctagccgacatcaaagtcggcaaaatggtcatcatcaccgatgccgaagaccgagaaaacgaaggcgacctgctgatggcggcgcaattcgtcacgcccgaagccatcaacttcatgatcaaacacgcgcgcggcttggtctgcctgccgatggacggcgaaatggtcgaaaaactcgggctgccgatgatgacccaaaaaaacggcgcgcaatacggcaccaactttaccgtctccatcgaagccgcacacggcattaccaccggcatttccgccgccgaccgcgccctgactattcaaaccgccgtttccccgaccgccaaacccgaagacatcgtccaacccggtcatatctttccgcttcgcgcccaaaaaggcggcgtactcgtccgcgccggacacaccgaagccggcgtcgacctggcgcaaatgaacgggctgattcctgccgccgttatttgcgaaatcatcaacgacgacggcacgatggcgcgtatgcccgaactgatgaaattcgccgaagaacacaagctcaaaatcggcaccattaccgacctcatcgaataccgcagccgtaccgaaagcctgctcgaagacatgggcaatgcgcctgtacaaaccccgtggggcgagttccaacaacacgtttacgtcgacaaactctccggcgaaacccacctcgccctcgtcaaaggtacgccctctgccgacaccgaaaccctcgtccgcgtccacgaacccttcagcgtgatggacttcatccaagccaacccgcgccattcgtggtcattgcccaaagcactcgagcgcgtccaacaggcagaaagcggcgtcgtcatccttctgcaccgcaccgaagacggcgcatccctgctcgaccgcaccctgcctaaaggcgcaaaccaagcctacaaatgggacagcaaaagctacggcataggcgcgcaaatcctcgccggcctcaacgtcaaaaaactgcgcgtcctcgggcagccctcatctttcaccggcctgaccggcttcggtttggaagtcgtcggctttgaagaagcggaaaaataa

SEQ ID NO: 29729 - DNA, 1311 bp, Neisseria meningitidis
atgaccgatttgtttgcccgagaaccctacgcgccgcttgccgaacgattgcgtccgcatacgcttgacgacgtggtggggcaggaacacctcatcggcgaaggtaaacctttgcgcgtggcggtagaaggcggcaagccgcattctatgttgctgtgggggccgccgggcgtgggcaagacgacgttggcgcggattttggcgcagagtttcaacgcccagtttttgcctgtttccgccgtattttccggcgtgaaggacatccgcgaggcaatcgataaagccgaaatcgctttgcagcagggacgcgcgacgattttgtttgtcgatgaagtccaccgcttcaacaaggcgcagcaggacgcgtttttgccgcatgtcgaaagcggtttgctaacctttattggtgcgacgacggaaaatccgtcgtttgaagtcaatcccgcgctgttgagccgcgctcaggtgtatgttttgcaacccttgtcttcagacgacctgaaaaagctgattgccaaggtattggctttgcctgaataccaagagtttacgattgaaacggatgcgcaaaaattactcgtgaataccgtcgacggtgatgcgcgcagattgttgaatttgttggaacaacttttacgcgccgccgatacacgtcgtctgaaaaacttaaccgccgaatttctcgccgacagtctcggggcgcaaatccgccgtttcgacaaaggcggcgagagtttctacaaccaaatctccgccctgcacaaatccgtgcgcggttcgcatccgaacgccgcgctgtattggttctgccgtatgctcgacggcggcaccgacccgcgctacctcgcccgccgcatcgtgcgtatcgcttgggaagacatcgggcttgccgacccgcgcgccttgcaaatcgccaacgatgccgccgccaccttcgaacgcttaggctcgcccgaaggcgaactggctttggcgcaagcggtattgtatcttgccgccgccgcgaaatccaacgcgggctacaaggcatacaaccaaatgcgccacttcgtcaaagaaaacgccagcgacgaagtgcccgtccacctgcgcaacgccccgaccaagctgatgaaggaattgggctacggacgcgaataccgctacgcccacgacgaaccgaacgcctacgccgccggcgaaagctatatgcccgacggcctggacgaacccgatttctaccaacccgtcccgcgcggactggaaatcaaaatcggcgaaaagctggcgtggttgaaatcgctggacgaagaagtattaaaggcaaaatga

SEQ ID NO: 29730 - DNA, 1470 bp, Neisseria meningitidis
atggaaaaacataatgggacttatcgggatttgcaccgtccagcttcggaatttgcgacgcgggacgaatatttggaacatgaattgcagattatgcaaccaaaacgctggcggcccaacctgccctttcgcgattaccgcttcgagtgggaggatttgattcctgcgatggcgggaacgattggaaaagtggtgatggtgggggcggtggcggcggcgtttgccgcacctttggggctgcctgacagctttgtactggaaaatgtgcgctatgagcttttaatcgccgccgcgtttatcttattggtatcgggcttttttctgcccggcgccaacctgcccggtacgcacgggccgctgattccgatgattcccatcgttgtgtcggcaggcgggcatcctttggcgttcggcatttcgattgcggttttaggtctgctgatggctttatttcgcggcggcagtattatggcgaagctgacaagcaacggcgtatgcggcggattattactctatttgggctttatcggcacgacggggcaggtaaaaaaattgttttcgtgggcaggcggttttaatatgccctacatcgcttttaccgtcattattgtaacgattgtgatgtacgctttgttggagcattggaaaaaacgctggttagccgtgcctttgggatgcttgattgccggtgtggcggcatttgcattgggtgcgccgtttgagtttcacaccgcccccggcctgcctccaatgagtcctgcttattggtggggtgaaaacagcggctggcatctggggttgccgacggcagaaagttttttggttgtctttccatttgcggtattggctgttgcaatgtggtcgcccgattttttaggacatcaagtgttccaaaaaatcagctatccggaaaaaaccgataaggtattgatgaatatagacgacaccatgacaagttgttctgtccgtcaagcagtgggttctattttagggggtgcaaattttacctcttcttggggaacttatatcgtaccggcatcgattgccaaacgccccattccgggcggtgcggttttaacggcggttttatgtattatcgccgggttgtggggctatccgatggacttggcgatttggcagccggtattgagcgtagccttggtcgtaggcgtatacttaccgcttttggaagcgggcatggaaatgacgcgcaaaggcaaaaccacccaatccgccgccaccgtggtgttctcttccgccttggtcaatccggttttcggctgggcgttgacgatgctgttggataatttgggcttaatcggctgcaaagagcgcagcgcgcaattaggtttcaccggacgcgtattgatacccgtagtaggtttcttgatcttgtgtgtggcgatgggtgcggtcgggatgctgcccggtatcccgccgtttttggagcacttcaaatctttgggctag

SEQ ID NO: 29731 - DNA, 1410 bp, Neisseria meningitidis
atgaaatacatcagcacgcgcggcgaaaccgcacacaaaccgttcagcgaagttttattgatggggcttgcacccgacggcggcctgatgctgccggaacattatccgcaaatcgggcgggaagccttggacaaatggcgcggtttggcttatcccgaattggcgtttgaaattatgcgcctgttcgttaccgacattccggaggacgatttgcgcgatattctgaaccgtacttacacggaagcggcgttcggtactaaggaaatcacccccgtccgcacgctttcagacggcatcaaaatccaagccttgtccaacggcccgacgctggcgttcaaagatatggcgatgcagtttttgggcaatgcgtttgaatatgttttaaacaaagaaggcaaaaaactcaatatcttgggcgcaaccagcggcgatacgggttcggctgcggaatatgccttgcgcggcaaaaaaggtgtgaatgtatttatgctgtcgcccgatggcaaaatgagcgcgttccaacgtgcgcagatgtacagcctgcaagacgggaatatccacaatatcgccgtgaagggtatgtttgacgactgtcaggatattgtgaaggcggtgcaaaacgatgccgcgttcaaggaaaaataccatatcggtacggtcaattcgattaactggggacgcatcgtcgcgcaagtggtttattactttgccggctatttcaaagcgacgcaaagcaatgacgagcaagtcagcttttgcgtgccgagcggcaacttcggcaacgtttgcgcgggacacattgccaaacaaatgggcctgcctgtccgccgcctgattgtcgcgaccaatgaaaacgatgtgttggacgagtttttcaaaaccggcgcgtaccgcccgcgcaacagcgcgcatacttatgttacctccagcccgtcgatggacatttccaaagcgtccaacttcgagcgtttcgtgttcgacctgatggatcgcgatcctcaggaaatcaatacgctttgggcggaagtggcggcgggtaagggctttaacctgcggtttgccttggacaaagttggcggcaaatacggctttacctccggcaaatctacccacgccgaccgcctcgccaccatcagacaggtttacgagcaagaccaagaactcatcgacccgcacactgccgacggcgtaaaagtcgcccgcgaagtgcgtgaagaaagggaaacggtggtttgtttggaaaccgcgttggcggcgaaattcgatgcgaccatacgcgaagccgtcggcgatgtcgccattccgcgtcccgccgcgctggaaggtttggaaaacctgccgcaacgcgtgcaaaccgtgccgaacagtgcggatgcggtaaaaggcatcatcgaacaaacccttgcctga

SEQ ID NO: 29732 - DNA, 678 bp, Neisseria meningitidis
atgagcatcaagcaatggccggagggggaaaggcccagggaaaagctgttggaacgcggggcggcggctttgagtgatgccgaacttttggcaatcctgctgcgcgtcggcacgcgcggaatgagtgcggttgatttggcgcgttatttgctgcaggagttcggcagtttggggaggctgatgagcgcggaggtcggcaaactgtcggcatacaaagggatggggacggcaagtttcacacagtttgccgtagtcagggaaatcgggcggcggatattggcggaagaattgcaggagagcatcgtcctgtccgatccggataccgttgccgattatttacgctttcatttggggcaggaaaaagtcgaagtcagcgtcgcgctgctgttgaaccgccaaaaccaactgattgcggtcagagagctgtcgcgcggtacggttgcggaaaacacgatttacatccgtgaaattgtcaaactggcattggacgaatatgccgacagcctgattatcgcgcacaaccatccgggcggctcgcccgaaccttcgcaggaagacatcatgttcacaaggcggctggcacaggcaatgtcgctggtcgatgtgtcgctgctcgaccattttatcgtaacggcgcaaaccgtccgttcgttcaggcagctcgggctgatgccctga

SEQ ID NO: 29733 - DNA, 1410 bp, Neisseria meningitidis
atgacagcacaaaccctctacgacaaactttggaacagccacgtcgtccgcgaagaagaagacggcaccgtcctgctctacatcgaccgccatttggtgcacgaagttaccagccctcaggcatttgaaggcttgaaaatggcggggcgcaagctgtggcgcatcgacagcgttgtctccaccgccgaccacaacaccccgaccggcgattgggacaaaggcatccaagacccgatttccaagctgcaagtcgatactttggacaaaaacattaaagagtttggcgcactcgcctattttccgtttatggacaaaggtcagggcatcgtacacgttatgggccccgaacaaggcgcgaccctgcccggtatgaccgtcgtctgcggcgactcgcacacttccacccacggcgcattcggcgcactggcgcacggcatcggcacttccgaagtcgagcacaccatggcgacccaatgtattaccgcgaaaaaatccaaatccatgctgattgccgttgacggcaaattaaaagcgggcgttaccgccaaagacgtggcgctctacatcatcgggcaaatcggcacggcaggcggtacaggctacgccatcgagtttggcggcgaagccatccgcagcctttctatggaaggccgcatgactttatgcaatatggcgattgaggcaggcgcgcgctcaggcatggttgccgtcgaccaaaccaccatcgactacgtaaaagataaacccttcgcacccgaaggcgaagcgtgggacaaagccgtcgagtactggcgtacgctggtgtctgacgaaggtgcggtattcgacaaagaataccgtttcaacgccgaagacatcgaaccgcaagtcacttggggtacctcgcctgaaatggttttagacatcagcagcaaagtgccgaatcctgccgaagaaaccgatccggtcaaacgcagcggtatggaacgcgcccttgaatacatgggcttggaagccggtacgccattaaacgaaatccccgtcgacatcgtattcatcggctcttgcaccaacagccgcgtcgaagacttgcgcgaagccgccgccatcgccaaagaccgcaaaaaagccgccaacgtacagcgcgtgttaatcgtccccggctccggtttggttaaagaacaagccgaaaaagaaggcttggacaaaattttcatcgaagccggttttgaatggcgcgaaccgggctgttcgatgtgtctcgccatgaacgccgaccgcctgaccccggggcaacgctgcgcctccacctccaaccgcaattttgaaggccgtcaaggcaacggcggacgtacccacctcgtcagccccgctatggcagccgccgccgccgttaccggccgctttaccgacatccgcatgatggcgtaa

SEQ ID NO: 29734 - DNA, 564 bp, Neisseria meningitidis
atgaaaaaaatcatcatcgccgcgctcgcagcagccgccatcggcactgcctccgccgccacctacaaagtggacgaatatcacgccaacgcccgtttctctatcgaccatttcaacaccagcaccaacgtcggcggtttttacggtctgaccggttccgttgagttcgaccaagcaaaacgcgacggtaaaatcgacatcaccatccccgttgccaacctgcaaagcggttcgcaacactttaccgaccacctgaaatcagccgacatcttcgatgccgcccaatatccggacatccgctttgtttccaccaaattcaacttcaacggcaaaaaactggtttccgttgacggcaacctgaccatgcacggcaaaaccgcccccgtcaaactcaaagccgaaaaattcaactgctaccaaagcccgatgttgaaaaccgaagtttgcggcggcgacttcagcaccaccatcgaccgcaccaaatggggcatggactacctcgttaacgttggtatgaccaaaagcgtccgcatcgacatccaaatcgaggcagccaaacaataa

SEQ ID NO: 29735 - DNA, 867 bp, Neisseria meningitidis
atgatgaaaaccttactgccctttttcggcgtggtacgcgtcagcggcgaagaccgccaaaccttcctgcacggacagctttccaacgacatcaataatcttcagaccgggcaggcgtgttatgcgacttacaacacgcccaaaggccgcgtcatcgccaatatgattgtcgtcaaccgaggcggcgatttgctgctgattatggcgcaagacttgcttgaagcaacggtcaaacgtttgcggatgtttgtgttgcgtgccaaagccgtttttgaaatccttgaagattacgccgtcggcgcggaattggaagcatccgccgaaccgcttgccgcgcaagaacccaaccttgcctttgccgcacaacaagattcagacggcatctgctctatcgctctgcctcatggcggcatccttcgcatcgcccccaaaaacaccttgccgccttatgatgccgccgccgaaaacgcgtggcggctgcacgaaatccgtagcggttatccgtggatatgcgcggctaccaaagaaactgccgttgcccaaatgctcaaccagcacatcatcggcggcgtacacttcaaaaaaggctgctatccgggacaggaaatcatcgcgcgtgcccagtatcgggggcaggtcaaacgcggcttggcggtattgtctggaaattcggcagccgaagcgggcagcgtattggcagcggacggcgaagaggccggcatcgtgctcgacagcgttcaagattcggaaaactttaccgcccttgccgtgattaaattctccgccgcacaaaaagaactgaccgtcccaaacggcggtatcttcaaagcggttcatctcttctttaaaaccgaaaatgcagaataa

SEQ ID NO: 29736 - DNA, 456 bp, Neisseria meningitidis
atgaaaaaaccgaaaatcctttttgtctgcctcggcaacatctgccgttcgccgatggcggaatacattttgcgccgccgcgccgccgaagcgggcattccccttgaagcggacagcgcggggacatcgggctggcacgacggcgaagatatgcaccgcgagacggcaaagatattgaaaaaacacggtatcgatgcttcaggctttaccagccgcaaaatccgccaaagcgatgcggtggcgtttgactgcatcatcgcgatggacggcaagaatttgtccgaattggaaagaaccttcggcaggcggtcggaaaaaatattcaagctgaccgacctgatacccgaaagcggttacgaccatgtccccgatccgtggtacacgggcgattttgaagaaaccttcaggcttgcggatgcgggctgtcgggcattgttggaaaagatttccaaataa

SEQ ID NO: 29737 - DNA, 1194 bp, Neisseria meningitidis
atgaaccccaaacacctcatcgcattttccgccctattcgccgccacgcaggcagaagccctacctgtcgcctcagtcagcctcgacaccgttaccgtttccccgtccgccccctacaccgatacaaacgggctgctgaccgactacggcaacgcctccgcctcgccttggatgaaaaaactccaatccgtcgcacaaggcagcggcgagaccttccgtatcctgcaaatcggcgactcgcataccgccggcgacttctttaccgacagcctgcgcaaacgcctacaaaaaacttggggcgacggcggcataggctgggtttaccccgccaacgtcaaagggcagcgcatggcggccgtccggcacaacggtaactggcaaagcctcaccagcaggaacaacaccggagacttcccgctcggcggcatcctcgcccacaccggcagcggcggcagcatgaccctgaccgcatcggacggcatagcaagcaagcagcgcgtttccctgtttgccaaacccctgcttgccgaacaaaccctgaccgtcaacggcaacaccgtctccgccaacggcggcggctggcaggtactggatacgggcgcggcactgcccctgaccatacacaccgaaatgccgtgggacatcggcttcatcaacatcgaaaatcccgccggcggcattaccgtttccgcgatgggcatcaacggcgcacaattaacccagtggtcgaaatggcgtgccgaccgtatgaacgaccttgcccaaaccggcgccgatctagtcatccttgcctacggtaccaacgaagccttcggcgacaacatcgacattgccgataccgaacagaaatggctggataccgtccgccaaatccgcgacagcctacctgccgccggcatcctcatcatcggcgcgcccgaatccctgaaaaacacgctcggcgtatgcggcacacgccccgtccgcctgaccgaagtccaacagatgcagcggcgcatcgcccgtcaggggcagacgatgttctggtcttggcaaaacgcgatgggcggcgtttgcagcatgaaaaactggctcaaccacggatgggccgccaaagacggcgtacacttttccgccaaaggctaccaacggtcggcggaaatgctcgccgacagcctcgaagaactcgtccgctccgctgcaatcaggcaataa

SEQ ID NO: 29738 - DNA, 993 bp, Neisseria meningitidis
atgaaaaaagaaagccgccccgcgtttgacgcggcagccgtatttgacgcggcagccgtaccggtatccgacagcgggtttgccgccaatgcaaatgtccgccgttttgtggacgatgaagtcgggaaaggggatttttcccgggcggaatggcaggatttttttgacaaagcggcttacaaggcggacatcgtcaagattatgcaccgcccctccacatcgcgtccgtggtatgtgttccgcacgggaaattcgggcaaggcgaaatttcgcggcgcgcgccggttttatgcggaaaaccgcgcgcttatcgatgatgtggcgcaaaaatacggcgtgcctgccgaacttatcgtggcggttatcgggattgaaacgaattacggcaaaaatacgggcagtttccgtgtggcggacgcattggcgaccttaggctttgattacccccgccgcgccgggtttttccaaaaagaattggtcgagcttttaaagctggcaaaagaagaaggcggcgatgttttcgcctttaaaggcagctatgcgggcgcaatggggatgccgcaatttatgccttcgagctaccggaaatgggcggtggattatgacggggacggacatcgggacatatggggcaatgttggcgatgtcgcggcatcgattgccaattatatgaagcagcacggttggcgcacgggcgggaaaatactggtgtctgcaacattggcgccgggtgcggatgttcaggcaatcattggcgaaaaaaccgccctgacgcggacggtggcggatttgaaggcgtacggcatcatccccggcgaagagcttgccgatgatgaaaaggcggttttgttcaaactggaaaccgcacccggcgtgtttgaatattatttgggcttgaacaatttttatacggtatggcagtacaatcacagtcggatgtatgtaacggcggtcagggacattgccaattcgcttggcggcccgggattgtaa

SEQ ID NO: 29739 - DNA, 3891 bp, Neisseria meningitidis
atgacctaccccatccccaaaccccgtgaaaaatcccgttggctcaatctttcgcaaggctcgctacccttagctttggcgcgttatctgccgcataagcagctcaaggttgtcttgactcaagatgcggaacaggcgttgcgccttcagacggcatggcggtttttccgtccgcacgatacggcggtgtttctgccggactgggaaacgctgccttacgaacgtttttcgccgcatcaggacttggtgtcggagcggctgtcggcgttgtggcagattaaaagcggcgcggcggatgtgttgttcgtgccggttgccacggcgatgcagaagctgccgcctgtgccgtttctggcagggcgcacgttttggctgaaaacagggcagactttggatataggccgtctgaaaagcgatttggtggatgcaggttataaccatgtttcccacgttgtcgcggcaggcgagttcgctgtgcgcggcggtattgtcgatttgttcccgatgggcagcgaaatgccgtaccgcatcgatttgttcgacgatgaaatcgacagcattaaaacctttgacaccgaaacgcaacgcaccatttcccccgtttccgaaatccgcctgctgccggcacacgagttccccaccgacagcgaggcgcaaaagattttccgcagccgcttccgagaagaagtcgacggtaatccgaacgatgcggctgtatacaaagccgtcagcaacggccatttcggtgcaggcgtagaatattatctgccactgttttttgaaaacgagctggaaacgctgtttgactatatcggcgaagatgcgctctttgtctctttgggcgatgttcatgccgaggcaaaccgcttttggagcgacgtcaaatcgcgttacgccatggcgcagggcgacgaaacctatccgcctttgcttccacagcatttgtatctctctgccgatgtattcgcaggccgtctgaaaaactacggacaggtactgcccgatgtttccggcaaggaacacaccctgcccgaccttgccgtcaaccgacaatccgacgagcctttgcaggcattgaaggattttcagacggcctttgacgggcggattttgctgtgcgccgaaagtttgggacggcgcgaaaccatgctcggtttcttgcagcaaaacggtttgaaagccaaacctgtgtccgactggcagggcttcttgtcggcgcatgagccgctgatgattacagttgcgccgttggcatacgggttcaaactgggcggactgcaatcgccgaaccaacagcaaactacttccgcctccgaaggagaaggcgatgcggttaccgaccaaactgaattttccgcagccgcaataagccctctccctagccctctcccacaggagagggaacaaagtgccgccgccgtttcagacggcctgaaaaccgaaagcagcctgtattccatcgcaaataatctgcacggacaaatccgacagcaacctaccccctcccccgtgggggaagattggggagagagcaaaacagttgccgctcaaaccgaatttcccgcatccgcaacaaaccctctccctagccctctcccacaggagagggaacaaagtgcagccgccgtttcagacgacctgaaaaccaaaagcagcctgtaccccatcgaaaatagtctgcacgggcaaatccgacagcaacctgccccctcccccgtgggggagggttggggagagggaaaagcagttgccgaccaaagtgccatcgccgtcattaccgaatccgacctctaccaatacgtcgcccgttcgcgcgtccacaaccgccgcaagaaacacgccgccgtttcagacggtctgttgcgcgaccttgccgaaatcaatatcggcgatcccgtcgtgcacgaagaacacggcatcgggcggtatatgggcttggtaacgatagatttgggcggcgaaaccaacgaaatgatgttgctcgaatacgcaggagaagcgcagctttatgtgcctgtttcgcaactgcatttaatcagccgctactccggtcaggcgcatgaaaacattgccctgcacaagctcggcagtggcgcgtggaacaaggcgaagcgcaaagccgccgaaaaggcgcgcgataccgccgccgagttgcttaacctttacgcccgacgtgccgcccaatcgggacacaagtttgaaatcaacgagttggattatcaggcgtttgccgacggcttcggctacgaagaaaccgaagaccaggcagccgccatcgccgccgtgattaaagatttgacgcaggcgaagccgatggaccgcctcgtgtgcggcgatgtcggtttcggcaaaaccgaagtcgccctgcgcgccgcgtttgtggcggtaatgggtggcaaacaagttgccgtactcgcaccgaccacgcttctggtcgagcagcacgcgcaaaattttgccgaccgcttcgccgatttccccgtgaaagtcgccagcctttcgcgtttcaacaacagcaaagccaccaaagccgcgctggaaggcatggcggacggcacggtcgatattgttatcggtacgcacaaactggtgcaggacgacataaaattcaaaaacgtaggtttagtgattatcgacgaagaacaccgcttcggcgtgcgtcagaaagagcagctcaaacgcctgcgcgccaatgtcgacatccttaccatgaccgctacgccgattccgcgtactttaagtatggcgctggaaggactgcgcgacttctcgctgattaccactgcgcccagccgccgcctcgccgtcaaaacctttgtcaaaccgttcagcgaaggcagcgtgcgcgaagccgtattgcgcgaactcaaacgcggcgggcaagtatttttcctgcacaatgaagtggataccatcgaaaacatgcgtgagcggctggaaaccctgctgcccgaagcccgcatcggcgtggcgcacggacaactgcgcgagcgcgagctggaacaagtcatgcgcgactttttgcagcaacgatttaacgtgttgctctgttccaccatcatcgaaaccggtatcgacattcccaacgccaacaccatcatcatcaaccgtgccgacaaattcggattggcgcagctgcaccagcttcgcgggcgcgtcggccgcagccaccaccaagcctacgcctacctgctcacgcccgaatacatcaccaaagacgcagaaaaacgtctcgacgccatcgcggcggcagacgaactcggcgcaggtttcaccctcgccatgcaggatttggaaatccgcggcgcaggcgaaatcctcggcgaaggacaatccggcgaaatgatacaggtcggcttcacgctctacaccgaaatgctcaaacaagccgtgcgcgatctcaaaaaaggccaccagcccgaccttgacgcaccgttgggcatcaccaccgaaatcaaactgcacagccccgccctactgcccgaaagctactgccccgacatccacgaacggctcgtcctctacaaacgcctcgccgtctgcgaaaccgtgcaacaaatcaacgccatacacgaagaactcgtcgaccgcttcggactgcccgaacaacccgtcaaaaccctcatcgaaagccaccacttacggcttatggcaaaagaattgggtatcaatgccattgatgcggccggcgaagcggtaacggtaacctttggcaaaaacaacaatattgatccaaccgaaatcatcctgctgattcagaacgacaaaaaataccgccttgccggcgccgataagctgcggtttaccgcagagatggaaaatatcgaggtcagaatcaacaccgtaaaaaacgttttaaaaaccttgcaaaacagatgcctgcccaaataa

SEQ ID NO: 29740 - DNA, 843 bp, Neisseria meningitidis
atggatattaaaatcaacgacatcaccctcggcaacaacttgcccttcgtcctattcggcggcatcaacgttttggaaagcttggattccaccctccaaacctgcgcgcattacgtcgaagtaacccgcaaactcggtattccctatatctttaaagcctctttcgacaaggcaaaccgttcctccatccattcttatcgcggcgtaggcttggaagaaggcttaaagatttttgaaaaagtcaaagcagagttcggcatccccgtcattaccgacgtacacgaaccccatcagtgccaacccgtcgccgaagtgtgcgatgtcatccagcttcccgcctttcttgcgcggcagaccgatttggtggccgcaatggcggaaacgggcaatgtcatcaacatcaaaaaaccccagttcctcagcccctctcaaatgaaaaacattgtggaaaaattccacgaagccgacaacgggaaactgattttatgcgaacgcggcagcagcttcggctacgacaacctcgttgtcgatatactcggtttcggcgtgatgaaacaaacctgcggcaacctgccggttattttcgacgttacccattccctgcaaacccgcgatgccggttctgccgcatccggcggtcgtcgcgcacaggctttggatttggcacttgcaggcatggcaacccgccttgccggcctgttcctcgaatcgcaccccgatccgaaactggcaaaatgcgacggccccagcgcgctgccgctgcaccttttagaagattttttaatccgcatcaaagcattggacgatttaatcaaatcacaaccgattttaacaatcgagtaa

SEQ ID NO: 29741 - DNA, 1287 bp, Neisseria meningitidis
atgagcgcaatcgttgatattttcgcccgcgaaattttggactcacgcggcaaccccacagtcgagtgtgatgtattgctcgaatccggcgtaatgggacgcgcagccgtaccgagcggcgcgtccaccggtcaaaaagaggctttggaacttcgcgacggcgacaaatcccgttattcgggcaagggcgtattgaaggcggtcgaacacgtcaacaaccaaatcgcccaagccctcattggtatcgatgccaacgagcaatcttatatcgaccaaatcatgatcgaattggacggtactgaaaacaaaggcaatttgggtgcgaatgcgactttggcggtttctatggcggttgcacgcgccgctgccgaagactcaggcctgccgctttaccgctacttgggcggcgcaggcccgatgtccctgcccgtaccgatgatgaacgtcatcaacggcggcgaacacgccaacaacagcctgaacatccaagagtttatgattatgcccgtcggcgcaaaatctttccgcgaagcgttgcgctgcggtgcggaaattttccacgccttgaaaaaactgtgcgacagcaaaggcttcccgaccacagtcggcgacgaaggcggtttcgcccccaacctgaacagccacaaagaagccctgcaactgatggtcgaggcgaccgaagccgccggctacaaagcgggcgaagacgtattattcgcattggactgcgcgtccagcgagttctacaaagacggcaaataccacttggaagccgaaggccgctcctacaccaacgcggaatttgccgaatatctggaaggcctggtcaacgagttccccatcatctccatcgaagacgggatggatgaaaacgactgggaaggctggaaactgctgaccgaaaaactgggcggcaaagtccaactcgttggcgacgacctcttcgttaccaacccgaaaatccttgccgaaggcattgaaaaaggcgtggcaaacgcactattggtcaaagtcaaccaaatcggtactttgagtgaaaccctgaaagccgtcgacttagccaaacgcaaccgctacgccagcgtaatgagccaccgctccggcgaaaccgaagacagcaccattgccgacttggcagtcgccaccaactgtatgcagatcaaaaccggttctttgagccgttccgaccgcatggcgaaatacaaccaactgctgcgtatcgaggaagaattggcggaagccgccgactaccccagcaaagccgcattctaccaactgggcaaataa

SEQ ID NO: 29742 - DNA, 1134 bp, Neisseria meningitidis
atgtcatacagcacctttcccaaaaccaaaaacgacgcgctgaatgagccgatgtttttcggtcagccggttaatgtcgcccgttatgaccagcagaaatacgaggtatttgaaaaactgattgaaaaacaattgtcgtttttttggcggccggaagaaatcgacgtgtcgcgcgaccgtatcgactacgccaacctgccagaacacgaaaaacatattttcatcagcaatctgaaataccaaacactgctcgattccatccaagggcgcagtccgaatgttgccttgctgcctttggtttcgattcccgagttggaaacgtggattgaaacgtggagcttcagcgaaaccatacactcgcgcagctatacccacatcatccgcaatattgtgaatgatccgtcggtcgtgtttgatgatattgtcgaaaacgaatacattaccgcccgcgccgaagacattgcctgctattacgacgacttaatcgaatacacccagtattacaatctgttgggcgaaggggtgcacaatgtcggcggaaaacccattactgtgtctttgcgcgggttgaagaaaaaactctatctctgcctgatgtgcgtcaacgtgttggaagccatccgtttctacgtttcattcgcctgctcgtttgcttttgccgagcgcgagttgatggaaggcaacgccaaaatcatcaaactgattgcccgcgacgaagccctgcacctgaccggcacgcagcatatgcttaatctgatgcgttcgggtgtcgatgattctgaaatggcagaaattgccgctgagttgcaggacgaatgtttccaactcttcaaaaaagcggcggaacaggaaaaagaatgggcggcatatttgtttaaagacggttcgatgattggtttgaacaaagaaatcttatcccagtacgtcgaatatattaccaatctgcgtatgcaggcggtggggttgccggccggatttgaaggcgcaaatcaaaacccgattccgtggattaatgcgtggctgtcgtccgataacgtacaggtcgcgccgcaggaagtggaaatatcctcttatttgatcggtcagatcgattctgaagtgaatacggatgatttgggcgattttgagttgtaa

SEQ ID NO: 29743 - DNA, 2280 bp, Neisseria meningitidis
atgaatacaccgactgatttgaaagtaaccaaacgagacggaagattagaagccattgatttggataagattcaccgtgtcgtcacttgggcggcggacggattggaaaatgtttccgtatctcaggtcgagttgaaatcgcacatccagttctacaacggcatccgcaccgacgacatccacgaaaccatcatcaaagccgctgccgatttaatttcggaagataccccggactaccaataccttgccgcgcgtttggcgattttccatctgcgtaaaatagcctacggcgagtacgagccgccgcacctttacgaccacgttaaaaaacttaccgatgccgcaaaatacgacaggcatatccttgaggattacagccgcgaagaatttgacgagctgaacgcctatatcgaccacgaacgcgatatgtccttttcctatgccgctgtcaaacagctcgaaggcaaatatctggtacagaaccgcgttacccgccagatttatgaaacaccgcagttcttatatgttctggtggcgatgtgtcttttcagcaaatatcccaaagaaacacgcctcgattacgtcaaacggttttacgatgccgtttccacatttaaagtatcgctgccgaccccgattatgagcggcgtgcgtacgcctacgcgccagttctcaagctgcgtattgatcgaatgcgacgacagcctggattccatcaacgccactaccagcgcgattgtgaaatacgtttcccagcgtgcgggcatcggcatcaatgccggacgtatccgcggactggacagcgaaatccggggcggcgaagcacggcataccggctgcattcccttctttaaaatgtttcaggcggcagtcaaatcctgttcgcaaggtggcgtgcgcggcggcgcggcaaccttgttctaccccttgtggcatatcgaagccgaaagcctgctggtgttgaaaaacaaccggggcgtggaagacaaccgtatccgtcagcttgattacggcgtgcaaatcaaccgcctgctgtacacccgcctgattaagggcggcaacattacgctgttttcgcccaacgaggttccgggattgtacgaagcgttttttgccgaccaagacgaatttgagcggctctatacgaaatacgagcaagaccctgatatccgcaagcgcatcattccggctgccgacctgttttccacgctgatgcaggagcgtgccggaaccgggcgcatctacattcaaaacgtcgatcactgcaatacgcacagcccgttcgatccgcgcgttgcgcctgttcatcagtccaacttgtgtatggaaatcgcgctgccgaccaaacctttggacaatatcaacgacccgaacggcgaaatcgccctgtgtaccctgtctgccttcaacttgggggcattaaacagcttggacgaattggaagggcttgccgatttgaccgtgcgcgcgctcgatgcacttttagattatcagggatatccggtagaagccgcgcgtacctccactatgggccgccgttcgctcggtatcggcgtgatcaactatgcgtattatttggcgaaaaacggtgtccgctacagcgacggctccgcgctcggtctgacccaccgtacctttgaagccatacagtattacctgctcaaagcatcggcaaaccttgccaaagaatacggtgcgtgcacgctctttaaccaaaccgtttattcgcaaggcaaactgcccatcgacacctacaaaaaagacttggacgctgtgtgtaacgagcctttgcactacgattgggaaagcctgcgtgccgacatcgtcaaatacggcctgcgtaactctactctaaccgcactcatgccgtctgaaaccagttcgcaaatcgccaacgccaccaacggtatcgagccgccgcgcggattggtaacggtcaaagcatcgaaagacggcattttgaaacaagtcgtgccggagtttgaaaccctgaaaaatgcctatgaaaccctgtggcagcttcccggcaacgaaggctatctgaaacttgttggcgtgatgcaaaaattcgtcgatcaggcgatttccgccaacaccgcctacgacccgggcaaattcgaaggcggcaaagtttctatgaaacaaatgctcaaagacctgctgaccgcctacaaatacggcgtcaaaaccctgtactaccataacacccgcgacggcgcggacgatacgcagaccgatattcaggatgacggctgcgcgggcggggcttgtaagatttga

SEQ ID NO: 29744 - DNA, 828 bp, Neisseria meningitidis
atgccggaattgccagaagtggaaacgacgttgcgcggcatcgcgccgcatattgaagggaaaacggtggaagccgtggtattgcgccaattgaagctgcgctggcagatcaatcccgatttgggggagattttgtccggtcggcaggttttgtcctgcggcaggcgtgccaaatatctgattgtccgtttccaaacggggattttgctgattcacttggggatgtcgggcagtttgcggatttttacgccgtcggacggacgtatcggcaggtcggacagacacgatcacgtcgatattgtgttttcagacggcacggtcatgcgttaccgcgatccgagaaagttcggcgcgatactttggtatgagggaatcgaagaacatcatccgctgttggaaaaactggggccggagcctttgtcggaggcattttgcacggattatctgtatgtgaggctgaaggcgcagaagcgcgcggtcaaacttgccctgatggacaatgcggtcgtggtcggtgtgggcaatatttatgccaatgagagcctgttcagagcgggcatttcgccccaccgtcctgccaaccgtctgaaaaagaaagagtgtgcgcttttggttgaaaccgtcaaagcggtgttgcggcgcgccattgaaacgggcggcagtaccttgagggattttgtggacagcgacggcaaaagcggctacttccaacaggaatatacggtgtacgggcggcacaatcagccgtgcccccagtgcggcggtttggttgtgaaagaaactttggggcagcgcggcacgttttactgcccgaattgtcagaaatag

SEQ ID NO: 29745 - DNA, 693 bp, Neisseria meningitidis
atgaaacttatcaaatacctgcaatatcaaggcataggaagccgcaagcagtgccaatggctgattgccggcggttatgttttcatcaacggaacctgcatggacgacaccgatgcagacatcgattcctcatccgtcgaaacgttggatattgacggggaagcagtaaccgtcgttcccgaaccctatttctacatcatgctcaacaagcctgaagattacgaaacttcgcacaaacccaagcactaccgcagcgtattcagcctgttccccgacaatatgcggaacatcgatatgcaggcggtcggcaggctggatgcagatacgaccggcgtattgctgattaccaacgacggcaaactgaaccacagcctgacttcgccgagcagaaaaattcccaagctgtacgaagtaacgctcaaacaccccacaggagaaacgctctgcgaaaccttgaaaaacggcgtgctgctccacgacgaaaacgaaaccgtttgtgccgccgatgccgttttgaaaaacccgaccaccctgctgctgaccattaccgaaggaaaataccaccaagtcaaacgcatgatcgccgccgccggcaaccgcgtgcaacaccttcatcgccggcgattcgcacatctggaaacagaaaacctcaaacccggggaatggaaatttatcgaatgtccaaaattctga

SEQ ID NO: 29746 - DNA, 657 bp, Neisseria meningitidis
atgaacagacaaaaagtcatcgccatcgacggcccgggcgcatcgggcaaaggcacggttgccgcccgcgttgccgccgcattgggatacgattatctcgataccggcgcactctaccgcctgaccgccctatatgcacaaaaacaaggcgtgggatggcacgatgaagaaaacgtttccgaactggcaaaaaaactgcccgccgtattttcagacagccgcatcctgctcggcggcgaagacgtttcagacggcatccggacagaagccatcggcatgggcgcatccgcagtcgcacagttgcctaaagtccgcgcctccctgctgcaacgccaacgcgattttctgaccgaaaaaggactggtcgccgacggacgggacaccggatcggtcgtcttcccccaagccgaacttaaaatcttcctgacggcagaatccaaaatccgtgccgaacgccgcgccaaacaaatcggcatcccctgcgaaggtttggcattcgagcgcatcctgtccgacatcgaagccagagacgaggcagaccgaaaccgcaaggttgcccccctgaaacaacaacccgatgccctgcttttggatacgagccgcctgactatagaagaaactgtaaaaaaagtgcttgattggtatcgtaaagtttaa

SEQ ID NO: 29747 - DNA, 1686 bp, Neisseria meningitidis
atgtctatggaaaattttgctcagctgttggaagaaagctttaccctgcaagaaatgaacccgggtgaggtgattaccgctgaagtagtggcaatcgaccaaaacttcgttaccgtaaacgcaggtctgaaatcagaatccctgattgatgtagctgaattcaaaaacgctcaaggcgaaattgaagttaaagtcggcgacttcgttaccgttaccatcgaatccgtcgaaaacggcttcggcgaaaccaaactgtcccgcgaaaaagccaaacgcgctgccgattggattgccctggaagaagccatggaaaacggcaacatcctgtccggcatcatcaacggcaaagtcaaaggcggcctgaccgttatgattagcagcatccgcgcattcctgccaggttctttggtcgacgtacgtcctgtaaaagacacttctcacttcgaaggcaaagagatcgaattcaaagtgattaaactggacaaaaaacgcaacaacgtcgttgtttcccgccgcgccgttctggaagccactttgggtgaagaacgcaaagccctgctggaaaacctgcaagaaggctccgtcatcaaaggcatcgttaaaaacattaccgattacggtgcattcgttgacttgggcggcatcgacggtctgttgcacatcaccgatttggcatggcggcgcgtgaaacacccgagcgaagtcttggaagtcggtcaggaagttgaagccaaagtattgaaattcgaccaagaaaaacaacgcgtttccttgggtatgaaacaactgggcgaagatccttggagcggtctgacccgccgttatccgcaagacacccgcctgttcggcaaagtatccaacctgaccgactacggcgcattcgtcgaaatcgaacaaggcatcgaaggtttggtacacgtctccgaaatggactggaccaacaaaaacgtacacccgagcaaagtcgtacaactgggcgacgaagtcgaagtcatgattttggaaatcgacgaaggccgccgccgtatctctttgggtatgaaacaatgccaagccaatccttgggaagaatttgccgccaaccacaacaaaggcgacaaaatctccggtgcggttaaatccattaccgatttcggcgtattcgtcggcctgcccggcggcatcgacggtctggttcacctgtccgacctgtcctggaccgaatccggcgaagaagccgtacgcaaatacaaaaaaggcgaagaagtcgaagccgtcgtattggcaatcgacgtggaaaaagaacgcatctccttgggtatcaaacaactggaaggcgatccgttcggcaacttcatcagcgtgaacgacaaaggttctttggttaaaggttccgtgaaatctgttgacgccaaaggtgctgttatcgccctgtctgacgaagtagaaggctacctgcctgcttccgaatttgcagccgaccgcgttgaagatttgaccaccaaactgaaagaaggcgacgaagttgaagccgtcatcgttaccgttgaccgcaaaaaccgcagcatcaaactttccgttaaagccaaagatgccaaagaaagccgcgaagcactgaactccgtcaatgccgccgccaatgcgaatgccggcaccaccagcttgggcgacctgctgaaagccaaactctccggcgaacaagaataa

SEQ ID NO: 29748 - DNA, 1266 bp, Neisseria meningitidis
atgaacacactccaacgccgcaagacgcatcaagtccgcatcgatcatattaccgtcggttcagaagcacccgtcgttatccaatctatgaccaacaccgacactgccgatgcaaaagccaccgcattgcagattaaggaattgagcgacgccggatccgaaatggtgcgtattaccgtcaacagccccgaagccgcgtccaaagttgccgaaatccgccgccgcttggacgatatgggctatgccacaccgcttatcggcgatttccacttcaacggcgaacgcctgttggcggaatttccagaatgcggcaaagcattgtccaaataccgcatcaatcccggcaatgtcggcaaaggcgtaaaaggcgatgaaaaatttgcctttatgattcggactgctgctgaaaacgataaagccgtccgcatcggcgtaaactggggttctttggatcaaagcctcgccaaacgtatgatggatgccaacctcgcttcttccgcgccgaaaccgcccgaagaagtgacgaaggaagcactgattgtctccgctttggaatctgccgaaaaagccgttctattgggactgcccgaagacaaaatcatcctgtcgtgcaaagtcagcgcggttcaggatttgattcaggtttaccgcgaactgggcagccgttgcgcctatccgctgcatttgggtttgaccgaagccggtatgggcagcaaaggcattgtcgcatcaacggcggcattatccgtcttgcttcaagaaggaatcggcgacaccatccgcatttcactgactccggaacctggcagcccgcgtactcaggaggtcgtcgtcgggcaagagattttacaaactatgggattgcgttcgtttacgccgatggttaccgcctgccccggctgcgggcgtaccaccagtaccgtatttcaagagctggcacaagatgttcaaaattacctgcgccaaaaaatgtctatatggcgtaccctttatcctggggttgaatccctgaacgttgccgtaatgggctgcgttgtcaatgggcccggagaaagcaaattggccgacatcggcatcagcctgcccggtacgggggaaacacccgtcgcgcctgtttatgtagatggtgaacgcaaagtaacgctgaaaggcgacaacattgcaacggaatttttggctattgttgaagagtatgtcaaaaccaactacggcgaaaacggctccaaacgcaaccagaacaaaatcatcccaatacagtccctataa

SEQ ID NO: 29749 - DNA, 2304 bp, Neisseria meningitidis
ttgcagaaaaccgaaaccaaaaaggcgcgtcccgaacatgtcgtcaaccttatcggcgacgcactgtggctgatgggtttggcggcaaccctgtatttggtgatttccctgatcagtttcgatatgggcgatccgtcttggtcgcacagttcgccggttgtggaagatgtcgccaattggggcggactgttcggcgcgtatgttgccgatgtcggctattatcttttcggctggtcgttctggtggtggatagcggctgcctgcgtcatgctgtataaaaatttccgcctgcacgcaaaacagacggaaaacgaggcatacaaccacaaaatcgctgccgccgcgctgtttgtcctgacggtcttcagccccgtcttggagtattttgtgctgggcggaaaatatgccgactccctgcctgtcggagcaggcggtatggtcggcatacgcgtcggcgcagtgtttgcgtggctgctggggaaatcgggcagcctgctgattatcttggttgttctgctgttgtcgttgtccctactggtgcagatttcatggctggaatttttgaacggtgcgggcagggcggttcaaaaccgcctgagtgccttatccggcaaggtcatggctttaggaaaacgccggccgaataccaaaacagacggtgtcgatacccaaaatacacggcgcatggtaaaagaagccaagaatattacggccaaacccgttgccttgcccgaaggcagcagcagcaaccgcaaatccgtcgcggtttccgtcgcgccgccgcccaaaattcaggtttctctgtttgaagatgacgaacctcggcaggcgggcgaataccacaagcctacattgaacctattgcggattcctgacagcgaacccgtcagcatcaatcccgccgaattggagcgcactgccgaactgatcgaatccaaactggcagaattcggcatcggcgtacaagtcgtatccgccacatccggccccgtcatcacgcgctacgaaatcgaacccgcgcaaggtgttaaaggcagccaaattgttgccttgtcgaaagatttggcacgctctatgtcgctgcaatccgtgcgtatcgtcgaaaccatcgcaggtaaaaacacgatgggcatcgagttgcccaacgacaaacgccaagacgtgatgttgagcgaaatcttgtcctcgcccgtgtttgccgaagccaaatccaagctgaccgtcgcgctgggcaaagacattgccggtacccccgttgtcggcgacttggcgaaaatgccgcaccttttggtcgccggtatgactggttcgggcaagtccgtcggcgtgaacggcatgattatgtctatgcttttcaaagctacgcccgacgaagtccgcttcattatgatagacccgaaaatgctcgagttgagcatttacgacggcattccgcacctgctctgtcccgtcgtgaccgatatgcgcgaagcagggcaggcgttgaactggtgcgtcgccgaaatggaaaaacgctaccgcctgctttcccacgccggtgtacgcaatctggaaggcttcaaccaaaaagtcgaagccgcaaaagcggcaggcaagccgctgctcaatccgttcagtctgaaccccgacaaccccgagcctttggaaaaactgccgatgattgtggtcgttatcgacgaacttgccgacctgatgatgaccgaacgcaaagccgtcgagcagcaaatcgcccgtctcgcccaaaaagcgcgcgccgccggtatccatatgattgtcgccacccaacgtcccagtgtcgatgtcgttaccggcctgattaaagccaacatcccgacgcgtatggcgtttaccgtgcaaagcaaaatcgacagccgtaccatcctcgaccaaatgggcgcggacgaactgctcaaatatggcgattcgctgttccttcagcccggcagtgccgaaccgacccgcctgcaaggcgcgtttgtttccgatgatgaagtccaccacgtcgtcgctttcgtcaaggagcaggcaccggcaaattatgtagaagggctgcttacaggcgaagcggcacaggaaacggcaaatatcgtcagccccaatgcagacagtgacgaattgttcgatcaggctgtcgcctatgttttggaaagcaaaaaaacctccatttcgtctttgcagcggcagttgcgtatcggctataaccgcgcggcaaacctgatggaggcactggaaaatgcaggtgtcgtttctccctccgatcttaacggcagccgtaaaattttggcgcacaaggaccatttatag

SEQ ID NO: 29750 - DNA, 453 bp, Neisseria meningitidis
atgcaaattattctgttagaaaaaatcggcggtctgggcaacttgggcgacatcgtaaccgttaaaaacggctacgcccgcaactttctaattcccgcaggtaaggcaaaacgtgcgaccgaagcgaatatgaaagagtttgaagcacgccgtgccgaattggaagccaaacaggctgaaattttggcagatgcccgagtccgtcaggaaaaattggacggtcaaaccattaccgttgcacaaaaagccggtgtggacggtcgcctgttcggttccgtcaccaatgctgatattgcggctgcaatcgttgctgccggcatcgaagccgtgaaagcaaatgtacgtctgccgaacggtcctctgaaagccgttggcgagtacgaagtggaagtggctttgcacactgatgccgttgctaaaattaccgttgccgtcgttgccgcaaccgagtaa

SEQ ID NO: 29751 - DNA, 231 bp, Neisseria meningitidis
atggctcgtcaatcattcaaacgtagaaaattctgccgtttcacggctgaaaaaatccaagaagtcgattacaaacaagttgatttgctgaaagactttatctctgaaaacggtaaaatcattcctgcacgcatcacaggaacgaaggcattctaccaacgccaattggctgttgccgtaaaacgcgcacgcttcctggctctgctgccttacaccgaccaacacaaataa

SEQ ID NO: 29752 - DNA, 303 bp, Neisseria meningitidis
ttgggattcaataatcttgtttcgcttgccgtgttaattgaaaaggttttccctattcgatatacgcctgccggaatccctgttttagatattattttaaagcacgaatcgtggcaggaggaaaacgggcagcaatgccttgtccaattggaaattccggcacggattttaggcaggcaggcggaagagtggcagtatcggcaaggtgtatatgttcacgtcgaaggttttttagctcaaaaaagcagacgttcccttatgccgatgctcaggatacaaaatattcaagaatataaaggttaa

SEQ ID NO: 29753 - DNA, 369 bp, Neisseria meningitidis
atgcgtcattacgagatcgtgtttatcgttcatcctgatcaaagcgagcaagtgcctgctatggttgaacgttacaaaaccatgattgctgaagcaaacggtaagattcaccgtttggaagattggggtcgccgccaactggcttacccgattaacaaaatccataaagcccattacgttttgatgaacatcgaaaccactcccgaagtggttgaagagctggaaaccgcattccgcttcaatgatgccgtattgcgccatctaaccatcaaaaccaaacacgccgttaccgaagcatcccctatgttgggtggtgaaaaggctaagaacctgttgagcggcgcgtctgaagaagcggtcgcccaataa

SEQ ID NO: 29754 - DNA, 2178 bp, Neisseria meningitidis
atgcaacaaaaagtccgtttccaaatcgaaggcatgacctgccaggcatgtgcttcgcgcattgaaaaagtgttgaacaaaaaagattttgtcgaatcggcgggggtaaacttcgccagcgaagaggctcaggtagtgtttgacgacagcaaaacctcagtagccgacattgccaaaatcattgagaaaaccggttacggcgcgaaggaaaaaacggaagatacattgccgcaacccgaagcagaacaccatatcggctggaggttgtggcttttgctggccatcaatatcccgttccttatcggtatggtagggatgatgctaaaagggctgaattggacacggcatgattggatgttgtcgcccttgttgcagtttgcattggcgagtgtggtgcagctttggctggcggtgccattttacaaaagcgcgtgggcgagcattaaaggcgggctggcgaatatggacgtactcgttaccatcggcacggtctcgatttacctgtattccgtctatatgctgtttttcagcccgcacgcggcgtacggtatggcgcatgtgtattttgaagtaggcataatggtgattggttttgtgtcactgggtaaatttttggaacaccgcaccaaaaaatccagcctgaacagcttgggcttgctgctcaaactcacgccaacccaagtcaacgtgcaacgcgatggcgaatggcggcagctacccatcgaccaagtgcaaatcggcgacctaatccgcgccaatcacggcgaacgcattgccgccgacggcatcatagaaagcggcagcggctgggcggacgaaagccatcttaccggcgaatccaatcccgaagagaaaaaggcaggcggcaaagtattggcgggcgcgctgatgactgaaggcagcgtggtgtaccgcgccgcgcagctcggcagccaaaccctgctcggcgacatgatgaacgcgctctccgaagcgcaaggcagtaaagcaccgattgcgcgtgtggcggacaaggcggcggcggtattcgtgcctgccgttgtgggcatcgcacttttgacttttatcgctacttggctgattaagggcgattggacgctcgcattgatgcacgccgtcgccgttttggtgattgcctgcccgtgtgcactcggtttggcaacccctgctgcgattatggtcggtatgggcaaagcggttaaacacggtatttggtttaaagacgcggcagcaatggaagaagccgcccacgttgatgccgtcgtgctggacaaaaccggcacgctgaccgaaggcaagccgcaggttgccgccgtttattgtgttcccgacagcggctttgacgaagacgctttgtaccgcatcgccgccgccgtcgaacaaaacgccgcccatccgctcgcccgtgccatcgtctccgccgcccaggcgcgcggtttggagattcccaccgcacaaaatgcccaaaccattgtcggcgcgggcattaccgccgaagtaaaaggcgcgggtttggtaaaagcaggcaaagccgaatttgccgaactgaccttgccgaagttttcagacggcgtttgggaaatcgccagtgtggttgccgtatctgtaaacggcaaacctatcggcgcattcgcactcgccgacgcgttgaaagccgataccgccgaagccataggccgtctgaaaaaacacaatatcgatgtctatattatgagcggcgataaccaaggcacggtcgagtacgtcgccaaacaactgggcatcgcacacgccttcggtaatatgagtccgcgcgacaaagccgccgaagtgcagaaactcaaagccgccggcaaaaccgtggcgatggtcggcgacggcatcaacgacgcgcccgcgctcgccgccgccaacgtcagcttcgccatgaaaggcggtgcagacgttgccgaacacaccgcatccgccacactgatgcagcattcggtcaaccagctcgccgatgcgctatcggtatcgcgagcgacgttgaaaaacatcaagcaaaacctgtttttcgccttcttctacaatattttgggcattccgctcgccgcgctcggctttttaaaccccgtcatcgcaggcgcggcaatggcggcaagctcggtttccgtgttgagcaacgccttgcgcctgaaacgggtaaaaatcgattga

SEQ ID NO: 29755 - DNA, 456 bp, Neisseria meningitidis
atgcataaaattccaaaaggaacggcactggcattcgacttcggcgaagcgcgcatcggcgtggcgcagggcgatgcggaattggggctgtcccatccgctggccaccgttaccggcggcagcaacgatgaaaagttcgcggcaatcgccaagctggttcaagaatggcagccgcgttattttgtcgtcggactgcccgtgcataccgacggcacgaaacatgaaatgacgcacctgtcgcgcaagttcggacgcaggctgaacggcaggttcaatctccccgtctattgggttgacgaacggctgtcgtccgtctatgccgaaagcctgctttcggaagcacaggtcttcggcaaaaaacgcaaatcggtgctcgaccaagtggcggcgcaagccatcttgcacggttttttcgagggcggtccggcggaatgtttcaacgggcgtgaaggttaa

SEQ ID NO: 29756 - DNA, 657 bp, Neisseria meningitidis
gtggcttcagtatttttagaaggagaggcagtcgaggtcggcaatattttctgtatcggcaggaactatgccgcacatatcgaagagttaaaaaacgaaataccttccgaacctgtggtgtttatgaagccgtcaggcagcattttgaacagcggcggtacaatcttgctgcccgagtttagtagggatgtgcagtttgagtgcgaactcgtgctgctggtcggtaaggattcagacggcacgggcgagggtaaagatattttgggatgtgtcgcaggatatggtgtagggctggaccttacggcacgggatatccaatgccgtctgaaggaaaaagggctgccctggctgaaggcaaaagggttcaggcattccgcgtgcgtgtcggattttgcggcggcaggcagaatcggcaatcccgagaatgtgttgttttcattaaaacaaaacggcgtattgaaacagcgcggggataccggtttgatgatttacccgattcgggaaattttacacaaactggcggcagattacggtttggggaaaggggatttggtgtttaccggaacgtcctccggcgtgggcgcaatcggtgcgggggacaatttggcattggagctggacggcttggtgcgcgcctctttcacggtagggtgttaa

SEQ ID NO: 29757 - DNA, 1713 bp, Neisseria meningitidis
atgaaagccagccaattctttatctctactttaaaagaagcccctgccgaagccgcgcttgccagccacaagctgatgattcgcgccggcctgattaaagccaacgcgtccggcctttatacttggatgccgatggggctgcgcgtgttacgcaaagtcgaaaacgtcgtgcgcgaggaaatggcgcgcgcgggcagcgtggagctgctgatgccggtggtgcagcctgccgagctgtggcaggaatccggccgctgggaattttacggtaaagaactgctgcgcctgaaagaccgccacgaccgcgatttctgcatgggaccgacctgcgaggaagtcatcgccgacatcgtgcgtaaagagatcaacagctacaaacaactgccgaaaaacttttaccacatccaaaccaaattccgtgacgaagtgcgcccgcgcttcggtgtgatgcgtgcgcgcgagtttgtcatgaaagatgcttattccttccatgccgactacgcctcgcttcagacgacctatgatgccatgtatgacgcttactgccgtatcttcacccgtctgggcttggaattccgccccgttgccgcagataccggcagcatcggcggtaccggctctcacgagtttcaagtgttggcggaaagcggcgaagatgtgattgcatacagcgacacttccgattacgccgccaatgtcgagctggcaccgaccttgccgcttaaaggcgaacgcaccgctgctcaggcagaactcgtcaaagtacacacgccaaacgtcaaaaccattgagtctttggttgaattcctgaatattccggttgaacaaaccctcaaatccatcgtggttgaaggcgaaaatgaaggcgaaatcgttttattgctgttgcgcggcgaccatgagttcaacgacatcaaagccgaaaaactcgcaggtgtgaaatcgccattgacgatggcaagccctgccgcgattgtcgaacagttcggcgcaaacggcggctcgctgggtccggtcggctttgcaggtaaagtttatgccgatttcgccactgaaaaaggcgcggactgggtcatcggtgcgaacgaagacggctaccactataccggcttcaacttcgggcgcgatgccgccgagcctgaattcgtcgatttgcgtaatgtggtcgaaggcgacgaaagccccgacgggcaaggccgtctgaaactggcgcgcggcatcgaagtcggacacgtcttccagttgcgcgacaaatacacccaagccatgaacgtgagcttcctcgacaacaacggcaaatcgcaaatcatggaaatgggctgctacggtatcggcatcacccgcgtcgttgccgccgccatcgagcagaacaacgacgaaaaaggcatcatctggacgaaggcgatggcgtcgtttgaagtcgttatcgtgccgatgaactacaaaaaatcagacaccgtacgcgaagccgccgacaaaatctatgccgaattgctggcggcaggcgcggatgtgctgctggatgaccgcgacgaacgcgcaggcgtattgctgaacgattccgagctgttgggtattccgcaccgcatcgtcatcggcgaccgcgccttgaaagaaggcaatgtcgaatacgccgaacgccgcgacaacgaagcgcaggcaattgcaatcggagaaattgttgcacgtgtaacagcttcattaaatgcgtaa

SEQ ID NO: 29758 - DNA, 1608 bp, Neisseria meningitidis
atgagtatcgtagaaatcaaagtccccgatatcggcggtcacgaaaacgtcgacatcatcgccgtagaagttaaagcgggcgacaccatcgccgttgacgacaccctgattacactggaaaccgacaaagccacgatggatgtgcctgccgatgcggccggtgtcgtgaaagaagtgaaagtcaaagtcggcgacaaaatctccgaaggcggcgtaattctgaccgttgaaaccggtgccgccgccgccgaagccgccccggctgctgccgaagcacaacctgcacctgctgccgcacccgctgccgcaggcggtgcaaccgttcaagtagccgttcccgatatcggcggccataccgatgtggatgtaatcgccgttgaaatcaaagtgggcgacaccgttgccgaagacgacacgctgattactttggaaaccgataaagcgacaatggacgtaccttgtaccgctgccggtgtcgttaaagccgtattcttaaaagtcggcgacaaagtatccgaaggctctgccattatcgaagtagaaaccgtcggctctgccgcagcagcccctgctcaagccgctcaagctgccgcaccggctgccgctccgcctccgactgctgccgccgcacccgccgccgcgcctgcaccttctgcacctgccgctgccaaaatcgacgaggccgctttcgccaaagcacacgccggcccttccgcacgcaaactggcgcgcgaattgggcgtggatttgggccaagtcaaaggtaccggcttgaaaggccgcatcgtgggcgacgacatcaaagcctttgtgaaatccgtaatgcagggcggcgcggcaaaacctgccgcagtcggcgcgtctttaggcggcggtctggacttgctgccctggcctaaagtggacttctccaaattcggtaatgtcgaagttaaagaattgtcccgcattaagaaaatttccggtcaaaacctgtctcgcaactgggtggtgattccccacgttaccgtacacgaagaagcagatatgaccgagctggaagaattccgcaaacaactgaacaaagaatgggaacgcgaaggcgtgaaactgtcaccgttggcgttcatcatcaaagcctccgtttccgcgctgaaagccttccccgaattcaacgcttctctggacggcgacaacttggtgctgaaaaactacttcaacatcggtttcgcagcagacacgccgaacggcttggttgttccagtaatcaaagacgtggatcaaaaaggcttgaaacaaatcagccaagagctgaccgaattgtctaaaaaagcccgcgaaggcaagctcaaaccacaagaaatgcaaggcgcatgctttaccatttccagcttgggcggcatcggcggcacaggtttcacgccgattgtgaacgctcccgaagtcgccatcttgggcgtgtgcaaatcccaaatcaaaccggtttggaacggcaaagaattcgctcctcgcctgatgtgcccattgagcctgtcctttgaccaccgtgtcatcgacggcgcggccggtatgcgcttcaccgtattcctggccaacctgttgaaagacttccgccgcattactctgtaa

SEQ ID NO: 29759 - DNA, 1785 bp, Neisseria meningitidis
atgagcttagttgaattgaaagtgcccgacattggcggtcacgaaaatgtagatattattgcggttgaagtaaatgtgggcgataccattgctgtggacgataccctgattactttggaaaccgataaagcgactatggacgtacctgccgaagttgcaggcgtggtcaaagaagtcaaagttaaagtaggcgacaaaatctccgaaggcggtttgattgtcgtcattgaagccgagggcgcggctgctgctcctaaagccgaagcgcctgtcgctcctgcacaagaagcacctaaagcagccgctcctgctccgcaagctgcgcaattcggcggttctgccgatgtcgagtacgacgtggtcgtattgggcggcggccccggcggttattctgctgcatttgctgctgctgatgaaggcttgaaagttgccatcgttgaacgttacaaaactttgggcggcgtttgcttgaacgttggctgtatcccttccaaagcactgttgcacaatgctgccgttatcgatgaagtacgccacttggctgccaacggtatcaaataccctgagcctgaactcgacatcgacatgctgcgcggctacaaagacggcgtggtttcccgcctgactaccggtttggcaggcatggctaaaggccgtaaagtagacattatccaaggtgacggccaattcttggatccacaccacttggaagtttctttgacgaccagcgaagtgtacgaacaagcgactcctaccggtgagaaaaaaatcgttgcctttaaaaactgcattattgcagcaggcagccgcgtaaccaaactgcctttcatccctgaagatcctcgaattttcgactccagcggcgcattggctctgaaagaagtaccgggcaaactgttgatcatcggcggcggtattatcggcctcgagatgggtacggtttacagcacgctgggttcgcgcctggatgtagttgaaatgatggacggtctgatgcaaggcgcagaccgcgacttggtgaaagtatggcaaaaacaaaacgaataccgttttgacaacatcatgatcaacaccaaaactgttgctgtcgagcctaaagaagacggtgtttacgttaccttcgaaggtgcaaatgcacctaaagaaccgcaacgctacgatgccgtattggttgccgccggccgcgcgcccaacggcaaactcatcagcgcggaaaaagcaggcgttgccgttaccgatcgcggcttcatcgaagtggacaaacaaatgcgtaccaacgtgccgcacatctacgctatcggcgatatcgtcggtcagcctatgctcgcgcacaaagccgttcacgaaggccacgttgccgccgaaaactgcgccggccacaaagcctacttcgacgcgcgcgtcattccgggcgttgcttacacttctcctgaagtggcatgggtgggcgaaaccgaattgtctgccaaagcctccggccgcaaaatcaccaaagccaacttcccatgggctgcttccggccgtgcgattgccaacggttgcgacaatggtttcaccaagctgatttttgatgctgaaaccggccgcatcatcggcggcggcattgtcggtccgaacggtggcgacatgatcggcgaagtctgccttgccatcgaaatgggctgcgacgcggcagacatcggcaaaaccatccacccgcacccgaccttgggcgaatccatcggtatggcggcggaagtggcattgggtacttgtaccgacctgcctccgcaaaagaaaaaataa

SEQ ID NO: 29760 - DNA, 291 bp, Neisseria meningitidis
atggcactgacacttgccgacgtagacaaaatcgcccgactctcccgactgcacctgactgcggcagaaaaagaaaaatcgcttcaagaattaaacgacattttcgctatggtcgaacagatgcagaacatcaacacagacggcatcgaaccgatggcgcatccgcacgaggccgccctgcgcctgcgcgaagacgaagtaaccgaaaccgaccgcgccgccgaatatcaggcggttgctccggaagtacgcaaccgtctgtacatcgtaccgcaagttatcgaagaataa

SEQ ID NO: 29761 - DNA, 1446 bp, Neisseria meningitidis
atgacccaatacacattgaaacaggcaagcgtcctgttgcagtccaaacagatttccgccgtcgaactggcaagcgcataccttgccgccatcgccgaaaaaaatcccgccctcaacggctatatcaccatcgaccaagataaaacccttgcagaagcccgtgccgccgacgaacgcatcgctcagggcaacgcttcggcacttaccggcatacccgtcgcctacaaggatattttctgccaaaccggctggcgcagcgcgtgcgcttccaaaatgctcgacaacttcatctccccctacaccgccaccgtcgtccaaaaactgctcgacgaaggcatggtaacgctcggccgcaccaatatggacgagttcgctatgggttcgaccaatgaaaactcattctacggcgcagccaaaaacccgtggaatccggaacacgtccccggcggttcatcaggcggttcggcagccgtcgttgccgcgcgcctcgcccctgccgcgctcggttcggacaccggcggctctatccgccaacccgcatcgcactgcggtatcaccggtatcaaacctacctacggcacggtttcccgcttcggtatggtcgcctacgcctccagcttcgatcaagccggcccgatggcgcaaactgccgaagactgcgcgattctgttaaacgcgatggcaggtttcgacccgaaagactccaccagcctcgagcgcgaaaaagaagactacacccgcgatttgaaccaaccgctcaaaggtttgaaaatcggcctgcccaaagaatatttcggcgaaggcaacagcgccgatgttctgacggcattgcaaaacaccattgatttgctgaaagcccaaggcgcggaattgattgaagtttccctgccgcaaaccaagctgtccattccggcctactatgtcctcgcctccgcagaagccagtaccaacctttcacgttacgacggcgtacgttacggacaccgtgccgcccaattcagcgatttggaagaaatgtacggcaaaacccgcgccgaaggttttggcagcgaagtcaaacgccgcatcatgatcggcacttatgtactgtcgcacggctactacgatgcctactatctcaaagcccaaaaactgcgccgcctcgttgccgatgattttcagacggcatttgcacggtgcgacctcatcctcgcgccgaccgcaccctccgccgcacccaaaatcggagcggatgcttcgccggttgaaacctacttgagcgatatctacaccatcgccgtcaacctcgccggactgcccgcattgaccctgcccgcaggtttcagcagcggcggactgcccatcggtgtacagcttatcggcaactatttctccgaagccaaaatcctcggtgcggcgcatcaaatccaactcaacagcgattggcacggcaaacgacccgaatga

SEQ ID NO: 29762 - DNA, 1431 bp, Neisseria meningitidis
atgacctgggaaaccgtaatcggcttggaaatccacgtccaattgaacaccaaatccaaaatcttcagcggcgcatcgaccgcattcggcgcagaacccaacgcgcacgccggcgtggtggaatgtgctttgccgggcgtactgccggtaatgaaccgagaagtcgttgaaaaagccatcaaattgggtttggctttggatgcgaaaatcaaccggaaaaacgtgttcgaccgtaaaaactacttctatcccgacttaccaaaaggctatcaaatcagccagttggacttaccgattgtcgaacacggcaaattggaaatcgtagtcggcgacgatgtgaaaaccatcaacgtaacccgcgcccatatggaagaagacgcgggcaagtccgtacatgaaggcttgaacggcgcgaccggtatcgatttgaaccgcgccggcacgcctttattggaagtcgtatccgaacccgaaatgcgctccgccgccgaagccgttgcctacgccaaagccttgcacagcttggtaacctggctgaacatttgcgacggcaatatggcggaaggttcgttccgcgtcgatgccaacgtatccgttcgcccgaaaggtcaagcggaattcggcacgcgccgcgagattaaaaacctcaattccttccgtttcttggagcaggcgattaattacgaagcagaagcgcaaatcgagattttggaagacggcggcaaagtacagcaggcaacgatgctgtttgatcccgaaaaaggcgaaacccgcgtaatgcgcctgaaagaagacgcgcacgactaccgctacttccctgaccccgatttgctgcccgtcatcatttcagacgaccggttgcaaaaagcaaaagcagaaatgcccgagctgccaaaagaaatggcggcgcgtttcgtggcggattatggcgtgagcgactacgacgcgcgcctgctcactgccagccgcgtgcaggctgcctattttgaagaagccgctaaagagagcggacaaggcaagctgactgccaactggatgaacggcgaacttgccgccacgctgaacaaagaaggcatggaacttgccgacagcccgattaccgccccacgcctcgccgctctggtaggcaaaatcgccgacggcacattaagcagcaaattggcgaaaaaagcctttgaagccatgtgggctgaacccgaagcctccattgccgaaatcattgaaaaacacggtttgcaacagatgaccgataccggcgcgattgaagcgatggtagacgaagtgctggcaaacaatgcaaaagccgtggaacagttcaaatccggcaacgaaaaagccctgaatgcgattgtggggcaagtgatgaaggccagcaaaggcaaagccaatcccgcgcaggttcaagagctgattaaagccaaacttgcctga

SEQ ID NO: 29763 - DNA, 1011 bp, Neisseria meningitidis
atgaaccacaccattacactgcccgaccaaaccacctttgccgccggcgacggtgaaaccgttttagccgccgccgcccgtcaaaacctcaatctgccccattcctgcaaaagcggtgtctgcggacaatgcaaagccgaactggtcagcggcgatattcaaatgggcggacactcggaacaggctttatccgaagcagaaaaagcgcaaggcaagattttgatgtgctgcaccactgcgcaaagcgatatcagcatcaacatccccggctacaaagccgatgccctacccgtccgcactctgcccgcacgcatcgaaaatattattttcaaacacgatgtcgccctcctgaaacttgccctgcccaaagccccgccgtttgccttctacgctgggcaatacattgatttactgctgccaggcaacgtcagccgcagctactccatcgccaatccgcccgaccaagaaggcattttggaactgcacatccgcaggcgtgaaaacggtgtctgctcggaaatgattttcggcagcgaacccaaagtcaaagaaaaaggcattgtccgcgttaaaggcccgctcggttcatttaccctgcaggaagacagcggcaagcccgtcatcctgctggcaaccggcacaggctacgcccccatccgcagcatcctgctcgaccttatccgccaaggcagcagccgcgtcgtccatttctactggggcgcgcgtcatcaagatgatttgtatgccctcgaagaagcacaagggttggcagaccgtctgaaaaacgcctgcttcacccccgtattgtcccgccccagagagtgctggcaaggaagaaaaggccacgtacaagacatcgcggcacaagaccaccccgacctgtcggaatacgaagtatttgcctgcggctctctggctatgaccgaacaggcaaaaaatctgtttgtgcaacagcataagctgccggaaaacttgtttttctccgacgcattcacgccgtccgcatcataa

SEQ ID NO: 29764 - DNA, 771 bp, Neisseria meningitidis
atggaacccgaacgcctgcaaaaagtgcttgccgcgtccggcgtcggctcgcgccgcgaaatggaagaatggatcaacaacggctgggtaacggtcaacggcaaaaccgctcaactgggcgacaaagtcacccccgacgaccacgttaccgtcaaaggcagcatcatcaaactcaaatgggccgaccgcctgccgcgcatcatcctatattacaaacaagaaggcgaaatcgtttcccgcgacgacccgcaaggccgcgtcagcatattcgaccgcctgccgcaggccgccagcagccgctgggtcgccatcggacgcttggacatcaacaccagcggacttctgattctcaccacctccggcgaactcgtccaacgtttcgcccaccccagcttcgaagtcgaacgcgaatacgccgtgcgcgtactgggcgggctgaccggcgaacaaatgcgcgtcctcaccgaagaaggcgtgatgctcgaagacggcttggcaaaagtcgaacgcatccgcgaacaaggcggcgaaggcgcgaacaaatggtacaacgtcgtgattaaagaaggccgcaaccgcgaagtgcgccgcatttttgaaagccaaggactcaccgtcagccgcctcgtgcgcgtcggcttcggccccatcggactgcccaaccgcctcaaacgcgggcagttctacgaactcaaccccgccgaagtcgccaacatcctcaaatgggcggaaatgctgctgccgggcgaataccgccgcaaaaaagcctaa

SEQ ID NO: 29765 - DNA, 1356 bp, Neisseria meningitidis
atgtctgatttttttcattctgacgtgttgtccgtttccgagttgaacgcatttgccaaaagtcttttggaaaaccaccttgccggcctgtggattgcgggcgaagtgtccaacctgacccgtgccgccagcggacattattatttctcgctcaaagacagccgcgcgcaggtgcgttgcgcgatgttcaaaggtgcggcggcgcgtttggcgaagcctttgaaagaaggcgaccatatcgaagtatcaggaaaaatcagtatttacgaggcgcggggcgaatttcaaattaccgtgaatgaggtgcggctcaaaggtttggggcagctttacgaagcctacgagcggttgaaggcacagttgcaggcggaaggcgcgtttgcggcggaacgcaaaaagccgttgcctacccgtccgcaatgtatcggcatcgtcaccagcctggcagcagcggcattgcgcgatgtcgttaccaccttgaaacgccgcgcgcccgaaattcccgttatcgtttatccgacacctgttcaaggcgcaggcagcgagttacaaattgcccaagcgattaaaaccgcctcgcaacgcgccgaatgcgacgtgttgattgtctgtcgcggcggcggcagcattgaagacttgtgggcgtttaacgaagaaccggtcgtgcgcgcaatcgaagcctgcacggttcccgtcgtcagtggcgtgggacacgaaaccgattttacgcttgccgattttgtcgccgacgtgcgcgcgcccacgccgaccggtgcggcggagctggtcagccccaaccgccaagaatcgctacatcgtctcgctcaggcgcaaggccgtctgaaaaccgttttggaacaacgctatttcgatgccagccaaaaactcgactggcttgcgcggcaaatccgtcatccgcgccaaaaacttgatgagcagcgcgcttcaatcggcaagctggcgcaaacgctgtcttactcgatgaagcaaaacctccgtgcccacaccgcccgttttgaacgccaaacccaagccctgcaacattaccgtcctgatgtttccgtttgcaaaaacaacatcgtccgccttcagacggcattgcccgccgccttcagccaactgcttacccaccgccgccaaagcctgaccgcccaagccgcattgctcgaagccgtttcgccgcagcacattctagagcgcggcttttccgtcgtcaaaaacacacgcggacaagtcatccgcaacgccgatgttttgaagcaggggcagaagctgcacattaccttcgccgacggcgaaaccgacgtgcgcgtaagcaaagaacaagggcagcaggatttgttcgattgcatttaa

SEQ ID NO: 29766 - DNA, 822 bp, Neisseria meningitidis
atgatgcggatattttcgacaggaggaaaaatggatacgcaggcagttatcacacatattgtccgatggttggacgaatacgccgcccgggcaaatgcaaaagggtttgtcgtgggcgtttccggcggcatcgattccgccgtcgtctccgcactcgccgcccgcaccggccgcaccacgctgcttctggatatgccgatacgccaacaccccgaccagcttgagcgggcaaggctgcacatccgcaatctgcaacggcaatatgccaatgtaagcgcacaaacggtcgatctgaccgacaccttccagacctttgaacaaaccgtcggcgttcatcagacggcatttgacaatcagccgctttccctcgccaacgccagaagccgcctgcgtatgctgaccctgtactactacgggcagatacacggactactggttacggggacaggtaacaaaattgaagatttcggtgtaggattttttaccaaatacggcgacggcggcgtggacatcagcccgattgccgacctgaccaaaacccaggtttaccggcttgccgaagcattgggcgtggacgaggcgattcaaaaagccccgccgaccgacggcctgtgggatacggaacgcaccgacgaagaacagatgggcgcaagctatcccgaactggagtgggcaatgggcgtgtacggcacgcgcaaacccgaagattttgaagggcggcagcgcgaagttctggaaatctatacgcggctgcaccgcgcgatgcagcacaaaatcaacccgattcccgtgtgccgcattccgcccgaattgttgggctga

SEQ ID NO: 29767 - DNA, 474 bp, Neisseria meningitidis
atgactgatttttccgtttgggaaactgctccctttggtgcaaccgtcgatcatatcctgcaacgctaccacaatgtacaccgtgcacaatttgaagaattggtgccgctggcgcaaaaagtggcccaagttcatgccgatacctttccggcggaaattgccgagctgcttgcctatatgcagaacgaactgctgatgcatatgatgaaagaggaaaggatgctgtttccgatgattaatcagggtgtcggtcggggtgcggcgatgcccatcagcgtgatgatgcacgaacatgaagaacacgaccgcgccatcgcaaggctcaaagagctgaccgataatttccaagcgcccgaaggagcctgcggaagctggacgcggctttacgctttggccaaagaaatggtggaggatttgaacgaccacattcatttggaaaacgatattttgtttgcccgcgtactcgattcttaa

SEQ ID NO: 29768 - DNA, 948 bp, Neisseria meningitidis
atgaccgacatcacaccgtttgccaaccgcttgggcaaaaacatcaaacaccttatgaaatgggcgaaacgcaacggcatcgaagcctggcgcatttacgaccgcgacatcccccaattcccctttgctgtcgatgtttacggcgaccaaatccaccttcaggaatacgataccggctggctgatgcggtccgaagaatacgaagcgtggcttgccgaagtcttggaagccgtcgccttcgttaccggttttgcgcccgaacaaatccgcctcaaacgccgcgaacgccaaaaaggtttgcagcaatacgaaaaaaccggcaaggcgggcgacgatttcgtcatcaccgaaaacggccgcaagttttgggtcaaccttgataagtatttggatacggggctttttttggatcatcgaaacacgcgcaaaaaagtcggcgaaacggcggcgggcaaacgttttttaaacctgttttcctacaccggcagcttcactgtctatgccgccaccggcggcgcggcatccagcgaaactgtcgatttgtccaacacttatctcgattgggcgagacgcaattttgaattgaacggcatcgatacggaacggcacaaaatcgtccgcgccgacgtgttccaatatcttcagacggcatatggggaaggcaggcagttcgacctcattgtgatggatccgcccagtttttccaacagcaagaaaatgtccgacatcctcgacattcagcgcgatcacaaaaagctgattgacggcgcggtgaagctgctcgcttcagacggcattttgtacttttccaacaacctgcgcagcttcgtcttagacgacttggtatcggaacaatacgccgtcaaagacatttccaaacaatccgttcccgaagatttccgcaacaaaaaaatccatcggtgctgggaaatccgccacaaatcttaa

SEQ ID NO: 29769 - DNA, 1194 bp, Neisseria meningitidis
atgcaaaactatctgacccccaatttcgcctttgcaccgatgattcccgaacgcgcttcaggcagccgcgtttgggatacggaagggcgtgaatatattgatttttcaggcggcatcgccgtcaatgcgctgggacactgccaccctgcccttgtcgatgctttaaacgcgcagatgcacaagctgtggcacatttccaatatctatacgacgcggccggcgcaggaattggcgcaaaaattggttgcaaacagttttgccgacaaggtttttttctgcaactcgggctcggaagcgaatgaggcggcgttgaagctggcgaggaaatacgcccgcgaccgtttcggcggaggaaaaagcgaaatcgtcgcctgtatcaacagttttcacggacgcacgctgtttaccgtgtccgtcggcggtcagccgaaatacagcaaggattatgcacccctgccgcaaggcattacgcacgttccgttcaacgatattgccgcgctggaagctgccgtcggcgaacagacctgcgcggtcatcatcgagccgatacagggcgaaagcggcatcctgcccgccactgcggaatatttgcaaaccgcgcgccgtctgtgcgaccggcacaatgcgttgttgattttggacgaagttcaaaccgggatggggcatacgggcaggctgtttgcctatgaacattacggcgttgttcccgatattttgagttcggcaaaagccttgggctgcggctttccgatcggcgcgatgctggcgacagaaacgattgccgccgccttccaaccgggcacgcatggctcgactttcggcggcaacccgatggcgtgcgcggtcggcagccgcgccttcgacatcatcaacgcgccggaaaccttgcacaacgtccgcagccaggggcagaaacttcagacggcattgctggatttgggcaggaaaacaggcttgttctcacaggttcgcgggatgggactgctgctcggctgcgtgttggacgcgccttatcgcggacgcgcatccgaaataaccgccgccgccttgaaacacggcgtgatgattttggttgcgggtgcggacgtattgcgtttcgcgccttcgctgctgttgaacgatgaggatacggcggaaggtttgcggcgtttggaacacgtgctgacggaatttgccgccgcaaaccgcccctag

SEQ ID NO: 29770 - DNA, 1245 bp, Neisseria meningitidis
atgtccaacgaaaaccgtacctgttccttttgcggaaaatccaaatcacacgtcaaacatttaattgagggcgaaaacgcctttatctgtgacgaatgcgtctcaaactgtattgaaatattgcatgaagacggaaatgacggcacgccttcggaaagtgccggaggggagccggaagaatccggcaagctgcccacgcccgccgaaatcgtcgccaacctcaacgaccacgttatcggtcaggaacaagccaagaaagccttggcggtgtcggtgtacaaccattacaaacgcctgcgccacccgaaagccagagctaatgtcgaattgtcgaaatccaacatcctgcttatcggcccgaccggatcgggtaaaaccctgctggcgcaatctttggcgcgcaaactggatgtgccgttcgtgatggcagatgcaaccacgctgaccgaagcaggttatgtcggcgaagatgtcgaacagattattaccaaactgttgggcaaatgtgatttcgatgtcgaaaaagcccagcgcggcattgtctatatcgacgaaatcgataaaatttcacgcaaaagcgacaacccgtcgattacccgcgacgtatctggcgaaggtgtgcaacaagccttgttgaaactgattgaaggtacagtggccagcgttccgccccaaggcggccgcaagcatccgaatcaggaatttatcaacgtcgataccaccaacatcctgtttatctgcggcggcgcgtttgcaggcttggaaaaagtcatccgccagcgtactgaaaaaggcggtatcggtttcggtgcgtccgttcacagcaaggacgaaaatgccgacattaccaagctgttcggcatcgtcgaaccggaagacttgattaaattcggtctgattccggaattaatcggacgtttgcccgtgattgcaacactagaagaactggatgaggacgcgctgattaatattttgaccgagccgaaaaatgctttggtcaagcagtatcaagccttgttcggtatggaaaatgtcgagttggaatttgaagaaggcgcattgcgttccatcgcgcgtcaggcaatggagcgcaaaaccggcgcgcgcggcctgaggtccatcgtcgaacgctgcctgctcgatacgatgtaccgcctgcctgatttgcaaggcttgaaaaaagtggtggtcggtaaggcagtcatcgaagagggcagggaaccggaattggtgttcgagtcctga

SEQ ID NO: 29771 - DNA, 921 bp, Neisseria meningitidis
atgaccaataaacccgccaaacgcccggtcaacggcgttcttcttctcgacaaacccgaaggcctttccagcaacaccgccctgcaaaaaacgaggcacttgttccgcgccgaaaaagccggacataccggcgtgctcgatcctttggcaaccgggcttttgcccgtctgcttcggcgaagcgaccaagttcgcccaatatctgattaatgccgacaaagcctacaccgccacactgaaactcggcgaagccagcagcacgggcgatgccgaaggcgaaatcgttgccaccgcccgcgccgatatttccttagccgaatttcagacggcctgccaagcactgacaggcaacatccgccaagtgccgccgatgttttccgcgctcaagcacgaaggtaaaccgctgtacgaatacgcccgcaaaggcatcgtcatcgaacgcaaggcgcgcgacattaccgtttacgccatcgatattgccgaatttgacgcgcccaaagccgtcatcgacgtacgttgcagcaaaggcacctatatccgcaccctcagcgaagacatcgccaaacacatcggcacgttcgcccacctgaccgccctgcgccgcaccgaaaccgccggctttaccatcgcccaaagccacacgctcgaagccttggcaaacttggacgaaacagaacgcgacagcctgctgctgccctgcgacgtattggttgcccattttccccaaaccgttttaaacgattatgccgtccatatgctccgctgcgggcagcggccgcgtttcgaggaagacctaccttccgatacgccggtacgcgtttacacggaaaacggccgctttgtcggtctagcggaatatcaaaaggaaatatgccgtctgaaagccttgcgcctgatgaacacggcggcatccgccgcctga

SEQ ID NO: 29772 - DNA, 1173 bp, Neisseria meningitidis
atgaaacgtgatttgagcaaaatgacctgcatcgaagacttgcgccgcgttgccaagcgcaaaatgccgcgtatgttttacgattacatcgattcgggttcgtggacagaaactacctaccgtgaaaacacttcggatttcaaagacatccgcttccgacaaaaggtattggtcaatatggaaggccgaagcctggagaccaaaatgatcgggcaggatgtgaaaatgccggtggcgattgcgccgacgggtttcacgggtatggcacacgccgacggtgaaattttggcggcgcgggcggcggagaagttcggcattccgtttacgctgtccacgatgtctatctgctcgattgaagacgttgccgagaacacttccgcaccattttggtttcagctttatgtgatgcgcgaccgcgagtttatggaaaacctgattaagcgcgcgaaggatgccaaatgttcggcattggtattgaccgctgatttgcaggttttggggcaacgccacaaagacatcaaaaacggcctgtccgcgccgccgaaaccgaccatcgccaatttaatcaatctggcgaccaagcccgaatggtgtatgaaaatgctgaacacggaacgccgcacgttccgcaatatcgttggacacgccaaaaacgtcggcgatttgtcctcgctgtcttcatggacttccgaacaattcgacccgcgcctgagctgggacgacgttgcacgcattaaagatttgtggggtggcaagctgattatcaaaggcattatggaacctgaagatgcggaaaaagcagcgaaaagcggtgcggacgcattggtcgtttccaaccacggcggccgccagctcgacgataccgtgtccgccatcaaagccttgcccgacatcgttagtgcagtcggcagcgacatcgaagtttggatggacagcggcatccgcagcggtcaggatattttgaaggcgtgggctttgggtgcgaaaggtacaatgataggtcgggcgtttctgtatggtttgggtgcgtatggtgaagaaggcgtaacccgtgcgctggaaatcctgtataaagaaatggatatatctatggcgtttacgggacaccgcgatattcaagatgtcgatgcttcgattttgagaggcaaagattggggcagggaaacggtttag

SEQ ID NO: 29773 - DNA, 447 bp, Neisseria meningitidis
atgagactgaccaccaaagggcgttttgccgttaccgctatgctggatttggcgatgaacgcgcaaaccggcgccgtcaaactcagtgccatcagcgaacgccaaaacatatccctctcctatctcgagcaattgttcggcaaactccgccgcgccggacttgttgaaagcctgcgcgggcccggcggcggctacatcctcgccgcaccggcggcacgcatcaacatcgcccaaatcatcgccgccgccgaagaccggctggacgcaacccaatgcggcagcaaagccaactgccaccacggcgcgccctgcctgacgcacgacctttgggagaatttaaacaaaaccatcaacgactacctcggcagcgttaccctgcaaagcatcatcgaacagaaaaacaacggcgacggcagccgcgtcgtccaatttacacacatccattaa

SEQ ID NO: 29774 - DNA, 387 bp, Neisseria meningitidis
atggcatacagcgataaagtaatcgaccactacgaaaatccccgcaacgtcggtactttcgacaaaaacgacgaatctgtcggcaccggcatggtcggcgcaccggcctgcggcgacgtgatgcgcctgcaaatcaaagtgaacgatgaaggcatcatcgaagatgcgaaattcaaaacttacggctgcggttccgccatcgcttcgtccagcctgattaccgagtgggttaaaggcaaaagcctggatgacgcgctggcaatcaaaaacagcgaaatcgccgaggagttggaattgccgccggtaaaaatccactgctccatcttggctgaagatgcggtaaaagcggccgttgccgactaccgcaaacgtcaggaaaacagataa

SEQ ID NO: 29775 - DNA, 2751 bp, Neisseria meningitidis
atgaccgacgcaaccatccgccacgaccacaaattcgccctcgaaaccctgccggtaagccttgaagacgaaatgcgcaaaagctatctcgactacgccatgagcgtcattgtcgggcgcgcgctgccggacgttcgcgacggtctcaagccggtacaccgccgcgtactgtacgcgatgcacgaattgaaaaacaactggaatgccgcctacaaaaaatcggcgcgcatcgtcggcgacgtcatcggtaaataccacccccacggcgataccgccgtatacgacaccatcgtccgtatggcgcaaaatttcgctatgcgttatgtgctgatagacggacagggcaacttcggatcggtggacgggcttgccgccgcagccatgcgctacaccgaaatccgcatggcgaaaatttcccacgaaatgctggcagacattgaggaagaaaccgtcaatttcggcccgaactacgacggtagcgaacacgagccgcttgtactgccgacccgtttccccacactgctcgtcaacggctcgtccggcatcgccgtcggcatggcgaccaatatcccgccgcacaacctttccgataccgtcaatgcctgcctgcgcctgctcgatgcacccgacaccgaaatcgacgaactgatcgacattatccaagcccccgacttcccgaccggggcaaccatctacggcttgagcggcgtgcgcgaaggctataaaacaggccgcggccgcgtcattatgcgcggtaagacccatatcgaacccataggcaaaaacggcgaacgcgaagccatcgttatcgacgaaatcccctatcaggtcaacaaagccaagctggtcgagaaaatcggcgatttggttcgggaaaaaacactggaaggcatttccgagctccgcgacgaatccgacaaatccggtatgcgcgtcgttatcgagctgaaacgcaacgaaaatgccgaagtcgtcttaaaccaactctacaaactgactccgctgcaagacagtttcggcatcaatatggtggttttggtcgacggacaaccgcgcctgttgaacctgaaacagattctctccgaattcctgcgccaccgccgcgaagtcgttacccgacgtacgcttttccggctgaagaaggcacgccatgaagggcatattgccgaaggcaaagccgtcgcactgtccaatatcgatgaaatcatcaagctcatcaaagaatcgcccaacgcagccgaggccaaagacaaactgcttgcgcacccttggcgcagcagcctcgttgaagaaatgctgacgcgttccggtctggatttggaaatgatgcgtccggaaggattggctgcaaacatcggcttgaaagaacaaggttattacctgagcgagattcaggcagatgctattttacgcatgagcctgcgaaacctgaccggcctcgatcaagaagaaattgtcgaaagctacaaaaacctgatgggtaaaatcatcgactttgtggatatcctctccaaacccgaacgcattacccaaatcatccgcgacgaactggaagaaatcaaaaccaactatggcgacgaacgccgcagcgaaatcaacccgttcggtggcgacattgccgatgaagacctgattccgcaacgcgaaatggtcgttaccctgacacatggcggctatatcaaaacccagccgaccaccgactatcaggcgcagcgtcgcggcgggcgcggcaaacaggcggctgccaccaaagacgaagactttatcgaaaccctgtttgttgccaacacgcatgattatttgatgtgctttaccaatttgggcaagtgtcattggattaaggtttacaaactgcccgaaggcggacgcaacagccgcggccgtccgattaacaacgtcatccagttggaagaaggcgaaaaagtcagcgcgattctggcagtacgcgagttccccgaagaccaatacgtcttcttcgccaccgcgcagggactggtgaaaaaagtccaactttccgcctttaaaaacgtccgcgcccaaggcattaaagccatcgcgctcaaagaaggcgactacctcgtcggcgctgcgcaaacaggcggtgcggacgacatcatgctgttctccaacttaggtaaagccatccgcttcaacgaatactgggaaaaatccggcaacgacgaagcggaagatgccgacatcgaaaccgaaatttcagacggcatcgaagatgaaaccgccgacagcgaaaacgcactgccgagcggcaaacacggtgttcgcccgtccggtcgcggcagcggcggtttgcgcggtatgcgcctgcctgccgacggcaaaatcgtcagcctgattaccttcgcccctgaaaccgaagaaagcggtttgcaagttttaaccgccaccgccaacggatacggaaaacgcaccccgattgccgattacagccgcaaaaacaaaggcgggcaaggcaatattgccattaacaccggcgagcgaaacggcgatttggtcgccgcaaccttggtcggcgaaaccgacgatttgatgctgattaccagcggcggcgtacttatccgcaccaaagtcgaacaaatccgcgaaaccggccgcgccgcagcaggcgtgaaactgattaacttggacgaaggcgaaaccttggtatcgctggaacgtgttgccgaagacgaatccgaactctccgacgcttctgtaatttccaatgtaaccgaaccggaagtcgagaactga

SEQ ID NO: 29776 - DNA, 1647 bp, Neisseria meningitidis
atgaaacaccttcacgacttacccgcatggtcgaaattgtggaaccactttgacgacagcaaaacattgcatatgcgcgaaatgtttgagcaagatccgcagcgtgcggaacgctactggctgcaggtcggcggactgacgctggactactccaaaaaccgcatcaacgacgaaaccatgtcgcttttgttcgagttggcgcatgaagccggcgtgccggagcggatgcggcagatgttccacggcaaaaaaatcaatacgacggaaaaccgcgccgtcctccacgtcgcccttcgcaaccgcaccaattcgccgattgtggttgacggtgaagatgtgatgcccaaagtcaaccgcgttttgcaacgtatgggcgaatttgcacacgaagtccgcagcggaagctggctgggctataccaaccaagtcattaccgacgttgtcaacatcggcatcggcggatcggatttgggcccgctgatgatgtgtaccgcgctcaaacctttcggtcatccgcgcctcaatatgcacttcgtctccaacgtggacggctcgcaactgcgcgacgtattgtccaaagtccaccccgaaaccacgctgttcatcatcgcctccaaaacatttaccacgcaggaaacgctgaccaacgcgctgaccgcgcgcgaatggtttttgaatcatgcgggcgacgaagaagccgttgccaaacacttcgccgccgtttccaccaatcaaaaagccgtcgccgaattcggcatcgacaccgccaatatgtttgaattttgggattgggtcggcggtcggtacagcctgtggtccgccatcggattgccgattatgctgtatctcggcgaagaaaacttcattgaaatgctcaacggcgcgcacctgatggaccaacacttcatcaacacaccgctcgagcgcaacctgcccgtcattctcgccctcatcggcatctggtatatcaactactacggcggcggcagccacgtcatcgcgccttacgaccaacatttgcaccgcctgcccaaattcatccagcagctcgatatggaaagtaacggcaaacaggttacgttggacggcaaagcagtcggacacgaaacctcgccgattatctggggcgaaacgggcattaacggccagcacgcctttttccaactgctgcaccaaggcacgcacattacccccatcgacctgattgcctcgcttgaaaaacgcagcaacctgcccggacaccacgaaatcctgcttgccaacgtcttcgcccaagcagaagcctttatgcgcggcaaaacccccgacgaagtccgcgccgaactcaaagcgcagggtatggatgaggcgcgcatcgaagagctggtcccgcacaaaaccttctccggcaaccgcccgaccaacctcattctcatggacaaggtcaacccgcgcaatatgggcagcctgattgccatgtacgaacacaaaaccttcgtacaaggcatcatttggggcatcaacagcttcgaccagtggggcgtggaactcggcaaacaactggctaaaaccattttgggcgaactgaccggcgaaaccgggtcgcaaaagcacgacagctcgaccgaacgcctgatcaacctctacctgcagaccaaccgcaaataa

SEQ ID NO: 29777 - DNA, 1446 bp, Neisseria meningitidis
atgagtacacaaacaaattttgatttggtgttgttcggtgcgaccggcgatttggcaatgcgcaaacttttgccctgcctgtatcaggcgcacgtggccggtttgcttcatcccgaaggtcgtattttgggtgtgagccgcagcgaattggataccgaaggttttctggcgaaggtggaaaccagttccaaaatccatgtgaaagaaaatttttccgatgaggcttgggcatcgtttgtcgaacgtctcgcatatctcaaagtcgatgttacgcagccggacgattttgctgctttgggcgatttggtcaaagcgcgcaagaatactgaaaatgtcgtgatctacctctcaactgcgccgaaattctttgcgcaagcctgcgagaaccttgctgcgatcggtttgaatgccgacaacgtgcgcgtggttttggaaaaaccgttgggtacggacttggcttcttcccaacaaatcaatactgatgttgcgcgttatttcaaagaagggcaaatttaccgcatcgaccactaccttggcaaagaaagcctgcaaaacctgcttgcgctgcgttttgccaatgtaatgttcgagccgctgtggaacaataaatatatcgaaagcgtgcagttgaccatcgccgaacagctcggtgtggaagagcgcggtgagttttacgacattaccggcgcgttgcgcgatatggtgcaaaaccatttgatgcagatgttgtgcatgactgcgatggaagcccccgccagcttggatgccgacgcggtgcgcgatgaaaaagtcaaagtcatcaagtcattgaagccgctgaccgtcgaatctgtcaatgaaaacgtcgtgcgcggacaatataccgccgccaaaggcatgaacggctatcttgaagaaatcaacgttctgcaagacagctttaccgaaacctacgtcgccattaaagccgaaatcgaaaacgaacgctggaagggcgttcccttctacctgcgtaccggcaagcgcatggcgggcaaagtggcggaaatcgttttgaacttcaaagatttgaacagccatatttttgaaggcagccgcaccgcgcccaaccggctcgttatcgagttgcaaccatatgaatccgtgcgcctctatacgcagatgaaaaccccgggggcaggaaataaggtcgaaaccgtgccgctggcaaccgatttgggcaaggcattggaaagccgccgcgcggaagcttacgagcgcctgctgctggatgtgattaacggcaaactcgctttgtttaaccgccgcgacgaacttgaagccgcgtgggaatatgtgatgccgattttggaaaactggacaaataacaccacgccgccgcacggctacggcgcacactcgtgggggcctgaagccgcgcgcgaactattggcgcgcgacggacacaagtggcacgaagagcagtaa

SEQ ID NO: 29778 - DNA, 684 bp, Neisseria meningitidis
caaccggcggcgcaagacgacaccctgtccgaattgctcaaactgattaactgccaactgaccgaaaaaggcctaaaagtagagaaagcatccgccgccgtcgttgacgccaccattattcagaccgccggcagcaaacagcgccaggccatagaagttgacgaagaaggacaagtcagcagccaaaccacaccgagcaaagacaaagatgcccgttggataaagaaaaacggcctctacaaactcggttacaaacaacatacccgtaccgatgcagaaggcgatatcgagaaactgcacattactcccgccaatgcccatgagtgcaaacacctgtcgccgttgttggaagggttacccgaaggtacgaccgtctatgccgacaaaggctacgacagtgcggaaaaccggcaacatctggaagaacatcagttgttggacggcattatgcgcaaagcctgccgcaaccgcccgctgtcggaagtgcaaaccaaacgcaaccgatatttgtcgaagacccgttatgtggttgaacagagcttcggtacgctgcaccgtaaattccgctacgctcgggcagcctatttcggattgattaaagtgagtgcgcaaagccacctgaaagcgatgtgtttgaacctgttgaaagcggccaacaggctaagtgcgcccgctgccgcctaa

SEQ ID NO: 29779 - DNA, 369 bp, Neisseria meningitidis
atgagcaccttcttccggcaaaccgcccaagccatgattgccaaacacatcgaccggttcccactattgaagttggaccaggtgattgattggcagccgatcgagcagtacctgaatcgtcaaagaacccgttacctccgagaccaccgcggccgtcccgcctacccgctgttgtccatgttcaaagccgtcctgctcggacaatggcacagcctctccgatcccgaactcgaacacagcctcatcacccgcatcgatttcaacctgttttgccgttttgacgaactgagcatccccgattacagcaccttatgccgctaccgcaaccggcggcgcaagacgacaccctgtccgaattgctcaaactga

SEQ ID NO: 29780 - DNA, 2604 bp, Neisseria meningitidis
atgagcaaaaccgtgcattatctcaaagactatcaaacgcccgcctaccatattctcaaaaccgatttacattttgatattaacgaaccgcaaaccattgtgaagtcgcgtttgacggtcgagccgaagagggtgggagagccgctggtgttggacggttcggcgaaactcttgtccgtcaaaatcaacggcgtggcggcggattatgtgttggaaggcgagacgctgacgattgcggacgtgccgtccgaacgcttcaccgtcgaagtggaaaccgaaatcctgccggcggaaaacaaatcgctgatggggctgtatgcgtccgccggtaacctgtttacccagtgcgagccggagggcttccgcaaaatcacgttctatatcgaccgtccggatgtcatgtccaagttcacgaccaccatcgtcgcggacaaaaaacgctatcccgttttgctctccaacggcaacaaaatcgacggcggcgagtattcagacggccgccattgggtgaaatgggaagacccgtttgccaaaccgagttatctgtttgctttggtcgcgggcgatttggcggtcacggaagactatttcaccaccatgagcggcagaaacgtcaaaatcgagttttacaccaccgaagcggacaagcccaaggtcggctttgccgtggaatcgctgaaaaacgcaatgaagtgggacgaaacgcgcttcggtttggaatacgacttggatattttcatggtcgtcgccgtgggcgatttcaatatgggtgcgatggaaaacaagggtttgaacatctttaacaccaagttcgtccttgccgacagccgtaccgccaccgataccgattttgaaggcatcgaatccgtggtcggacacgaatatttccacaactggacgggcaaccgcgtgacctgccgcgactggttccagctttcgctgaaggaagggttgaccgtgttccgcgaccaagaattttccggcgaccgcgccagccgcgccgtgcgccgtatcgaaaacatccgcctgctgcgccagcaccagttccccgaagacgcaggtccgaccgcacatccggtgcgccccgcccgatatgaggagatgaacaatttctacaccatgaccgtttatgaaaaaggcgcggaagtggtgcggatgtatcacaccttgctcggcgaagagggcttccaaaaaggtatgaagctctatttccaacgccacgacggacaggctgttacctgcgacgatttccgcgcggcgatggtggacgcgaacggcatcaacctcgaccaattcgccttgtggtacagccaagcaggtacgccggttttagatgctcaagggcgtctgaaaaacaatgtgttcgagttaaccatcaaacaaaccgtgccgcccacgcccgatatggcggacaaacagccgatgatgattcccgtcaaaatcgggctgctgaactgcaacggcgaagcggtggcatttgattatcagggcaaacgcgcgaccgaagccgtgttgctgctgaccgaagccgaacagaccttccagttcgaaagcgtaaccgaagccgtcgttccctcgctgctgcgcgggttcagcgcgccggtgcatctgaactatccgtacagcgacgacgacctgctgcttctgctcgcccatgacagcgacgccttcacgcgctgggaagccgcacaaacgctctaccgccgtgccgtcgccgccaaccttgccgcgctttcagacggcgtcgagttgccgaaacacgaaaaactgcttgccgccgtcgaaaaagtcatttcagacgacctcttagacaacgctttcaaagccctgcttttgggtgtgccgtctgaagccgagctgtgggacggcgcggaaaacatcgacccgctgcgctaccatcaggcgcgcgaagccttgttggatatacttgccgtccgctttctgccgaaatggcacgaattgaaccgtcaggcggcgaagcaggaaaaccaaagctacgagtacagccccgaagccgccggttggcgcacgctgcgcaatgtctgccgcgccttcgtcctgcgcgccgatcccgcgcacatcgaaaccgttgccgagaaatacgccgaaatggcgcaaaacatgacccacgaatggggcatcctgtccgccgtcaacggcaacgaaagcgatacgcgcaaccgcctgctggcgcagtttgccgacaagttttcagacgacgcgctggtgatggacaaatatttcgccctcgtcggctcaagccgccgcagcgacaccctgcaacaggttcaaaccgccttgcagcatccgaagttcagcctcgaaaatcccaacaaagcccgctcgctcatcggcagcttcagccgcaacgtcccgcatttccacgcagaagacggcagcggctaccgcttcatcgccgacaaagtcatcgaaatcgaccgctttaacccgcaggtcgccgcccgcctggtgcaggcgttcaacctctgcaacaagctcgagccgcaccgcaaaaacttggtgaaacaagcattgcagcgcattcgggcgcaggaaggattgtcgaaagacgtgggcgaaatcgtcggcaaaattttggattga

SEQ ID NO: 29781 - DNA, 1011 bp, Neisseria meningitidis
atgcacatcggcggctattttatcgacaaccccatcgcacttgcgccgatggcgggcattaccgacaaaccgttccgccgactttgccgagattttggcgcaggttgggcggtgtgcgaaatgctgaccagcgacccgacgctcagaaatactagaaaaaccttgcaccgcagcgattttgccgatgaaggcggcattgttgccgtgcagattgccggaagcgatccgcagcagatggcggatgccgcgcgttacaacgtcagccttggggcgcagcttatcgacatcaacatgggctgtcccgctaaaaaagtctgcaatgtccaagccggtagcgcgctgatgcagaacgagccgctggttgccgccattttggaggcggtggtcaaagcggcgggcgtacccgttaccctcaaaacccgtttgggttggcacgacgaccatcaaaacctgcccgtcatcgccaaaatcgccgaagattgcggcattgccgcccttgccgtccacggacgcacgcgcacgcaaatgtacaaaggcgaagcggcttacgacctgattgccgaaaccaaatgccgtctgaacatcccggtctgggtcaacggcgacattacctcgccgcaaaaagcccaagccgtcctcaaacaaaccgccgcagacggcattatgatagggcgcggcgcgcaaggcagaccgtggttcttccgcgatttgaaacattacgccgaacacggtgttttaccgcctgccttgagtttggcagaatgtaccgccactattttgaaccacatccgagccatgcacgcgttttacggcgacaccgccggtgtgcgcatcgcacgcaaacacataggctggtacatcgacgaaatgcccgacggcgaacagacacgtcgtgaaatcaaccgcttggacagtgcggcggcgcaatacgacatgtttgcaggttatcttgaaagacttgccgaaaaaaccgacagttgggcgtgcgcctaccgcccaaatgccttctga

SEQ ID NO: 29782 - DNA, 1374 bp, Neisseria meningitidis
atgagtaatccattttcctctttaggtttgggtacggaactcgtttccgcactgaccgcgcaaggttacgaaaacccgacacccatccaagccgccgccattcccaaagcactcgccggtcatgatttgctagccgccgcgcaaaccggcacaggcaaaaccgccgcctttatgctgcccagtctggaacgcctcaaacgttacgccaccgccagcacctcgcccgcgatgcaccccgtgcgtatgctcgtcctcacccccacgcgcgaacttgccgaccaaatcgaccaaaacgtgcagggctacatcaaaaacctgccgctgcgccacaccgtcttgttcggcggtatgaatatggacaaacagaccgccgacctgcgtgccggctgcgaaatcgtcgtcgccaccgtcggacggctgctcgaccacgtgaaacagaaaaacatccatttgaacaaagtcgaaatcgtcgttttggacgaagccgaccgtatgctggatatgggttttatcgacgacatccgcaaaatcatgcagatgctgccccgccaacgccaaaccctgctcttttccgccaccttctccgccccgatacgcaaactggcgcaagacttcatgaacgcgcccgaaaccgtcgaagtcgccgcgcaagacaccaccaacgccaacgtcgagcagcacatcatcgccgtcgataccattcagaagcgcaacctgctcgaacggctgattgtcgatttgcatatgaaccaggtcatcgtgttctgcaaaaccaaacaaagcgtcgaccgcgtaacgcgcgaactggtgcgccgcaacctgtccgcacaggcgatacacggcgaccgttcccaacaaagccggctcgaaacactcaacgccttcaaagacggcaacctgcgcgtcctcgtcgccaccgatatcgccgcgcgggggctggatattgccgaactgcccttcgtcatcaattacgaaatgcccgcccagcccgaagactacgtccaccgcatcgggcgcacggggcgcgcgggcgcggacggcgtggcgatttccctgatggacgaatccgaacagaaaatgtttgaatccattaaagagctgaccggcaacaagctgctcatcgagcgcatcgagggcttcgagccgcaatggtgggaacagggcggcgcaaaaccggaaaaacccgaaatgcgcgaaccaagacaacgcaaccgctacgaatccgccaaagcgcaacgcgaaaaaaacacccggccggaaaatgcggcaaacgatgcgggcgcggcttgcggaaaaattgccggacgcagccgccgaagccgccgggaacaccggacgtgcgccctgctccaaccgcgttacggcgtaaaatag

SEQ ID NO: 29783 - DNA, 1512 bp, Neisseria meningitidis
atgagcgaacaaaaccatccgcaaaccgagccgcagttggacgaaaaccaaatcatcgccctgcgccgcgaaaaactgcacaacatccgccaacagcgcaacgcctatcccaacgacttcaaacgcgacagcttcgccgccgatttgcacgcccaatacggcgaaatcggcaaagaagaactcgatccgcaaggcattcccgtcaaagtggccggccgcatgatgctgaagcgtcaaatgggcaaggcgagctttgccaccattcaagacgtgtccgggcaaatccagctttatctgaacaacaaaggcgtgagtcaagaagttttggacgacttcaaccattgggatttgggcgacatcgtcggcgcggaaggcactttgttcaaaaccaaccacggcgaactgaccgtacgcgtgtccggcatccgcctgctgtccaaatccctgcgccctctgccggacaaacataaaggcttgagcgatcaggaaaccaaataccgtcaacgctacgtcgatttgattgccaacgaagaatcgcgcaataccttcatcaaacgcagccaaatcatccaatccgtgcgtaattttatggtgggcgagcattatctcgaagtcgaaaccccgatgatgcacccgattcccggcggcgcgacggcaaaacccttcgttacccatcacaatgccttagatattccgctttatttgcgaatcgcccccgagctgtatctgaaacgcctggttgtcggtggtttggaacgcgtgtttgaaatcaaccgcagcttccgcaacgaaggcatgtccgtgcgccacaaccccgaattcaccatgatcgaattctacgaagccttctccgactacgaacgcatgatgcagatggcggaagacatcatccgcaacgcatcgcacacggtaaacggcacggcaaacatcacttacaacggcaaagaagtcgatttggaaagcccgtttgaacgcctgaccattctcgaagccatcaaaaaatacaatccgcactacaccgacgagcagttgaacgatgcggaatggctgaaaaaagaaatcgtcaaacacggcgaaagcctgccgccgtccccgggcatcggcagcctgcaactcgcgctgtttgaaggttgcgccgagggcaagctgtggaatccgaccttcatcgtcgattacccggtcgaagtttccccgttggcgcgcgcttcggataccaaacaaggtctgaccgaacgtttcgaattgttcgttgtcgggcgcgaactggcaaacggctattccgagttgaacgaccccgaagaccaagccgaacgcttcaaagcgcaagtggcgcaaaaagacgcgggcgacgacgaagcgatgcactacgatgccgactacatccgcgcgatggagttcggtctgccgccgaccggcggttgcggtatcggcatcgaccgcttggtaatgttgctgaccgattcgcaaaccatccgtgacgtgattctgttcccgcagatgcgccccgagtaa

SEQ ID NO: 29784 - DNA, 1254 bp, Neisseria meningitidis
atgtccgaacaacatatttcgacttggaaaagtaaaatcaacgcattgggaccggggattatgatggcttcggcggcggtcggcggttcgcacctgattgcctcgacgcaggcgggcgcgctttacggctggcagatcgcgctcatcatcatcctgaccaacctcttcaaatacccgtttttccgcttcagcgcgcattacacgctggacacgggcaagagcctgattgaaggttatgccgagaaaagccgcgtttatttgtgggtattcctgattttgtgcatcctctccgccacgattaacgcgggcgcggtcgccattgtaaccgccgccatcgtcaaaatggcgattccctcgctgatgtttgatgccggcacggttgccgccttgattatggcatcctgcctgattattttggtgagcggacgttaccgcgctttggatcgcgtttccaaaatcatcatcgttactttgagtatcgccacgcttgccgccgccggcatcgctatgtcgcgcggtatgcagatgcagtccgattttatcgagccgacaccgtggacgcttgccggtttgggcttcctgatcgcgctgatgggctggatgcccgcgccgattgaaatttccgccatcaattctttgtgggtaaccgaaaaacaacgcatcaatccttccgaataccgcgacgggatttttgatttcaacgtcggttatatcgccagtgcggttttggctttggttttccttgcactgggcgcgtttgtgcaatacggcaacggcgaagcagtgcagatggcgggcggcaaatatatcgggcaattgatcaatatgtacgccgttaccatcggcggctggtcgcgcccgctggtggcgtttatcgcgtttgcctgtatgtacggcacgacgattaccgttgtggacggctatgcccgtgccattgccgaacccgtgcgcctgctgcgcggaaaagacaaaacgggcaacgccgaattctttgcctggaatatttgggtggcgggcagcggtttggcggtgattttctggtttgacggcgtaatggcgaatctgctcaaatttgcgatgattgccgcttttgtgtccgcccctgtgtttgcctggctgaattaccgtttggtcaaaggtgatgaaaaacacaaactcacatcaggtatgaatgcccttgcattggcaggcttgatttatctgaccggttttaccgttttgttcttattgaatttggcgggaatgttcaaatga

SEQ ID NO: 29785 - DNA, 822 bp, Neisseria meningitidis
ttgttaatccactatactttatgccgctaccgcaactggctggcgaaagacgacaccctgtccgaactgttggaactgatcaaccgccaactgaccgaaaaaggtttaaaaatagagaaagcatccgccgccgtcgttgatgccaccattatccagaccgccggcagcaaacagcgtcaggctatagaagtcgataacaaaggacaagtcagcggccaaaccacaccgagtaaggacagcgatgcccgttggatcaagaaaaacggcctctacaaactcggttacaaacaacatacccgtaccgatgcggaaggctatatcgagaaactgcacatcacccccgccaatgcccatgagtgcaaacacctgtcgccgttgttggaagggatagctgaaggtacgaccgtctatgccgacaaaggctacgacagtgcggaaaaccggcaacatctggaagaacatcagttgcaggacggcattatgcgcaaagcctgccgcaaccgtccgctgtcggaaacgcaaaccaaacgcaaccagtatttatcgaagacccgttatagtggattaaatttaaatcaggacaaggcgacgaagccgcagacagtacaaatagtacggcaaggcgaggcaacgccgtactggtttaaatttaatccactatatgtggtcgaacagagcttcggtacgctgcaccgtaaattccgctacgctcgggcagcctatttcgggctgattaaagtgagtgcgcaaagccatctgaaggcgatgtgtttgaacctgttgaaagcggccaacaggctaagtgcgcctgttgccgcctaa

SEQ ID NO: 29786 - DNA, 780 bp, Neisseria meningitidis
atgagcgcaaccattcccccaaaaatcatccgatacgacagcaatccgaccgatgtctattttttcggcacttgcgtccttgatctttttatgcccgaagcaggcatggatgccattgccctaatcgagcagcagggcatacgcgtccatttcccgatggcgcaaagctgctgcggccagcctgcctattcatccggccatccgaccgaagccttcgatgtcgccaaagcgcaacttgaccttttccccgaaaactggccgattgtcgtaccgtccggttcgtgcggcggtatgatgaaacaccattggccgacgctgtttaaaggcagcgagtacgaggaaagggctgtggattgcgccggccgcatcatcgagtttacccatttcctgcttgccatcggtttcaaacccgaagacaagggcgaaccgctcaaagtcgccgttcacacttcctgcgccgcccgccgcgaaatgaatgtccatctttcaggctggcaactgattgacggtatggaaaacgtcgaacgcatcgtccacgaccacgaaagcgaatgttgcggcttcggcggcacattctccgtcaaacaagccgatatttccggcgcaatggtaacagacaaagtcgccgcgctgaaagaaaccggcgcaaccgaaatcatcagcgcggactgcggctgtatgatgaacatcggcggcaaaatcgccaaggacgagccggatatgccgcgtccgaaacatatcgcatccttcttgttggaacgcaccggaggcaaagcatga

SEQ ID NO: 29787 - DNA, 717 bp, Neisseria meningitidis
atgaagaccaaattaccgctttttatcatttggctgtccgtatccgccgcctgttcttcccctgtttcccgcaatattcaggatatgcggctcgaaccgcaggcagaggcaggtagttcggacgctattccctatcccgttcccactctgcaagaccgtttggattatctggaaggcacactcgtccgcctgtcgaacgaagtggaaaccttaaacggcaaagtcaaagcactggagcatgcgaaaacacacccttccagcagggcatacgtccaaaaactcgacgaccgcaagttgaaagagcattacctcaataccgaaggcggcagcgcatccgcacataccgtcgaaaccgcacaaaacctctacaatcaggcactcaaacactataaaagcggcaggttttctgccgctgcctccctgttgaaaggcgcggacggaggcgacggcggcagcatcgcgcaacgcagtatgtacctgttgctgcaaagcagggcgcgtatgggcaactgcgaatccgtcatcgaaatcggagggcgttacgccaaccgtttcaaagacagcccaaccgcgcctgaagccatgttcaaaatcggcgaatgccaatacaggcttcagcaaaaagacattgcaagggcgacttggcgcagcctgatacagacctatcccggcagcccggcggcaaaacgcgccgccgcagccgtgcgcaaacgatag

SEQ ID NO: 29788 - DNA, 1977 bp, Neisseria meningitidis
atgccacgcattgccgccctgcccgaccatctcgtcaaccaaatcgccgccggcgaagtagtcgaacgccctgccaacgccttgaaagaaatcgttgaaaacagtatcgatgcaggcgcaacggcgattgatgtcgagctggacggcggcggcatccgcctgattcgcgtcagcgacaacggcagcggcatccatccggacgacatcgaactcgcgctccaccgccacgccaccagcaaaatcaaaaccctgaacgacttggaacacgtcgccagcatgggctttcgcggcgaaggcttggcaagcatcgcctccgtcagccgcctgaccctgaccagccgtcaagaagacagttcgcacgcaacccaagtcaaagccgaagacggcaaactcagcagccccaccgccgccgcccaccccgtcggcaccaccatcgaagctgccgaactcttcttcaacacccccgcgcggcgcaagttcctcaaatccgaaaatacagaatacgcccactgcgccaccatgatcgaacgcctcgcgctggcgcatccgcacattgccttctcgctcaaacgcgacggcaaacaagtgttcaaactcccggcccaaagcctgcatgaacgtattgccgccattgtcggcgatgattttcagacggcatcattggaaatcgacagcggcagcggcgcattgcggctctatggcgcgattgccaagccgacttttgccaaaggcaaaaccgacaaacaatactgcttcgtcaaccatcgttttgtccgcgacaaagtgatgctccacgccgtcaagcaggcataccgcgacgttttgcacaacgccctcacccccgctttcgtcctcttcctcgacctgccgcccgaagccgtggatgtcaacgtccacccgaccaaaaccgaaatccgcttccgcgacagccggcaggtgcaccaactcgtgttccacacactcaacaaagcccttgccgacacacgcgccgacctgaccgaaagcgtcagcaacgcaggcgaagtgttgcacgacattaccggcgttacgcctgccccaatgccgtctgaaaacgacagcgaaaatctgtttaatcgcgcatccgactacccgacaggcaacaaacccgatacacgcaatgccttcggttcgtcaggcaaaaccgcgcctatgccctatcagtccgcatatgcgccgcaacaacgcagcctctccctgcgcgaaagccgcgcggcaatgaatacttacgccgaactctacaaaaaaaccgacgacatcgaccttgaattgagccaattcgagcaggcacgtttcggcaatatgccgtctgaaacgcctgctcccaaaacagatacgccgctttcagacggcatcccatcccaatccgaactgccgccgctcggttttgccattgcccaattattgggcatctacatcctcgcccaagccgaagacagcctgctgctcatcgacatgcacgctgccgccgaacgcgtcaactacgagaaaatgaaacgccaacgtcaggaaaacggcaggctacaaagccaacgcctgctgattcccataacctttgccgcgtcccacgaagaatgcgccgccctcgccgattatgccgaaacgctggcaggatttggcttggaattgtccgacatgggcggcaatacccttgccgtccgtgcagttcccaccatgctcggtaaagccgacgttgtttcgctcgcccgcgacgtattgggcgaactcgcccaagtcggcagcagccaaaccatcgaagagcacgaaaaccacatcctcgccaccatgtcctgccacggctcagtccgcgccggccgccagcttacgctgccggaaatgaatgcgctcctgcgcgatatggaaaacacgccgcgcagcaaccagtgcaaccacggcaggccgacttgggtcaaactgactttgaaagaattggacgcactgttcttgcgcggacaataa

SEQ ID NO: 29789 - DNA, 2130 bp, Neisseria meningitidis
atggcctatcaagttctcgcccgaaaatggcggcccaaaacctttgccgacttagtcggtcaggaacacgtcgtcaaagccctgcaaaacgccctggacgaaggcaggctgcaccacgcctacctgctgaccggcacgcgcggcgtaggcaaaaccaccatcgcccgcatccttgccaaaagcctcaactgcgaaaacgcgcaacacggcgaaccttgcggcgtgtgccaaagctgtacgcagatcgatgccggacgctatgtcgatttattggaaatcgacgccgcctccaacacaggcatcgacaacatccgcgaagtcttggaaaacgcccaatacgcgccgactgccggaaaatacaaagtctatatcatcgacgaagtgcatatgctttccaaaagcgcgttcaacgccatgctcaaaacgctggaagagccgcccgaacacgtcaaattcatccttgccacgaccgatccgcacaaagttcccgttaccgtcttgagccgctgcctgcaattcgtcttacgcaatatgaccgcgcaacaggttgctcgccacctcgcctacgtcctcgacagcgaaaaaattgcctacgacccccccgccctgcaacttttgggacgcgccgccgccggatcgatgcgcgatgctttaagcctgctcgaccaagccatcgccctaggttcgggcaaagttgccgaaaacgatgtccgccaaatgattggtgcggttgacaaacaatacctttacgaactgctgacaggcatcatcaaccaaaacggcgcagccctgctcgccaaagcgcaggaaatggcggcgtgtgccgtcggctttgacaacgccttgggcgaacttgccatactgctgcaacaactcgccctgatacaggcagtgccgaatgccttgtcgcacgacgaccccgattccgatattttgcaccgcctcgcccaaaccataagcggcgaacaaatccagctttactaccaaattgccgtccacggcaaacgcgacctgagcctcgcccccgacgaatacgccggctttatgatgaccctgctgcgtatgctggcgtttgcgcccttggcggcagcttcgtgtgatgcaaacgccgtgattgaaaataccgaacttcaatccccatcggcacaaaccgccgaaaaggaaaccgccgtaaaaaagccccaaccgcgccctgaagcggaaaccgcccaaacatccgttcagacggcatccgcagcggcaatgccgtctgaaagcaaaactgccggacccgtttccaatcaagaaaacaacgatgttccgccttgggaagacgcgccagacgaagcccaagccgcagccggcacggcgcaaacgtcggcaaaaagcattcagacggcatccgaagccgaaacgccgcccgaaaaccaagtttccaagaacaaggcagccgacaacgtaaccgatgcccccttgtccgaagtgccgtctgaaaaccccattcaggcaacaccgaatgatgaagccgttgaaacggaagcatttgcgcacgaagcccctgcaaaacctttctacggttacggctttccggataatgactgccccccggaagacggcgcagaaatcccgccgccggattgggaacacgccgcccctgccgataccgtaggcggaggcgcggacgaagaagcagaagcgggcggcatcggcggaaacaacacaccgtccgccccgccgcccgaattttccaccgaaaactgggcagccatcgtccggcatttcgcccgcaaactcggcgcggcgcaaatgccggcacaacactccgcgtggacggaataccatcccgacaccggcctgatggttttggcaatgaccgccgaagcacgcgccaccgccgacaaaaaacgcctcgacaaaatccgcgacacccttgcccaagcctacgggctgcaactcaccctgcaaacccaagactggcgcgacgaatccggcagagaaacccccgcaatgcaggacaagcgcgtccaagccgaagacaggcaaaaagcacaagcattgctcgaagccgaccccgccgcacaaaaaatcctccaagcattcggcgcgcaatggcagcccgaatcactggaattggcggcaaaccggccataa

SEQ ID NO: 29790 - DNA, 336 bp, Neisseria meningitidis
atgttcggaaaagccggattaggcggcctgatgaaacaggcgcagcaaatgcaggaaaatatgaaaaaagcgcaagccaaacttgccgaaaccgaaatcgaaggcgaagcaggcaacggcttggtcaaaatcacaatgacctgcgcgcacgaagtacgcaaaatcgacatcagccccgatttgattcaagaagccgccgacgacaaagaaatgctcgaagacctcatcctcgccgccctcaaatccgcccgtgacaaagccgaagaaaccgcaaacaaaacaatgggcgcattcacgcaaggtctaccccccggagtgggcgacttcttccgctga

SEQ ID NO: 29791 - DNA, 1047 bp, Neisseria meningitidis
atgtcagacgacaaaagcaaagcccttgccgccgcactggcgcaaatcgaaaaaagtttcggcaaaggcgccatcatgaaaatggacggcagccagcaggaagaaaacctcgaagtcatttccaccggatcgctcggattagacctcgccctcggagtcggcggtctgccgcgcgggcgcatcgtcgaaatcttcggccccgaatcctccggcaaaaccaccctctgcctcgaagccgtcgcccaatgccagaaaaacggcggcgtgtgcgcctttgtcgatgccgaacacgccttcgatcccgtttacgcccgcaaactcggcgtaaaagtcgaagagctttacctgtcccagcccgataccggcgaacaggctttggaaatctgcgacacactcgtccgttcgggcggcatagatatggtagtcgtcgattccgtagccgcactcgtccccaaagccgaaatcgaaggcgatatgggggacagccatgtcggactgcaggcgcgcctgatgagtcaggctttgcgcaaactgaccggacacatcaaaaaaaccaacacgctggttgtgttcatcaaccaaatccggatgaagatcggcgtaatgttcggcagccccgaaaccaccaccggcggcaacgcgctgaaattctattcttccgtccgcctcgacatccgccgcaccggatccatcaaaaaaggcgaagaagtattgggcaacgaaacccgcgtcaaagtcatcaaaaacaaagtcgcccccccgttccgtcaggcagagtttgacatcctctacggagaaggcatcagttgggaaggcgaattgatcgacatcggcgtgaaaaacgacatcatcaacaaatccggcgcgtggtacagctacaacggtgcgaaaatcgggcagggcaaggacaacgtccgtgtctggttgaaggagaatcctgaggttgccgatgagatcgatgcgaaaatccgcgccctcaacggcgtagaaatgcacatcaccgaagggacacaggacgaaaccgacggcgaacgccccgaagaataa

SEQ ID NO: 29792 - DNA, 798 bp, Neisseria meningitidis
atggcggctgttttttctgtatgtgcctgttttatgtgttcctgccttgttgtcaaaaataccgttatcggaagcggacgcaccaaaatcgccgtgccgcttgtcgcccgcgatgccgccgtactttccgccgtacttgaccaaatcaaaaacctgcccttcgatatcgtcgagttccgcgccgattttttggaatgcgcgggcagcatcggcgaagtattgcgccacacgcagaccgtccgcgacgcgctacccgacaagccgctgctgtttacgttcagacggcatggcgaaggcggctcgttcccgtgttcggacgattattattttgaactgctcgacgcgctgatcgaaagccgcctgcccgacatcatcgacatcgagctgttttccggcgaaaccgccgtccggtgcgccgtggcaaatgctcaaaaaaacggcatcgccgccctgctctgcaatcatgagtttcaccgcacgccgccgcaagaagaaatcgtatgccgtctgaaacagatggaggactgcggcgcggacatctgcaaaattgcggtgatgccgcaaagcgcggaagatgtgctgactttgctttccgccacgctcaaagcgaaagagcttgccgccaaaccgattgttacgatgtcgatggggcagacgggggcggtcagccggcttgccggacaggtgttcggctcaagcatcacgttcggttcgggaacgcaaaactccgcgccggggcaaatcggcgtatccgccctccgtgcgacactcgactgcctcgaaaacggagcagactga

SEQ ID NO: 29793 - DNA, 2016 bp, Neisseria meningitidis
atgatgaaactcaatccccaacagctcgaagccgtccgctacctcggcggcccactgctcgtccttgccggtgcaggcagcggcaaaaccggcgtgattactcaaaaaattaagcatttgattgtcaatgtcggctacctgccgcataccgttgccgcaattacctttaccaacaaagccgctgcggaaatgcaggagcgcgttgccaaaatgctgcccaaaccgcaaacgcgcgggctgacgatttgcacgttccactctttgggcatgaagattctgcgcgaagaggcgaaccatatcggttacaaaaaaaacttctccattctcgattctaccgacagcgcgaaaatcatcggcgaactcttaggcggtacgggcaaagaagccgtattcaaggcgcagcaccagatttccttgtggaaaaacgatttaaaaacgcctgaagatgtcgttcagacggcatcgaacatttgggaacaacaaaccgcacgcgtgtatgcgagctatcaggaaaccttacaaagctatcaggcagtggacttcgacgacttgatccgcctgcctgccgtgctgttgcagcaaaacagcgaagtgcgcaacaaatggcagcggcggctgcgttatctgctggttgacgaatgccaagatacgaatacctgccaatttacgttgatgaaacttctgaccggcgcggaaggtatgtttaccgccgtcggcgacgacgaccagtccatctacgcatggcgcggcgcgaacatggaaaacctgcgcaaaatgcaggaaaactatccgcagatgaaggtcatcaaactggagcaaaactaccgctccaccgcgcggattctcaaaatcgccaacaaagtcatcgagaacaaccccaagctgttcaccaaaaaactttggtcgaaattgggcgaaggcgagcccgtcaaagtcgttgcctgccaaaacgagcagcacgaagccgactgggtcgtcagccaaatcgtcaaacaaaaactcatcggcggcgacaaaacccaatatgccgatttcgccgtgttataccgcggaaagcatcaggcgaggattttcgaggaagcattgcgcggcgcgcgcatcccctaccgtctctccggcggacaaagctttttcgacaaagccgaaatcaaagacgtgttgtcttatgtgcggctgcttgccaaccccaacgacgatcccgcctttctgcgtgccgttaccacgcccaaacgcggcatcggcgatgtaacgctgggcaagctcaacacttacgcgcacgaacacgaatgcagcctgtatgaagccgcgcaaaacgaagaagccctcgccacgctgaacaataccaaccgccaacacctgcaagcctttatggatatgttcggcagttaccgtgccaaagccgaaaccggcgaagcgggcgagttcatcaacagcctgctcgaagaaatcgactatgaaaaccacctgcttgccagtgaagaaggcaaagctggcgaaatcaaatggcgcaacgtcggcgatttggtatcatggtttgcgcgaaaaggcggggaagacggcaaaaacatcatcgaactcgcccaaaccgtcgccttgatgacgcttttggaaggaaaagacgaagaagaaaccgatgccgtctcgctatccacgctacacgccgccaaaggtttggagtatccgtatgttttccttgtcggttgcgaagaaggcgttttgccgcacaacgacagcatcgaagaaggcaacgtcgaagaagaacgccgcctgatgtacgtcggcatcacccgcgccaaacgccaactcacactgacccactgcgtcaaacgcaaaaaacaaggcacatggcagttccccgaacccagccgattcatagacgaaatgccgcaggaagatttgaaaatcctgggtcgcaaaggcggcgagccgattgtcagcaaagaagaaggcagacgcaaccttgccgatataatcggaaggctcgacaacctaaaaaaaagcggcgcggcggattaa

SEQ ID NO: 29794 - DNA, 1176 bp, Neisseria meningitidis
atgcaaaatatttttgaccctttggttattcgtggaaaatcccttacccccatcgtgcaaggcggtatgggggtcggtgtttccgcatcgggtttatccagcgcggtggcacgtgaaaacggtatcggaacgattgccagtgtggatttgcgccaccttcacgaagacctactcgccgaatcccaaatcaatccgagtgaagagaaatatacgtctttgaactgtaccgcattggacagggaaatccaaaaagccaaaagtgcttcagagggaaaaggactgattgcggtcaacgtgatgaaggcggtcaaagaccacgccgcgtatgtccgccaggcttgcgaatcaggggcggatgcggttgtaatgggtgccggcctgcctttagacctgccggaaatgaccgagggctatcataaagatgtcgcgctgctgccgattctgtccgaatcgcgcggtattaatatcgtcttgaaacgttggatgaaaaaaggcatattgcccgatgcgattgtagtcgaacatcctgcccacgcggccgggcatttgggcgcgtcaaccgtcgaaggcgtaaacgatgctaaattcgacttcaaacgcgtgattgaggaaacgtttgaagttttcaaaagtttagggctggaaagcgaaaaaatcccgcttattcttgcgggaggcatggcaaattttgaaaaagtcaaaaccgccctaaagaactggggagcatccgccgttcaaatcggtacggcttttgccgttaccgaagaaggagatgcacaccttaacttcaaaaaaacgctcgccggtgcggaaactgaaaaagtagtcgaatttatgtctgttgccggtttgccggcgcgcggtgtccgcagcaaattcctagacagctacatcaagcgtgaaagcaaacttcaggcaaacgccaaagccgacccgcgccgctgcacccaaggattaaactgcctaaccagttgcggtctgcgcgacgggctttccaaagccggacaattctgcattgatatccagcttgccgccgcattccgtggagaagtagataaaggcctgttcttcagaggtaaagacccgctgcccttcggcaatgccatccgcaccgtccgcgagacgatacaatatctgctgacggggagcgaacctgttgcaacagtaggacgctga

SEQ ID NO: 29795 - DNA, 1980 bp, Neisseria meningitidis
atgtctcaactggcaaacgcaatccgcttcctctcggccgatgccgttcaaaaagccaattccggccaccccggcgcgcctatgggtatggcggaaatggcggaaacattgtggacgaaattcctcaatcacaatcccgccaaccccaaattctacaaccgcgaccgcttcgtcctctccaacggccacgcgtctatgctgttgtacagcctgctgcacctgaccggctacaatctgagcattgaagacttgaaaaacttccgccaactgcacagcaaaacccccggccatcccgaatacggctataccgacggcgtggaaaccacgaccggcccgttggggcaagggattgccaacgcggtgggcatggcattagccgaaaaaatccttgccgccgaatttaataaagatggtttgaacatcgtcgatcattacacctacgtctttatgggcgacggctgcctgatggaaggcgtatcgcacgaagcctgctcactcgccggcactttgggcttgggcaaactgattgttttatatgatgacaacaatatttccattgatggtaaagtggacggctggtttaccgaaaacatcccgcaacgctttgaaagctacggctggcacgtcgttcctaacgtaaacggtcatgacaccgccgccattcaagccgccatcgaagccgcacgtgccgaaaccggcaaaccgtccatcatctgctgtaaaaccttaatcggcaaaggcagtgccaataaagaaggcagccacaaaacccacggcgcacctttgggcgcggacgaaatcgaagccacgcgcaaacatttgggctggacttaccctgcctttgaaatcccgcaagaaatttacgatgcgtggaatgccaaagaacaaggcgcgaaactggaagccgaatggaacgaactcttcgcgcaatatcaaaccaaatatcctgccgaagccgcagaatttgtgcgccgtatggataaaaagctgccggacaatttcgatgaatacgttcaagccgcattgaaagaagtgtgcgccaaagccgaaaccatcgccacccgcaaagccagccaaaacagcatcgaaatcttggcaaaagagctgcccgaactggtgggcggctctgccgacctgaccccgtccaacctgaccgactggtcaaacagcgtttccgttacccgcgacaaaggcggcaactacatccactacggcgtgcgcgagttcggtatgggcgcgattatgaacggtttggtattgcacggcggcgtaaaacccttcggcgcgactttcctgatgttcagcgaatacgagcgcaacgccctgcgtatggctgcgttgatgaaaatcaaccctgtatttgtgttcacccacgattccatcggtttgggcgaagacggcccgacccaccagccgattgagcaaaccgccaccctgcgcctgattccgaatatggacgtatggcggccgtgcgacaccgccgaatccttggtcgcttgggcagaagccgtcaaagccgccgatcacccgtcctgcctgattttcagccgtcaaaacctgaaattccaagcgcgcagcgagcaacaactgaacgacatcaaacgcggcggctacgtcatcagcgaagcacaaggcaacgcccaagccgtcatcattgccaccggttccgaagtcgagctggctttggaagcgcaaaaagccctcgccgcgcaaaacatcgccgtgcacgtcgtttccatgccgtccaccaacgtattcgaccgccaagacaccgcctatcaagccgccgtcctgcccgaaagcctgccgcgcatcgccgtagaagccggacacgccgacggctggtacaaatacgtcggactgaacggcgcagtcgtcggcatcaaccgcttcggcgaatccgcccctgccgatttactcttcaaagcattcggctttaccgtggacaatgtggtcgatacagtgaaatcagtgctgtaa

SEQ ID NO: 29796 - DNA, 525 bp, Neisseria meningitidis
atgtcattgaacaaagttatccttatcggccgcctcggacgcgatcccgaagtgcgctatatgcccaacggcgaggcggtgtgtaatttcagcgtcgccaccagcgaaacttggaacgaccgcaacggccaacgtgtagagcgtactgagtggcacaacatcacgatgtaccgcaaactggcggaaattgccgggcaatacctcaaaaaaggcgggctggtttatctggaaggcagaatccaaagccgcaaataccaaggcaaagacggcatcgaacgcaccgcttacgatattgtcgccaacgaaatgaaaatgttgggcgggcgcaatgaaaacagcggcggtgcgccttacgaggaaggttacggtcagagtcaggaggcttaccaacgccccgcacagcaaagccggcagcccgcctccgacgcgccgtcccatccccaagaagcaccagccgcgccgcgccgccaacccgtgcctgccgccgccccggtcgaggatattgacgacgacatcccgttctga

SEQ ID NO: 29797 - DNA, 1011 bp, Neisseria meningitidis
atgagcaaaaaacgagttctgaccggcgtaaccaccaccggcatcccgcatctgggcaactacgtcggtgctatccgccccgccgtccgcgcggcgcaaaaccctgataccgaatccttcctcttcctcgccgattaccacggtatcatcaaatgccacgagccggagatgattcaccaatccacccaagccgttgccgccacttggcttgcctgcggactcgaccccgagcgcaccaccttctaccgtcaaagcgacattcccgaagtgatggaattgaactggattctgacctgcatcaccgccaagggtttgatgaaccgcgcccacgcctacaaagccgccgtgcaggcaaatgcggaaaacgggcaggaagaccccgatttcggcgtggaaatgggtttgtacagctaccctatcctcatgactgccgacattctcatgttcaatgcccatgaagttccagtcggtcgcgaccaaatccaacacgttgaaatggcacgcgatattgccggccgcttcaaccaccgcttccgggaactcttcacactgcccgaagtgaaaatcgacgaaaacgtcgaactcttggttggtttggacggacgcaaaatgtccaaatcctacggcaacaccattccgctttgggaaaacgacaaaaaaacccaaaaatcggtcaacaaaatcatcaccaatatgaaagagccgggcgagccgaagaagcccgacgaaagccctctgtttgaaatctacaaagctttctccacgccgtctgaaacggcagaatttacgaaaatgcttgccgacggcttggcttggggcgaggcaaaaaaacttttggcggcgaaaatcaacgccgaactcgccgaaccgcgcgaacgctacaacgagctgaccgccgacccttcgcaaatcgaagagattttgcaggcaggcgcgcaaaaagcgcgtaaagaagcacgcgaattattgggcaaagtacgtgatgcggtcggtatccgcccgttgaaataa

SEQ ID NO: 29798 - DNA, 2580 bp, Neisseria meningitidis
atgcgatacgacaaattaaccgccaaattccaacaggcccttgcagaagctcagagtttggcgttggctgcggacagcagctatctggaagcgggctttgtgctgaaagccctgcttgacgaccaaaacagcggtgctgccgcgctcttggctcatgcgggcgtgaacgtgccgcaggtgaaacagcgtttgcagcagcatttgaacagcctgccgaaagtgtccggccagggcggcgacattctgcccagccgcgaattgcaggcggtgttgaacctgatggacaaagccgcaaccaaacgcggcgatgcctatatcgccagtgaacttttcctgcttgccttggtgcagcagaacgatgcggccggcaaaattttgaaagaagccggcgcgaccgaacaaaacatcaatgccgcgattgacgcggtacgaggaggacaaaacgtgaacgatgccaatgccgaagaccaacgcgatgctttgaaaaaatatacgctcgatctgacccaacgcgcccgagacggtaagctcgaccccgttatcggccgtgacgacgaaatccgccgtgcgattcaggtattgcaacgccgtaccaaaaacaaccctgtgctgattggcgaaccgggcgtgggtaaaaccgccatcgtcgaaggtttggcacaacgcatcgtcaacggcgaagtacccgaatccctgcgcaacaaacgcctactggttttggacttggcggcattgattgccggcgcgaaatatcgcggcgaatttgaagaacgcttgaaaggcgtgttgaacgacttggcgaaagacgacggcaacactctgattttcatcgacgaaatccatactttggtcggcgcaggcaaaaccgacggtgcgatggatgcgggcaatatgctgaaaccggctttggcacgtggcgaattgcactgtatcggcgcgaccaccttggacgaataccgccaatacatcgaaaaagacgcggcactcgaacgccgcttccaaaaagtattggttggcgagccaagtgtagaagacaccatcgctatcttgcgcggtttacaggagcgttatgaaatccaccacggtatcgacattaccgaccccgccatcgttgctgccgcagaattgagcgaccgctacatcaccgaccgcttcctgcccgacaaagcgattgatttgattgacgaagccgccagccgtgtcaagatggaaaaagaaaccaagccggaagcaatggacaaaatcgaccgccgtctaattcagcttcggatggaaaaggcgcacgttgaaaaagaaaaagacgatgccagcaaaaaacgtttggaactgatagacgaggaaatcaacggtctgcaaaaagaatacgccgatttagacgaaatctggaaagccgaaaaagcaatttcagacggtgctgctaatattaagaaacaaattgacgaagtcaaaattaaaatcgaacaggcaaaacggcaaggcgatttggcactggcttcaaaattgatgtatgaagatttggagcatttggaaaaacagcgtgcagccgccgaacgggcagatacggacagcacaaaaccggcaaacaaactcttgcgtaataatgtcggcgcagaggaaatcgcagaggtggtttcccgtatgaccggcattcccgtatccaaaatgatggaaggcgaacgcgacaaactgctgaaaatggaagaagtattgcaccgccgcgtggtcggacaggacgaagccgtgcgtgccgtgtccgacgctatccgccgcagccgctccggtcttgccgatccgaacaagccttacggcagcttcctgttcttgggcccgaccggcgtgggtaaaaccgagttgtgtaaagccctggcaggctttctgttcgacagcgaagatcatctgattcgcatcgatatgtccgaatatatggaaaaacacgccgttgcccgcttaatcggcgcgcctccgggttatgtcggctacgaagaaggcggctacctgaccgaacaagtgcgccgcaaaccgtacagcgtgattctgctggacgaagtggaaaaagcccatcccgatgtgttcaacatcctgctgcaagtattggatgacggtcgtttgaccgacgggcaaggcaggacggtagattttaaaaataccgtgattgtgatgacttccaacatcggcagccagcacatccaacaaatgggcattcaggattacgaagcggtaaaagaagttgtgatggaggatgtgaaagaacatttccgtcctgaaatgatcaaccgcatcgacgaagtggtcgtgttccacggtttggatcaggcaaacatccgcagcattgcgaaaatccagctcaaaggtttggaaaaacgtttggaaaaacaaaacctgcgcctggctgtttccgatgccgcactggacatcatcgccaaagccggtttcgacccgatttacggcgcacgtccgctcaaacgcgccatccagtcggaaatcgaaaacccgctggcaaaagccctgcttgccggaaactatgcgcccgaaagcgaaatcagggtggaagccgacggcgacagactgaaatttgcctga

SEQ ID NO: 29799 - DNA, 462 bp, Neisseria meningitidis
atgaaaccgcaaaaatccctacgcgcccgcgcgatggacatcctctcgcgccaagaactcagccgcatcggtctgaaacgcaaacttgcaccgcacgccgaaagcgaagaggagttggaaaacgtgttaaacgaatttgccgaacgcaactggcagtcggatttgcgctatgccgaagcctatatccgcagcaaaagccgcaaacacggttcattgaggctgaaacaggctttggcgcaacagggcatagatgaagaaaccagccgcaacctgcttcccgaccgctcaagcgaaaaactggccgccatagccgtgttgcgtaaaaaattcaaacaccccgccgccgacctcaaagaaaaacaaaaacaggcgcgtttcctcgcctatcgcggattcgatgccgataccgttcagacggcattgaaacacgcttgggacgaaaattgggaagacggctgctga

SEQ ID NO: 29800 - DNA, 1434 bp, Neisseria meningitidis
atgaacgaatattcccaattaatcaagcatcccgatatttccctttccccgatttcagacggcatcggggtcggcaatccggcaacgggcgaaattttggcgtatgtccgcaatacgggttcggacaaactgaaaaacctgattcaaaaggcggcggcagcgcaaaaattatgggcggcgaaaactgctttggaacgcgccgacatattgtggcgttggtattttttagttaaagaaaacaaagaagcactggcgcgcctgatgacgatggagcagggcaaaagcctgaccgagtcgcgcggcgaaatcgattatgcggcttcgtttgtgcgctggtttgccgaagaagcgcggcggattgacggcgatgtgttaacgagtgtaaaagcgtcgcaaaaactgattgtgttgaaacagcctgtcggcgttaccgccgcgattacgccgtggaacttcccatctgcaatgattgcgcgcaaggctgcgcctgctttggcggtgggctgcgcgatgatcgtcaaacccgcatcgctcacgcctttgagtgcgtatgcgttggtcgtgctggcttatgaagcgggcgtaccacaggatttgttgcccgtcgtcagcggtcgcgcatcggaaatcggccgtgaatttgccacgaacccgattatccgcaaaatcagcttcaccggctctaccgaagtcggtgcgaaaatttttgccgacagcgcggcggacattaaaaaactcagtttggagctgggcggcaacgcgccgtttatcgtgtttgacgatgccgatttggacaaagccgtcgaaggtgcgctcgccagcaagttccgcaacagcggtcagacctgcgtctgcaccaaccgcgtttacgcccaatcgggcatttacgacgcattttgccgcaaattgagtgaaaaagcagccgcgctcaaattgggcaacggcttggaggatggcgtaaaccaagggccgctgattgaggaaaaagcggtagaaaaagtcgagcagcacatcgccgacgcgctctcaaaaggcgcggtctgtctgaccggcggcaaacgcagcgcgttgggcggaacgttttttgagccgaccgtcttaagcggcgtaacggcgcaaatggcggtagctcgcgaggaaaccttcgggcctttgtgtccggtattccgttttgaaaccgaagccgaggtcatcgaggctgcgaacaatacggaatacggtttggcagcttaccttttcaccgccgacaccgcccgccaatggcgcgtcggcgaagccttggaatacggcatggttggcatcaatacgggcttaatcagtaatgaagcggcaccgtttggcggcgtgaaacgcagcggtttgggacgtgaaggcagcaaatacggtgcggacgaatatctagaattgaaatatctgtgtatggatgtcgggtga

SEQ ID NO: 29801 - DNA, 195 bp, Neisseria meningitidis
gtgaagcataagctcgcgtcttggtggaaaaccatcaagctgacggcaaacttgatggcgggcgtgcccgattatgaaaactacgttgcacagcagcgcaaacataatcccaacgcccccgtgatgaccaagctgcagtttcaagactattgccgcaaacgccgctgcggcgcaaacggcggacgctgctgttaa

SEQ ID NO: 29802 - DNA, 1218 bp, Neisseria meningitidis
atggcgttaatcgtacacaaatacggcggcacatccgtaggctcgcccgaacgcattaaaaacgtggccaaacgtgtcgccaaagcccgcgccgaaggacacgacatcgtcgtcgtcgtatccgccatgagcggtgaaaccaaccgcctggtcgcgttggcgcacgaaatgcaggagcatcccgatccgcgcgaattggacgtggttttgtccaccggcgaacaagtaaccatcggccttttggcgatggcattgaaagacatcggcgtggatgccaaaagctacacaggctggcaggtcgccctcaaaaccgataccgcccacaccaaagcccgcatcgaaagcattgatgacgaaaaaatgcgtgccgaccttaccgccggcaaagtcgtcatcgttgccggcttccaaggcatcagcagtgaaggcgatatttccacgctcggacgcggcggttccgacacttccgccgttgcgcttgccgcagccctcaaagcggacgaatgccaaatctataccgacgtggacggcgtgtacaccaccgatccgcgcgtcgtacccgaagcgcgccgcatggatacggttacatttgaagaaatgatcgaattggcaagcctcggctcgaaagtcttgcaaatccgttcagtagaattcgccggaaagtacaaagtgcgcctgcgcgtactgagcagcctgcaagacggcggcaatggcaccttaattacctttgaagaggacgacaacatggaaagagctgccgtaaccggtatcgcattcgataaaaaccaagcccgcatcaacgtgcgcggcgtacccgacaaacccggtgtcgcctatcagattttgggcgcggtcgccgatgccaacatcgaagtcgatatgattatccaaaatgtcggcagcgaaggcacaaccgatttttcctttaccgtaccgcgcggcgattacaagcagactttggaaatcctgtcggaacgccaagacagtatcggcgcggcttctattgatggcgacgacaccgtgtgcaaagtctccgcagtcggtttgggtatgcgttcgcacgtcggtgtagccgccaaaatcttccgcacgctcgccgaagagggtatcaacatccaaatgatttccacctccgaaatcaaagtttccgtattgattgatgaaaaatacatggaactggcaaccagggtattgcataaagcctttaatttgggctga

SEQ ID NO: 29803 - DNA, 1260 bp, Neisseria meningitidis
atgtgttctaatacgccccaagccgccaccaaaaatcgggagacacgccatatgaccggcatcatacattcgttgcttgacaccgacctctacaaattcactatgctgcaagtagtcctgcaccagtttccgcagacgcacagcctttacgaattccgatgccgcaacgcctcgaccgtctatccgcttgccgacatcaaagaagacttggaagtcgaactcgacgcgctctgccaactacgcttcacccacgacgaactcgactatctgcgcagcctgcgtttcatcaaaagcgactttgtcgattatctcgaactcttccagctccaacgccgctttgtcgaagtcggcacagacgataaaggccgtctgaacatccgcatcgaaggtccgatgatacaggcgatgttttttgaaatcttcatcctcgccattgtcaacgaactttacttccgccggctggaaacccctgccgttatcgaagaaggtgaacgccggcttcaagccaaagccgcgcgcctgaaagaaatcgccgccgcacaaaaccccgacgaaccgcccttcctgatttccgacttcggcacgcgccgccgctacaagctcgcgtggcaggaacacgtcatccgcaccctgctcgaagccgccccaagcatcgtgcgcggcaccagcaatgtctttctcgccaaaaaactcggcatcacgcccatcggcaccatggcgcacgaattcctccaagccttccaagccctcgacgtgcgcctgcgtaatttccaaaaggccgcgctcgaaagttgggtacacgaataccggggcgatttgggcgttgccctgaccgacgtggtcggtatggatgccttcctgcgcgatttcgacctctatttcgccaaactctttgacgggctgcgccacgacagcggcgacccttacatttggggcgacaaagcctacgcccactatcaaaagctcaaaatcgacagccgcaccaaaatgctgaccttctccgacgggctggacatcgaacgctcttgggcattacaccaatatttcaaagaccgcttcaaaaccggcttcggcatcggcaccaacctcaccaacgatatggggcatacacccttaaatattgtgttgaaactggtcgaatgcaacgggcagtccgtcgccaagctgtccgactctccgggcaaaaccatgaccaacaacagcaccttcctcgcctacctgcgccaagtgttcgacgtacccgaacccgaaacgccgtaa

SEQ ID NO: 29804 - DNA, 1719 bp, Neisseria meningitidis
atgaacctacatcaaaccgtcgaacgcgaagccgccgccgcctttgccgccgcaggcatcgccgacagtcccgttgttttgcagccgaccaaaaatgccgaacacggcgatttccaaatcaacggcgtgatgggtgcggcgaaaaaagccaaacaaaacccgcgcgagttggcgcaaaaggtcgccgaagcattggcggacaacgccgtgattgaaagcgcggaagtcgccggtccgggcttcatcaacctgcgcctgcgccccgaatttctcgcgcaaaacattcagacggccttgaacgacgcgcgtttcggcatagcgaaaaccgacaaaccgcaaaccgtcgtcatcgactattcctcgcccaatctggcgaaggaaatgcatgtcggtcacctgcgttccagcatcatcggcgacagcatttcgcgcgtgttggcatttatgggcaacaccgtcgtccgtcaaaaccacgtcggcgactggggtacgcagttcggcatgttggtcgcttatttggtcgagcagcaaaaagacaatgccgcgtttgagctggcggatttggagcagttttaccgcgccgccaaagtgcgctttgacgaagatcctgccttcgccgacaccgcgcgcgaatacgttgtgaagctgcaaggcggcgatgaaaccgttttggcattgtggaaacagtttgtcgatatttcgctctcgcacgcccaagccgtttacgacacgctgggcttgaagctgcgccccgaagacgtggcgggcgaatcgaagtacaacgacgatttgcagccagtggtcgatgatttggttcaaaaaggtctggcggtcgaagacgacggcgcgaaagtcgtattcttggacgagttcaaaaacaaagaaggcgaacccgccgcgtttatcgtgcaaaaacaaggcggcggcttcctttatgcttccaccgacttggcgtgtttgcgctaccgtgtcggcacgcttcatgccgaccgcctgctgtacgtcgtcgaccaccgccaagccctgcactttgagcaactctttaccacttcccgcaaagcaggctatctgccggaaaacgtcggcgcggcatttgtcggcttcggcacgatgatgggcaaagacggcaaaccgttcaaaacacgcagcggcgacactgtaaaactggtcgatctgctgaccgaagccgtcgaacgcgccgccgctttggtgaaagagaaaaatcccgaattgggcgcggacgaagccgccaaaatcggcaaaaccgtcggcatcggcgcggtcaaatacgccgacttgagcaaaaaccgcaccagcaattatgtgttcgactgggacgctatgctttcgtttgaaggcaacaccgccccctacctgcaatatgcctacacccgcgtgcaaagcgtgttccgcaaagccggtgaatgggacgcaaccgcaccgactgttttgagcgaaccgctggaaaaacagcttgccgccgagctgctgaaattcgaagacgtgctgcaaagcgtggcggacacggcgtatccgcactacctcgccgcctacctctatcaaattgcgaccctgttcagccgcttctacgaagcctgtccgatactcaaagccgaaagcgcaagccgcaacagccgcctgcaactggcgaagctgaccggcgacacgctgaaacaaggcttggatttgctgggcatcgatgtgttggacgtaatgtaa

SEQ ID NO: 29805 - DNA, 747 bp, Neisseria meningitidis
atggattttcgttttgacattatttacgaataccgctggatgtttctttacggcgcactgacgaccttggggctgacggtcgtggcgacggcgggcggttcggtattgggtctgttgttggcgttggcgcgcctgattcacttggaaaaagccggtgcgccgatgcgcgtgctggcgtgggcgttgcgtaaggtttcgctgctgtatgttacgctgttccggggtacgccgctgtttgtgcagattgtgatttgggcgtatgtgtggtttccgtttttcgtccatccttcagacggcattttggttagcggcgaggcggcaatcgcgctgcgtcgcggatacgggccgctgattgccggttctttggcactgatcgccaactcgggggcgtatatctgtgagattttccgcgcgggcatccagtctatagacaaaggacagatggaggcggcgcgttctttggggctgacctatccgcaggcgatgcgctatgtgattctgccgcaggcattgcgccgtatgctgccgcctttggcgagcgagttcatcacgctcttgaaagacagctcgctgctgtcggtcattgctgtggcggagttggcgtatgttcagaatacgattacgggccggtattcggtttatgaagaaccgctttacaccgtcgccctgatttatctgttgatgacgactttcttaggctggatattcctgcgtttggaaaaacgttacaatccgcaacaccgctga

SEQ ID NO: 29806 - DNA, 483 bp, Neisseria meningitidis
atgacgaacatccgtatcggacagggctacgatgtccaccaactgaccgaaggcagaaagctgatacttggcggagttgaaatcccatttgaaaaagggctgctcggacactccgatgccgatgcgctgctgcacgccgttaccgacgcgctgctcggtgcggcaggtttgggcgatatcggcagccatttccccgacaccgccgcagagttcaaagatgcggacagccgcgtccttttgcgtgcggcgtatcaaagcgttcaggcgcagggttggcaggcggtcaatgtcgatacgaccgtgattgcacagaaacccaaactcgcgccgcatattccgcaaatgcgtgccaacatcgccgccgatttgggcatagacatttcgtgcgtcaacatcaaaggcaaaaccaacgaaaaactcggttatctcgggcgcatggaaggcatagagtcgcaggcggcggtattgctggtaaggatttga

SEQ ID NO: 29807 - DNA, 690 bp, Neisseria meningitidis
atgaagcgcaaaaatatcgcgctgattcccgccgccggcatcggggcgcgtttcggtgcggacaaacccaagcaatatgtcgaaatcggaagcaaaaccgttttagaacatacgattgggatttttgaacggcatgaggccgtcgatttgaccgtcgttgtcgtctcgcccgaagacacgtttgccgataaggttcagacggcatttccacaggttcgggtgtggaaaaacggcggacagacccgcgccgaaactgtccgcaacggtgtggcaaaattgttggaaaccggtttggcggcggaaaccgacaatattctggtacacgatgccgcgcgttgctgcctgccgtctgaagctttgacgcggttgatagaacaggcgggcaacgctgccgaaggtgggattttggcaattcccgttgccgatacgctcaagtgcgcggacggtgggaacattagtgcaaccgtcgagcggacgagcctttggcaggcgcaaacgccgcagcttttccgcgccgggctgctgcaccgcgcattggctgcggaaaacttggacggcattaccgatgaagcgtccgccgtggaaaaattgggcatccgccctttgctggtgcagggcgacgcgcgcaatttgaaactgacgcagccgcaggacgcatacatcgtcaggctgctgctcgatgccgtctga

SEQ ID NO: 29808 - DNA, 1929 bp, Neisseria meningitidis
ttggctgttgattatgtttacgacaaaaccaagctcactgatgatgaaattacccgcttaaaaaaactccgcgatagaaatagtgaatattggaaagaagaaacttatcacataaaaagtaacaaccgagtttatccaaacattcccgcattattccctaaacatcctttcgatccattcgaaaacatcaataattcaaaaaggatttctttttatgacaaagaatacactgaagattaccttgttggttttgctcaaggtttaggcgttgcaaaaagaaatggggaaacagaaaaaccaatacggcaatattttaaggaatgtttaaacactgggaaatatagtgatgatacttgcaaatctcaacaatctattcctacagtaagaagtgatattttcgccctaaatacgaaaataaaaaatagccatatcaacagcgaaattttatctgtaggtaattatatcgaatggcttcgcccaacacttaatcagctttctagttcgcaagagcatctctattctgatgtagatccattccactatattgaggttacagacaactcgcacgttatcgggcaaacgattagtttggatgaattccgcttagaaaattctctctgggagccccgttgggattctgatgttggggaattaaaaacaacgaatgcagacatccgttttaatactaaaagtgaaagtttactcgtaaaagaagattatgctggcggagctcgttttcgttttgcttacggtctaaaagataaagtccctgaaacaccagttttaacttttgaaaaaaatataactggcacttccgacatcatcttcgaaaatccaatagacgatttaaaaagtctcgacgggcatcaaattatcaaagtaaatggcacagcagataaacacgcattccgtctttctggcaaacaccaaaagggaatttatacgctttctttacaacaacgcccagaaggcttttttaccaaagtgcaagaacgcgatgatatttcgatttatgcacaacaggctcaagctgccaataccttattcgccttgcgtttgaacgacaaaaacagcgatattttcgaccgcactttaccacgcaaaggcttgtggttgcgtgtgattgacggacattccaaccaatgggtgcaaggcaaaacagcacctgtagaaagcaatcgtaaaggtgtgcaactcggcggcgaagtattcacatggcaaaacgaaagtaatcaactttccgttggcttaatgagcggacaagcagaacaacgcagcactttccgcaatccagatacagacaatcttacaacgggaaatgtgaaaggctttggggcgggcatttatgccacttggcatcagcttcaggacaaacagacaggtgcgtatgcggatagctgggtacaatatcaacgcttccgccaccgcattaacactgaagatgctacagaacgttttacttcaaaaggtattaccgcctcaattgaagcgggttacaatgctttattggcggaacacttcactaaaaagggcaaccgtgttcgtttttacctgcaaccacaggcgcaattgacttatttgggggtaaacggaaaattcagcgatagcgaaaatgcccacgtgaatttacttggctcccgccaattacaaagccgagtgggcgttcaagctaaagcgcaattttcactctataaaaatatcgctattgaacctttcgccgctgtgaacgcgctttaccacaacaaacctttcggtgtggaaatggacggagagcgtcgaatgataaacaataagacggcaattgaaagccaattaggtgtagcagtgaaaatcaaatctcacttaaccttacaagccacattcaaccgccaaacaggcaaacatcatcaagctaaacaaggtgcgttgaatttgcagtggacgttttaa

SEQ ID NO: 29809 - DNA, 453 bp, Neisseria meningitidis
atgtttatggctattgcgaacaataaaaaagcatttcacgattttttcattgaagaccggattgaagccggtttggtcttggaaggctgggaagtcaaagcaatccgcgccgcgcgcgtacagcttaaagagagttatatctattggaaaaaagacgcgttttatctggtcggctgccatattacggctttgcccacagcctcgacacacattaaaccagatgccgtacgtccgcgcaagctcttgttgaaccagtcggaaatcaacaaattaatcggcaaaaccgaacgtgccggctacaccatcgtgccgctggatttgcatttttcgcgcggaaaaatcaagatggaaatcggtttggcaaaaggtaagaaacagcacgacaaacgtcagagtatgaaagaggcggattggaaacgcgagaaacagcggttgattaagcatacgcgctga

SEQ ID NO: 29810 - DNA, 870 bp, Neisseria meningitidis
ttgccgcaacccgaccctcaaggtttccgccgcagcctgttcctgcaccggcgtgcgggaatggcgaaaattggggattttgccgtcaaatccatgatagagatacggagcaaacgaatgattaccctgccttccttaaacaatctgccgtcaaaatgggatgaaatccgctattggctcgaaacccgggtttgtgagtgcggcgttatgtcgcatcccaatttgacggaatgcgaagccgggcagttcgatcgggatttttgggacaatatcggctgcgcgcctgaagaatatgtccgtatccgccgagccatccgtctgttggaagcgcgttatcccgacagtttgaatgagctggtgtgtgccgccattgccacgcctttgggcgagatgctggcggtgttcggaaataagggattgtgtctgctggagtttgtcggacagaagcatttggaacaggaaattgccgccgtccaaaaagccttgcgcggacggtttgtgtttcgggaggatgagcggacgcaacttttgcggcaggaattggacttatacttcaagggtcgtctgaaaacctttgccacgcctttggagcagattggcaccgagtttcaaaagcaggcatgggacgcgctcttggcgattccttacggcgaaacgcgcagctacaaagagcaggcgcagcgtttgggcaaccccaacgccgtccgcgccgttgccgccgccaacgggcagaacaaggtgtctatcttgattccctgccaccgcgtcatcggcagcgacggcaaactgaccggctacgcgggcgggttgaaccgcaaacagtttttactggctttggaacgcggcgaagttcagacggcattgttttaa

SEQ ID NO: 29811 - DNA, 2751 bp, Neisseria meningitidis
atgctgacaaacattgccaagaaaatcttcggcagccgcaacgaccgcttgctgaaacaataccgtaaatccgttgccagaatcaacgcgctcgaagaacagatgcaagccctaagcgatgctgatctgcaagccaaaactgccgaattcaaacaacgcctcgccgacggtcagactttggacggcattttgcccgaagccttcgccgtctgccgcgaagcgtcccgccgcaccctcggtatgcgccacttcgacgtgcagcttatcggcggtatggtgctgcacgacggcaaaatcgccgaaatgcgtaccggcgaaggcaaaaccctggtcgccaccctcgccgtctatctcaacgcgctggccggcaaaggcgtacacgtcgttaccgtcaacgactacctcgcctcacgcgatgcgggcattatggagccgctctacaatttcctcggccttaccgtgggcgtgattatttcagatatgcagccgttcgaccgtcaaaacgcctatgccgccgatatcacctacggcaccaataatgaattcggcttcgactacctgcgcgacaatatggttaccgaccaatacgacaaagtgcagcgcgaattgaattttgccgttgtcgatgaagtggattccatcttgattgacgaagcgcgcactccgctgattatctccggccaggcagacgacaacatccagttgtaccaaatcatgaacaccgtcccgccccacctcgtccgccaagagacagaagaaggcgaaggcgactactgggtagatgaaaaggcgcaccaggtcatcctgagcgaagccggccacgaacacgccgagcagattctgacccaaatgggattgctggcagaaaacgactcgctctattctgccgccaacatcgccctgatgcaccaccttatggcggcattgcgcgcgcatacgttattccacaaagaccaacattacgttatccaagacggcgaaatcgtcatcgttgacgaatttacaggccgtctgatgtccggccgccgctggtccgaaggcctgcatcaagccgtggaagccaaagaaggcgtggaaatcaaacgcgaaaaccaaaccctcgcctccatcaccttccaaaactatttccgcctgtacaccaagctctccggtatgaccggtacggcagataccgaggctttcgagttccaaagcatttataacctcgaaaccgtcattatcccgaccaaccgccccgtacagcgcaaagacttcaacgaccagattttccgttctgccgaagaaaaattcgaagccgtcgtcaaagacatcgaggaatgccacaaacgcggacaacctgttttagtcggcacaaccagcatcgaaaactccgaactggtctcccatcttttgcaaaaagccggtctaccgcacaacgtcctcaacgccaaagaacacgaacgcgaagccctgattgtcgcccaagctggcaaagtcggcgcgattaccgttgccaccaatatggcggggcgcggtacggacatcgttttaggcggcaacctgaagcaccaaaccgatgccatccgtgccgacgaagccttgagcgacgaagagaaacaggcacaaatctccgcactcgaagacggctggcaggcagaacacgacaaagtgatggaagcaggcggtttgcacatcatcggtacggaacgccacgaaagccgccgtatcgacaaccaattgcgcggacgttccggccgtcagggcgaccccggatccagccgtttctacctctcgtttgaagacccgctgctgcgcctattcgcactcgaccgcgccgccgccatcctcaaccgcctcgcccccgaacgcggcgttgccatcgagcacaacctgctgacgcgccaaatcgaaggggcgcaacgcaaagtcgaaggcagaaacttcgatatgcgcaaacaggttctagaatacgacgacgtcgccaacgagcaacgtaaagtcatttacagccaacgcaacgaaattttaaccagcaaagacatcagcgacctgatgaaggaaatccgttctgatgtcgtcagcgacctcgtggatacctatatgccgcccgacagcatggaagaacaatgggacatcccgactttggagaaccgtctggctgccgaattcagactgcacgaagacatccaatcctggctgaaggcggacaatgcgattgacggtcaagacatcaaagaacgcctgatcgaacgcatcgaaaacgaatatgccgccaaaaccgaactggtcggcaagcaggcaatggccgatttcgagcgcaacgtgatgttgcaggtcatcgacaaccaatggcgcgaacacctcgccgctatggactacctgcgacaaggcatacacctgcgcagctatgcccaaaaaaatccgaagcaggaatataaacgtgaagcctttaccatgttccaagacctgtggaacggcatcaaattccatattgcctccctgcttacctcggttcaaatcgaacaaaaccctgtcgcggtggttgaagagcaacccatcggcaacatccagtccatccattccgaatcgcccgatatggaagaacttttgggtcagtcgcaaaccgatctggttaccgaagcctttaatcccgatgggacagatttcagccccgaagccttggaagcgcgggggcaaatcgtccaccgcaacgacccctgcccctgcggcagcggtttgaaatacaaacaatgccacggcaaactggcttaa

SEQ ID NO: 29812 - DNA, 1773 bp, Neisseria meningitidis
atgattccatccgacttcattgacgagcttttagccaaaaccgatattgtcgatattatcgacgagcaggttccgctgaaaaaaggcggggcgaactatatggcgtgttgcccgttccacaaggaaaaaacgccgtcgttttcggtcagtccaaccaagcagttttaccattgtttcagttgcggggcacacggctcagcgattggttttgtgatggaacatcagggactgtcgtttccggaggcggttcagttccttgccgaccgcgtgggtatggtcgtgccgaaagtgcacgggcaaaacgataatcccgaagtccgtgccgaacgtaagaaaaaacagcagacactggaggaaacgacggctgcggcagctgatttttacgcgcaacagctaaaattcaatccagcggcaaaagcttatttggacaagcgcggcttgagtgcagaagttatcgcgcattatggtttgggctatgcgcccgacggctggcagcctttgacgcaagtgttccaaccgtatcctaataccgcgttagtggatacggggatggtgattgacaatgagggacggcattacgaccgcttccgccatcggattatgttccccatccgcaatccgcgcgggcaggttatcggtttcggcggcagggtgctggacgactcgaagccgaaatatttaaattctcccgatacgcctttgttcgataaggggaaaaacctttacggactgtatgaagggcgtgccgctgtcaaggaagcggggcggattttggtggtcgaaggctatatggacgtggtcgcgctggcacagttcggcgtgggctacggcgtggcggctttgggtacggcgacgacggcggaacacgtcaaaatcctgatgcgtcaggcagacagtatttatttctgtttcgacggcgacagcgcggggcgaaaagcggcttggcgcgcgctggaaaacgcgctgccgcagttgaaggacgacaaatcgctgcattttttgttcctgccggaagaacacgaccccgacagctacatccgcgcctacggcaaagcgcaatttgaagacgcgctgttgaatcaaagcaagcccttgtcggaatatttctgggaacacctttcagacggcattcatctcaatacgcaggaaggcaaggcggaattggtaaaaaccagttcgccgcttttggcgcagattaccgcgccggcattggcttatttgttaaaacaacggcttagcgagctggtcggcatcgaccccgacaacctcgcgcaactgctgggacaggaagcgccgaagcggcacgtcaaacaaaaaaactacaaactgcccccgatttccgtcaaacagcccgttatgccgacattggtgcaacggcaaatccgcagcctcttgataaatccggattgggctgcatatatagacctgcccgattatctggcgttggacggcgatttcgcctgccttgccaacctcgccgaaaccattaaaaaccatccttccgtgccggcaaccgcacaggttttggaacatatgcgcggttcgccctacgaagaaacaatcaaccgcatcttccggtcggcccttcaatcggaagaaatggaaggcggcggcgaagaagattgcgaaaacttccaaatcggcatcaaaaaactgctcaatgagttaaaatacagccaaatcgaagcattgaaacaaaaaagcctgcaatccggcttaaatgaaagcgagaaaaaacttttgctgtcgctgctgaccgcaaaacaaaattga

SEQ ID NO: 29813 - DNA, 1929 bp, Neisseria meningitidis
atgtccaaaaaccaaaatcacgaagaataccaagacgatgcccgccccctgacgattgaggaacaacgcgcgcgcctgcgccaactcatcattatgggcaaagaacgcggctacatcacctactccgaaatcaatgacgcactgcccgacgatatgtccgatgccgatcaaatcgacaacatcgtcagtatgatttccggtttgggcatccaagttaccgaacacgcccccgatgcggaagacatattgttaagcgacaatgccgccgttaccgacgatgatgccgtcgaagaagccgaggccgccctttccagcgccgactccgagttcggcaggacgaccgaccccgtccgtatgtatatgcgcgaaatgggacaggtcgacctgctgacccgcgaagacgaaatcatcatcgccaaaaaaatcgaaaacgccctgaaaaatatggttcaggccatctccgcctgcccgggatccattgcggaaatcttagaactcatcgaaaaaatccgcaaagacgaaatccgcgtcgacgaagtcgtagaagccattatcgacccgaatgaagtattgctcaacgaattgggcttggggcacttggaaaccacagcacccgagaaaccttccaacgacaattcggacgaaaacgaagacgacgaagaatcggaagaagatgcggatgaaatctcggcagccaatctcgccgaattgaaacaaaaagtcatcggccactttgcccaaatcgaaaaagactacaaaaaaatgatcggccgtttggaaaaacaccacagccggcacaaagactatctcgcctaccgcgacgcgattgccaacaaactgctggaagtccgtttcgccacccggcaaatcgacagcctcagcagcagcctgcgcgggaaagtagaaaacatccgcaaactcgaacgcgaaatccgcgacatctgcctcgaccgcgtccatatggaacgcgactacttcatccaaaacttcctgcccgaaatcaccaatctagaatggattgaagaagaaatcgccaaaggcagggtttggagcgacgcgctcgaccgcttccgccacgccatcctcgaaaaacaaaccgagttggcggatatggaaaaagaaacccgcatttccatcgaagagttgaaagaaatcaacaaaaatatggtgtcgagcgaaaaagaaaccgcagccgccaaacaggaaatgattcaggcaaacttgcgcctcgtgatttccatcgccaaaaaatataccaaccgtggcttgcagttccttgatttgattcaggaaggcaacatcggcctgatgaaagcggtcgacaagttcgaataccgccgaggctataagttctccacctacgcaacctggtggatccgtcaggcaatcacccgctcgattgccgatcaggcgcgtaccatccgcattccggtacatatgattgaaaccatcaacaagatgaaccgcatctcgcgccaacaccttcaagaaaccggcgaagaacccgattccgccaaacttgccgaactgatgcagatgcccgaagacaaaatccgcaaaatcatgaaaatcgccaaagagccgatttcgatggaaacccccatcggcgacgacgacgattcgcacttgggcgacttcatcgaagatgccaacaatgttgcgccggccgatgcggcaatgtacaccagcctgcacgaagtaaccaaagaaatcctcgaaagcctgacaccgcgtgaggcaaaagtcctgcgtatgcgtttcggcatcgatatgaacaccgaccacacgctggaagaagtcggcagacagtttgacgtaacgcgcgaacgcatccgacaaatcgaggcaaaagcactccgcaagctgcggcatccgacaagaagcgaccgtttgagaagtttcttggacagcgaagacagcaagctgtaa

SEQ ID NO: 29814 - DNA, 852 bp, Neisseria meningitidis
atgattgccaaacacatcgaccgcttcccactattgaagctagatcaagtgattgattggcaaccgatcgaacaatacctgaaccgtcaaagaatccgttacgtccgagaccaccgcggccgtcccacctattccctgttgtccatgttcaaatccgtcttgctcggacaatggcacagcctctccgatcccgaactcgaacacagcctcatcacccgcatcgacttcaacctgttttgccgttttgacgaactgagcatccccgattacagcaccttatgccgctaccgcaactggctggcgcaagacgacaccctgtccgaactgttggaactgattaactgccaactgaccgaaaaaggcttaaaagtagagaaagcatccgccgccgtcattgacgccaccattattcagaccgctggcagcaaacagcgtcaggccatagaagttgacgaagaaggacaaatcagcggccaaaccacaccgagtaaagacagcgatgcccgttggacaaagaaaaacggcctctacagactcggttacaaacaacatacccgtaccgatgcagaaggctatatcgagaaactgcacattactcccgccaatgcccatgagtgcaaacacctgtcgccgttgttggaagggttacccgaaggtacgaccgtctatgccgacaaaggctacgacagtgcggaaaaccgaacatctggaagaacatcagttgttagacggcattatgcgcgggcagcctatttcggactgattaaagtgagtgcgcaaagccacctgaaggcgatgtgtttgaacctgttgaaagcggccaacaggctaagtgcgcccgctgccgcctaa

SEQ ID NO: 29815 - DNA, 2226 bp, Neisseria meningitidis
atgtgtaaaccgaattatggcggcattgtcttgttgcccttacttttggcatcttgtatcggcggcaatttcggcgtgcagcctgttgtcgaatcaacgccgaccgcgtaccccgtcactttcaagtctaaggacgttcccacttcgccccctgccgggccttcggtagaaaccacgccggtcaaccggcccgccgtcggtgcggcaatgcggctgttgaggcggaatattgcttttcatcgtgaagatggcacggcaattcccgatagcaaacaagcagaagaaaagctgtcgtttaaagaaggtgatgttctgtttttatacggttccaaaaaagataaacttcagcagcttaaggataaaattcatcaacgcaatcctaatgtagaaattaggacatcagaaaatgaaaataaaaaatatggttatgaatttgtagatgcaggttatgtatatactacaaagggaaaagatgaaattgagtggacttcaaatcacaagcagtttacctaccggtttggttatgacggttttgtatattattccggagaacatccttcgcaatctttaccgagcgcgggaacggtgaaatattccggcaactggcaatatatgaccgatgccatacgtcatcgaacaggaaaagcaggagatcctagcgaagatttgggttatatcgtttattacggtcaaaatgtcggagcaacttcttatgctgcgactgccgacgaccgagagggaaaacatcctgccgaatatacggtagatttcggtaagaaaactttgacgggtaaattaattaaaaatcagtatgtgcaaaagaaaaccgatgaaaagaaaccgctgaccatttacgacattactgcaacattggacggcaaccgctttaccggcagtgccaaagttaacaccgaggtgaagacgaaacacgctgataaagagcatttgtttttccataccgatgccgatcagcggcttgagggcggttttttcggcgataacggagaagagcttgccggacggtttatcagcaacgacaacagcgtattcggcgtattcgcaggcaaacaaaaaacagacgcatcaaacgcatcagatacaaatcctgctatgccgtctgaaaaacacaccaaaatcttggattctctgaaaatttccgttgacgaggcgactgatagcaatgcccgtaagtttgccatttcccctatgcccgattttggtcatcccgacaaacttcttgtcgaagggcgtgaaatctccttgctcaaagatactcaaaccatcgatcttgccgacggcaggaaaatgaccgtcagtgcttgttgcgactttttgacctatgtgaaactcggacggataaaaaccgaccgcccggcaagtaaaccaaaggcggaagatgaaaattccgaagatgaaattggtgaaagcgaggaaaatgaagaggatttggtcgctgaagaagaaaacacggaagacgaagtcgtagaagatgaagacagagaagaagacgaagtttccgaagatggtaacagtgaagacgaagaagaaatcgccgaagaagatgatgatgaagccgaagaggaggaagttgaagaacccgaagaagaatcgccggaagaaggcggcggtggcggttcagacggcatcccgcccgcttcggaagcccctaaaggcagggacatcgaccttttcctgaaaggtatccgcacggcggaagccgacattccgcaaactggaaaagcacgctataccggcacttgggaagcgcgtatcagcaaacccattcaatgggataataaggcggataaaaaagcggcaaaagcagaatttgacgttgatttcggcgagaaatcgatttccggaacgctgacggagaaaaacggtgtagaagctgctttctatattgaaaaaggtgtgattgatggcaacggtttccacgcgacagcacgcactcgggataacggcatcaatctttcgggaaatggttcgaccaaccccaaaaccttccaagctagtgatcttcgtgtagaaggaggattttacggcccgcaggcggaggaattgggcggtactattttcaataaggatgggaaatctcttgatataactgaagatattgacaatgaaattgaagctgatgctggcgaacagttagaacctgaagttaaaccccaattcggcgtggtatttggtgcgaaaaaagatatgcaggaggtggaaaaatga

SEQ ID NO: 29816 - DNA, 318 bp, Neisseria meningitidis
atgagcaccttcttccagcaaaccgcccaagccatgattgccaaacacatcgaccgtttcccgctattgaagttggaccaggtgattgattggcagccgatcgaacaatacctgaatcgtcaaaaaacccgttacctccgagaccaccgcggccgtcctgcctatcccctgttgtccatgttcaaagccgtcctgctcggacaatggcacagcctctccgatcccgaactcgaacacagcctcatcacccgcatcgatttcaacctgttttgccgtttcgacgaactgagcatccctgattacagtatagtggattaa

SEQ ID NO: 29817 - DNA, 1635 bp, Neisseria meningitidis
atgaccaaattcattttcgtaaccggcggcgttgtctcctcactgggtaaaggtatcgccgccgcttctattgccgccatcctcgaatcgcgcggcttgaacgttaccatgctcaagctcgatccttatatcaacgtcgatcccggcacgatgagcccgttccaacacggcgaagtgttcgtaaccgacgacggcgcggaaaccgacctcgacttgggacactacgaacgctttatcgattccacgatgacccgccgcaacagcttcagcacgggacaggtgtacgaaaacgttatcgccaaagaacgacggggcgactatttgggcggcacggttcaagtcattccgcacattaccgacgaaatcaaacgacgcatccatgaaggcgcggcaggttacgatgtggcgattgtcgaaatcggcggcacggtcggcgacattgaatcgctgccgtttttggaagccatccgccagatgcgcagccagttgggacgcaacaacaccctgttcgcccacttgagctacgttccctacatcgccgctgcaggcgaaatcaaaaccaagccgacccagcacaccgttaaagaaatgttgagcatcggtttgcaacccgacatcctgatttgccgtatggacaggacaatgcctgcggacgaacgccgcaaaatcgccttgttctgcaacgtggaagaacgcgcgattgtcggcagctacgatgtggacagcatctacgaatgccccgaaatgctgcacgaccaaggcatcgacaacatcattaccgagcagttgcagcttaatgtgcaacaggcggatttgaccgcgtggaaaaaaatcgtccacgccatccaaaacccgaaacacaccgtcaaaatcgccatggtcggcaaatacgttgatttgaccgagtcctacaaatcactgattgaagccttgaaacacgcaggtgttcacaccgaaaccgacgtacaaattacctttgttgacagcgaaagcatcgagaaaaacaacggcgacgtttctatgctcaaagatatggacgccatcctcgttcccggcggttttggttcgcgcggcgtggaaggcaaaatcgccgctgtgcgctatgcccgcgaaaacaacgtgccatacttgggtatctgcctcggtatgcagattgcgctgattgaatacgcccgcgacgtggcaggtttgaaaggtgcgaattccactgagttcgacctcaaatgcgccgcccccgtcgttgccctgattgacgaatggcaaactgccgacggcagcgtcgaaacccgcgacgaatccgccgatttgggcggcaccatgcgtttgggtgcgcaagaagtcgaattgaaagcaggcagcctcgccgccaaaatctacggcagcgaacacatccgcgagcgccaccgccaccgctacgaagtcaacaacaactacgttcctacgctggaacaagcaggtttggtcatcggcggtgtatctgccggacgcgaacgcttggtcgaaaccatcgaactgccgaaccatccttggttcttcgcctgccagtttcatcccgaattcacttccaacccgcgcaaagggcatcctttgttcaccgcgtttgtcaaagctgcgttgaacaataaaaaagcctga

SEQ ID NO: 29818 - DNA, 1152 bp, Neisseria meningitidis
gtgttaaaatctgcctttaaaaaccgccgtttccaagccatcctgcgtatgaatacgacagcaaacccttccaatatcatcgtcgggctctccggcggtgtcgattcttccgtaaccgccgccctgctcaagcagcagggttatcaagtgcgcggtgtgtttatgcagaactgggaagacgacgacaacgacgaatattgcagcattaaacaggattcgtttgatgccatcgccgttgccgatattgtcggcatcgatatcgacatcgttaatttcgccgcgcaatataaagacaaagtctttgcttattttcttcaggaatacagtgcggggcgcacgccgaatccggatgtgttgtgcaacgccgaaatcaaattcaaatgctttttggactacgccgtagggcagggcgcggataccatcgccaccggacactatgcgcgcaaagaagtccgcaacggcgtgcattacctgctcaaaggtttggatcaaaacaaagaccaaagctatttcctctaccgccttaaacctttccaactcgaacgcgcgattttcccgttgggcggtttggaaaaacccgaagtccgccgccttgccgccgaatttaatttgccgactgccgctaaaaaagacagcaccggcatctgtttcatcggcgagcgtccgttccgcgagttcctgcagaaatacctgccgaccgacaacggcaaaatggtgacacccgaagggaaaaccgtcggcgaacacgtcgggctgatgttttacacattgggtcagcgcaaaggtttgggcatcggcggcgggggcgaaccgtggtttgttgcggctaaagatttgacgaaaaacgaactgatggtcgtgcaaggacacgaccatccgctgctctatacccgcagccttgtgatgaacgatttgagtttcacgctgcccgagcgtccgaaagaagggcactacacctgcaaaacgcgttaccgtatggcggacgcgccttgcgaattgcgctatttggatgatgaaacggtcgagctggtgtttgacgaaccgcaatgggcggttacgccgggccagtccgccgtgctgtacgacggcgacatctgcttgggcggcggcatcatccaatcaaccgacaaacccgtcatcatcacacgataa

SEQ ID NO: 29819 - DNA, 384 bp, Neisseria meningitidis
atggaaccttcctcctacgcggcagaaaaaaaaggaaaaggcggcatcaggcgcgtcatcaacgcattcggctattcgatagacggcatcgccgccgcctaccgttacgaagcggcattccgtcaggttttgtggctgaacgcgctgctggtgtgcgcggcatttttttgggtttccgaaaagtccctccgcctgccgttgattatcgcgtcttttgtgtcggtcattgtcgaactgttcaacactgccgtcgaagccgccgtcgatcatacttcgactgaaaaacacgagctggctaaacgcgccaaagacgcaggttctgctgcacaattgttcgcgatgctgatgttagcggcggtttggctgtccgccctgttcgggtaa

SEQ ID NO: 29820 - DNA, 1722 bp, Neisseria meningitidis
atgccgtctgaagccatctgttcaaagaaaactatgctcaataaagaccaatttgcggacaaccattttatccgcaccatcatcgaagacgacctcaaaagcggcaaacacgaagccgtccaaacccgttttccgccggagcccaacggttacctgcacatcggacacgccaaatccatctgcctgaacttcggtttggcgtatatttacgacggcttgtgcaacctgcgttttgacgataccaaccccgaaaaagaaaacgacgaatacgtcaacgccatcaaagaagatgtcgagtggctcggtttccattgggcgggcgagccgcgtttcgcttccaactatttcgaccagctttatgactacgccgtcggtttgattaaagacggcaaagcgtatgtcgatgatttgacgcccgaagaaatgcgcgaataccgcggtacgctgaccgaagcgggtaaaaacagcccttaccgcgaccgcagcgtcgaagaaaacctcgacctgttcacacgcatgaaaaacggcgagttccccgacggcagcaaaaccctgcgcctgaaaatcgacatggcatcgggcaacatcaatatgcgcgaccccgtcatctaccgcatccgccgcgcccatcaccacaacaccggcgacaaatggtgtatctacccgatgtacgactacacgcattgcatctccgatgccatcgaaggcatcacgcattccttgtgtacgctcgaatttgaagcacaccgtccgctgtacgactgggtgttggataacatccacgcgccgcatgccacccgtccgcgccaatacgagttttcccgtttggagcttttgtacaccattacctccaaacggaaattgaatcagttggttgtggaaaaacacgtttccggctgggacgatccgcgtatgccgactatttccggtatgcgccgacgcggctacacgcccgaaggcctgcgtctgtttgccaaacgcgccggtatttccaaatctgaaaacatcgtcgatatgagcgtgttggaaggcgcgattcgcgaagagttggaaaattccgccccacgcctgatggcggtgttgaacccgctcaaagtgaccctgaccaactttgaagccggcagaacccaaagccgccgtgccgcgttccatccgaaccacgaggaaatgggcgagcgcgaagtacctatttcacaaaccatctatattgaagccgacgactttgccgaaaatccgcccaaaggcttcaaacgcctgattcccggcggcgaagtacgcttgcgccacggctatgtcatcaagtgcgatgaagtcgtcaaagacgaagcaggcaatgtggttgaactcaaatgcagcatcgaccacgacaccttgggcaaaaatccagaaggccgtaaagttaaaggcgtgattcattgggtttccgccgaacacgccgccgaaatcaaagtccgtctgtacgaccgcctctttaccatcgagcgtcccgatgccgtgcgcggcgaagacggcgaatacctgccgttcaccgatttcctcaatccggaatccgtcaaggaaatcaccgcctacgccgaacctgccgccaaagatttgccggcagaaagccgttggcagttcgagcgtatcggctacttcgtaaccgaccgtaaagaccacggcaaagacacgccggtgtttaaccgcacggtcacgctgaaagattcttggcagcctaagtaa

SEQ ID NO: 29821 - DNA, 903 bp, Neisseria meningitidis
atggacagcctgatgacgttgctttcggtattgataccgatgtttgccggattttttatccgtgtgcccaagccttacctgcccgctttggataaggtgctatcggtcttggtgtatgctgtgctgctgctgatcggcgtctcgttgtcgcgcgtggaggatttgggttcgcggttggacgatatggcgttgacggttctgtggctgtttgtttgtacggtcggggcgaacctgcttgctttggcagtgttgggaaagttattcccgtggcggataaaggggaaagggaagggcgtttcggtcggtgtgtcgggcagtgtggggcagctcggatgcgtgctgctcggatttgcatccggcaaactgatgcgcgatatttggatgccgtctgaaaacgcgggtatgtattgtctgatgctgctggtgctcctcatcggcgtacagctcaaaagcagcggcgtatcgttgcggcaggttttggtcaaccgcaggggtattcggttgtcggtctggtttatgctttcatctctttcaggcgggctgctgtttgccgcatcggcagacggtgtgtcgtgggtgaaaggtttggcgatggcttccggcttcggttggtattccctctcgggtttggtgatgaccgaggcttacggcgcggtatggggcagtatcgcgcttttgaacgatttggcacgagagctgttcgcgctggcatttattccgctgctgatgaagcgttttcccgatgcggcagtgggggtcggcggcgcgaccagtatggatttcacattgcccgtgattcggggtgcgggcggcttggaagccgtaccggtagcggtcagcttcggcgtggtggtcaatatcgccgctccgtttctgatggtggtgttttccgctttgggctga

SEQ ID NO: 29822 - DNA, 441 bp, Neisseria meningitidis
atgccgaaagccaccttttacacgcacgttgcccaagttccgattttcacctgccgcctgattgcccgtgcgattcgggacggcggcaggatactggtgtggtccgattcgttcgggcagcttcaggaattggacaaaatgctttggcaatacgaggccgagagttttattccgcacgaaatttgggaaacggaagaagccatgccgtctgaaccatccgtcctgcttgcctgcggcggcaatctgccccgaattcccgaaggcatggccgttttgaacctgtccgacggtttttggaacaccgctccggtcttgcccgcgcgcgttttagaaatcgtcggcaacagcctggaagagctcgccgacgcgcgcgaacgctttaccgcctaccgccgaagcggttttgccatcgaacatcacggcatggagggcaaggcataa

SEQ ID NO: 29823 - DNA, 1407 bp, Neisseria meningitidis
gtggaatttagcacaaaaaccgaaatcttgcaggaacagcaggcaggcgcacagttatttgtctgcaccgaagaggcgcaattaaaccatccgaccgcccttgcccttttgtcttcgcttgaagaaggtcaaaattttgccgacacaaaaatcccgacaggcaacggtttgcaggctgttgccgtatgctgtctgaaaagcaccggccgcgccgcattgaacaaggccgctgccgaagccgccaaatgggcgcaaaatcaggaaacggtcaatgtggacgttcatgcctttgaagaagcgcaagccgcagccgttgccgaagcgtttgcgattgctttcggcaatgccgcctaccgtttcgaccgctataaaaaagaagccaagcccgccaaatttgcagaagccgtgttccacagcgcacacgaagccgccgtcaaagaagccctgcgcgttgccgaagcgcaggtttacggacaaagcctctgccgcgacttgggcaacgccgcgcccaacgaatgcacgcccgaatttttagcgcgcaccgccaaagccgaagccgaaaaattgggcgcacacgccaaaatcattgaaaaagactacatcaaagaaaacatgggttcgttttggtcggtcgccaaaggcagtgtcgaagatccctatttggtcgaactgagctatttcggtgcggcggacaaagaagccgcgcctgtggtattggtcggcaaaggcattaccttcgacaccggcggcatttccctcaaacccggcctgaacatggacgaaatgaagtttgatatgtgcggcgcggcaaccgtcatcagcaccttctgcgccgccgtcaaactgcaactgccgattaacctgattgccgtcgtcgccacttgtgaaaatatgccttccggcgcggcaaacaaaccgggcgatgtcgtgaaaagtatgaaaggtctgaccatcgaagtgttgaacaccgatgccgaaggccgtctgattttgtgcgacgcgctcacttacgccgaacagttcaaacccaaagccgtcatcgacgtcgccaccctgaccggcgcgtgtattgtcgccttggggcacgatgtcagcggcgtgatgggcaacaatcaagatttggtcgacagcctgcttgccgcttcctacaacgtggacgacaaagcgtggcaactgccgctctttgaaacctacaaagaccagctcaaatccaactttgccgacatccccaatatcggcacgcccggcgcgggcacgattaccgccgcaacattcctgtcttacttcaccgaaggctacccgtgggcgcaccttgacatcgcgggtacggcgtggaaatccggagcggaaaaaggtgcgactggccgtcccgttcccttgctgctgaactatctgcggaatctttaa

SEQ ID NO: 29824 - DNA, 2586 bp, Neisseria meningitidis
atgttagaagcctatcgtaaagccgccgccgagcgcgccgccctcggcattcccgccctccctttgaacgcgcagcaaaccgccgatttggttgagctgctgaaaagcccgcccgcaggcgaaggcgagttcttggtcgaactgcttgcccaccgtgttccgcccggtgtggacgatgccgccaaagtcaaagcctcattcctggctgccgttgccgaaggcagcgcgtccagcccgctgatctcccccgaatatgcgaccgaactcttaggtacgatgctcggcggttacaatatccacgccttaatcgaactcttggacgacgacaaactcgcgcccattgccgccaaaggcttgaaacatacgcttctgatgttcgattccttccacgacgttcaggaaaaagccgaaaaaggcaacaaatacgcgcaagaagttttgcaatcttgggcagatgccgaatggttcgcctcacgcgccaaagttcccgaaaaaatcaccgttaccgttttcaaagttgacggcgaaaccaatacagacgacctctcccccgcgcccgacgcgtggagtcgtcccgatattccgctgcacgcgctggccatgctgaaaaacccgcgcgacggcatcacgcccgacaaaccgggcgaagtcggtccgattaaattgttggaagaactcaaagccaaaggccatccggttgcttacgtcggcgacgtggtcggtactggttcttcacgcaaatccgcgaccaactccgtcatttggcataccggcgaagacattccgttcgtgccgaacaaacgcttcggcggcgtatgtttgggcggcaaaatcgcgccgattttcttcaatacccaagaagattccggcgcgctgccgattgaagtcgatgtatctgctctaaaaatgggcgatgtcgtcgatatcctgccttatgaaggcaaaatcgtgaaaaacggcgagactgttgccgagtttgaattgaaatcacaagtattgctggacgaagtgcaagccggcggccgtatcaacctgattatcggccgaggtctgaccgccaaagcgcgcgaagccctgaaactgcctgcctctactgcattccgcctgccgcaagcgcctgccgaaagcaaagccggtttcaccttggcgcaaaaaatggtcggccgcgcctgcggtctgcccgaaggacaaggcgtgcgcccgggtacttactgcgaaccgcgtatgacgacggtcggctcgcaagacacgaccggcccgatgacccgcgacgagttgaaagacttggcttgtttgggcttctccgccgatatggtgatgcagtctttctgccacaccgccgcctatccgaaacctgtcgatgtaaaaacccataaagaactgcccgcctttatttccacccgtggcggcgtgtcactgcgtccgggcgacggcgtcatccactcgtggctcaaccgcctgctgctgcccgataccgtcggcaccggcggcgacagccatacccgtttccccatcggtatttccttccccgccggctccggcttggttgcctttgccgccgcaacgggcgtaatgccgctcgatatgcccgagtctgtattggtacgcttcagcggcaagctgcaaccgggcgtaaccctgcgcgatttggtgaacgccatcccgctgtacgcaatcaaacaaggtttgctgaccgttgccaaagccggtaagaaaaacatcttctccggccgcatcctcgaaatcgaaggcctgcctgatttgaaagtggaacaagcctttgaattgaccgacgcatccgccgaacgctccgccgccggctgtaccgtgaagctcaacaaagagccgattatcgagtacatgaaatccaacgtcgtgttgatgaaaaacatgattgccaacggctatcaagacccgcgcactttggaacgccgcatcaaagctatggaaaaatggctggcaaatcccgagttgctcgaagcggataaagatgccgaatacgccgccgtgattgaaatcaacatggacgacatcaaagagccgattatcgcctgcccgaacgacccggacgacgtgtgcttcatgtccgaacgctccggcaccaaaatcgacgaagtattcatcggttcgtgtatgaccaacatcggccacttccgcgccgcctccaaacttttggaaggcaaggcagacacccccgtccgcctgtggattgcgccgccgaccaaaatggacgcgaaacaattgtccgacgaaggacactacggcgtactcggacgtgccggcgcgcgtatggaaatgccgggttgctccttatgtatgggtaatcaggcgcaagtacgcgaaggtgcgaccgttatgtccacctccacccgcaacttcccgaaccgtttgggtaaaaacacctttgtttacctcggttcggcggaattggcagcgatttgctccaaactgggtaaaatcccgaccgttgaagaatatcaagccaatatcggcatcatcaacgaacagggcgataaaatctaccgctatatgaacttcaacgaaatcgacagctacaacgaagtagccgagaccgtgaacgtttaa

SEQ ID NO: 29825 - DNA, 1014 bp, Neisseria meningitidis
atgcaagtctattacgataaagatgccgatctgtccctgatcaaaggcaaaaccgttgccatcatcggttacggttcgcaaggccatgcccatgctgccaacctgaaagattcgggtgtaaacgtggtgattggtctgcgccaaggttcttcttggaaaaaagccgaagcagccggccatgtcgtcaaaactgttgctgaagcgaccaaagaagccgatgtcgttatgctgctgctgcctgacgaaaccatgcctgccgtctatcacgccgaagttgcagccaatctgaaagaaggcgcaacgctggcatttgcacacggcttcaacgttcactacaaccaaatcgttccgcgtgccgacttggacgtgattatggttgcccccaaaggcccgggtcataccgtacgcagtgaatacaaacgcggcggcggcgtgccttctctgattgccgtttaccaagacaattccggcaaggccaaagacatcgccctgtcttatgcggctgccaacggcggcaccaaaggcggtgtgattgaaaccactttccgcgaagaaaccgaaaccgatctgttcggcgaacaagctgtattgtgcggtggcgtggtcgagttgatcaaagcaggttttgaaaccctgaccgaagccggttacgcgcctgaaatggcttacttcgaatgtctgcacgaaatgaaactgattgttgacctgattttcgaaggcggtattgccaatatgaactactccatttccaacaatgcggagtacggcgaatacgttaccggccctgaagtggtcaatgcttccagcaaagaagccatgcgcaatgctctgaaacgcatccaaaccggcgaatacgcaaaaatgtttatccaagagggtaacgtcaactacgcgtctatgactgcccgccgccgtttgaatgccgaccaccaagttgaaaaagtcggcgcacaactgcgtgccatgatgccttggattactgccaacaaattggttgaccaagacaaaaactga

SEQ ID NO: 29826 - DNA, 492 bp, Neisseria meningitidis
atgcgacatatcttatctgttctgatcgaaaacgaatcaggtgcgatgagccgcgtggtcggtttgttctctgcacgcgattacaatatcgattctttggcggttgcgccgaccgaagacaaaaccctgtcccgtatgaccatcgttacacacggcgacgagcaggttatcgaacaaatcaccaagcaactcaataaattgattgaagtgattaaagtggtcgatttgaacgaaagccgttttgtcgaacgcgaactgatgttggtaaaagtccgtgccgccggcaaagaccgcgacgaatttttacgcttgaccgaaatctaccggggcagcatcatcgacgtaaccgaccgcagctatacgattgaaattaccggctcgacagacaagctggattcctttttggaaacggtcggacgcgcccaaattttggaaaccgtacgtacaggcgcggccggcatcggtcgcggtgagcgtattttgaaaatttaa

SEQ ID NO: 29827 - DNA, 1728 bp, Neisseria meningitidis
atgcagctatcaggcgcgcaaatcatagtgcagagtctcaaagccgaaggtgtcgagtacgttttcggttatcccggcggtgcggttatcgaaatctacgatgcccttttccaactcaataaattcaagcacattctgacccgtcacgagcaggcggcagtacacgcggcagatgcgtatgcgcgcgtcagcggtaaggtgggcgtggcattggttacatccggcccgggcgttaccaatgcactgaccggtattgctactgcctatacggattcgattccgatggtggtcatcagcgggcaggtaggcaattccctgattggtacggatgcgttccaagaagttgatacggtgggtattacccgtccgtgcgtcaaacacaatttcctggttacggacatcaatgagttggcggaaaccattaaaaaggcgttccaaattgccgcaagcggccgaccggggcccgtggtggttgatgtcccgaaagatgttacgcaggcgatggcgaaattcagctatcctcaggaagacatttttatccgttcgtatcaaccggttgttcaagggcatatcggtcagattaaaaaggccgtgcagatgttggcatctgccaaacgtccggtcgtctattttggcggcggcgtggtgttgggtaatgcttctgaagagctgacccgatttgtccgaatgacgggtgctccgtgcacgggtacgctgatgggcttgggcgcttatccttccggcgaccgccaattcctcggtatgctcggtatgcacggtacttacgaggcaaaccttgccatgcagaatgcggatgtcgttcttgccgtaggtgcgcgttttgacgaccgtgtggtttccgtaccgtccaaatttttcgagaaggcgaagaaggttatccatatcgatgtcgatccttccagcatcgccaaacgcgtgaaggcggacattccgattgtcggcgacgtgaaaaacgttttgtccgagatggttgcgctgtggcaaaaacaagagtccgtgccgtctgaagatgctttgggcaaatggtggaaaaccatagaggaatggcgttcccgcgattgcttgtggtttgacaacggcagcgaaattatcaagccacaatatgtgattcagaagcttgccgagattaccggcaattcggcaatcatcacatcggatgtagggcagcatcaaatgtttgcggctcaatattatcccttcgaacgtccgcgccaatggctcaactccggcggtttgggtacgatgggcgttggtctgccttatgcgattggtgcaaaacttgccgccccggatcaagacgtattctgtattaccggcgacggctcgatccagatgaacatccaagagctgtccacctgtttccaatatcggattccggttaacgtcattacgctgaacaacggttatctcggtatggtacgccagtggcaggaaatatattacggcggacgagagtcggaaacctatttcgattctttgcccgatttcgtcaaacttgccgaggcatacggccatatcggtatccgcgtggacaagaagtctgatgtggaaggtgcgttgttggaagcattgaaccaaaaagacaggctggtgtttatcgacttcctgaccgaccagaaacagaatgtgatgcccatggtcggcaacggcaaaggtttggacgaaatggtacttccgccgcatatgcgtgcggacggaaaggcgtaa

SEQ ID NO: 29828 - DNA, 654 bp, Neisseria meningitidis
atgcaggataatgctttgaccatcgccttatccaaggggcgcatttttgaggagacgctgccgctgcttgccgctgccggcattgttccgactgaagagcctgaaaaatcgcgcaagctgattatcgggacgaaccatgaaaacatccgccttgtcattgtccgcgcaaccgatgtgccgacttatgtccgctacggcgcggcggacttcggcattgcgggcaaagacgtgctgatcgaacacggcggcacggggctttaccggcctttggatttggagattgccaagtgccgcatgatggttgctgtgcgtaaagggtttgattacgaagcagcttcgcaacccggatgccgtctgaagattgccacaaagtatcctgaaatcgcggcatctcattttgccggcaagggtgtccatgtggacattatcaaactgtacggctcgatggaacttgcgccgctggtcggcttgagcgatgcgattgtggacttggtttcgacgggcaacaccttgaaggcaaacggcttggaagcagtcgaacacatcgtcgacatttccagccgcctggtggtcaacaaggctgctttgaaaacgaaatacgcgctgctggagccgattattcaggcgttcggcggcgcagtgaaggcgaagtaa

SEQ ID NO: 29829 - DNA, 337 bp, Neisseria meningitidis
atgagcaccttctttcaacaaaccgcgcaagccatgattgccaaacacatcgaccggttcccactattgaagttggaccaggtgattgattggcagccgatcgagcagtacctgaatcgtcaaagaacccgttacctccgagaccaccgcggccgtcccgcctacccgctgttgtccatgttcaaagccgtcctgctcggacaatggcacagcctctccgatcccgaactcgaacacagcctcatcacccgcatcgatttcaacctgttttgccgttttgacgaactgagcatccccgattacagcaccttatgccgctaccgcaaccggcggcgca

SEQ ID NO: 29830 - DNA, 675 bp, Neisseria meningitidis
gcgcaagacgacaccctgtccgaattgctcaaactgattaactgccaactgaccgaaaaaggcctaaaagtagagaaagcatccgccgccgtcgttgacgccaccattattcagaccgccggcagcaaacagcgccaggccatagaagttgacgaagaaggacaagtcagcagccaaaccacaccgagcaaagacaaagatgcccgttggataaagaaaaacggcctctacaaactcggttacaaacaacatacccgtaccgatgcagaaggctatatcgagaaactgcacattactcccgccaatgcccatgagtgcaaacacctgtcgccgttgttggaagggttacccgaaggtacgaccgtctatgccgacaaaggctacgacagtgcggaaaaccggcaacatctggaagaacatcagttgttggacggcattatgcgcaaagcctgccgcaaccgcccgctgtcggaagtgcaaaccaaacgcaaccgatatttgtcgaagacccgttatgtggttgaacagagcttcggtacgctgcaccgtaaattccgctacgctcgggcagcctatttcggactgattaaagtgagtgcgcaaagccacctgaaagcgatgtgtttgaacctgttgaaagcggccaacaggctaagtgcgcccgctgccgcctaa

SEQ ID NO: 29831 - DNA, 564 bp, Neisseria meningitidis
atgccttggaatctccctatcttcctcacatggttgagggtcttgctcattcctgtcatgacagcccttttttacctgccttttccgtggttcgcggaggaaacgattaatctcaccgccgccgtcatttttgccgttgccgccttaaccgactggtttgacggatttttggcaagactgtggaaacagacttccgatttcggcgccttcctcgatcccgtcgccgacaagctgatggttgccgtatcgctacttttactggtcaaactcgaccggacctatgttttgtttgccatgatcattatcggcagggaaattaccatttccgcattgcgcgaatggatggcgcaaatgggcaaaaggaacagcgttgccgtcgccaccgtcggtaagttcaaaaccgccgcgcaaatgctggcaattttcctgctgctgctgaatattcccgatttttacggatttaatcttgttgttatcggcaatgtattgatgtttatcgcatctttgctgacagtctggtcgatgctgtattatctgaaaatggcgtggaaagaaatcgcctga

SEQ ID NO: 29832 - DNA, 906 bp, Neisseria meningitidis
atggacattctggacaaactggtcgatttcgcccaattgacgggcagtgtggatgtgcagtgccttttgggcggacaatggtcggtacggcatgaaaccttgcaacgcgaaggattggtacacattgttacatcgggcagcggctatctctgcatcgacggcgaaacttccccgcgtccggtcagtacaggggatattgtatttttcccgcgcggcttgggtcatgtgttgagccacgacggaaaatgcggagaaagtttacaaccggatatgcggcagcacggtgcgtttacggtcaagcagtgcggcaacggacaggatatgagcctgttttgcgcccgtttccgctacgacacccacgccgatttgatgaacgggctgcctgaaaccgtttttctgaacattgcccatccgagtttacagtatgtggtttcaatgctgcaactggaaagcaaaaaacctttgacggggacggtttccatggtcaacgcattgtcgtccgtcctgctggtgcttatcctgcgcgcctatctcgaacaggataaggatgtcgaactctcgggcgtattgaaaggttggcaggacaaacgtttgggacatttaatccaaaaggtgatagacaaaccggaagacgaatggaatgtcgacaaaatggtggcggctgccaatatgtcgcgcgcgcaactgatgcgccgtttcaaaagccgggtcggactcagcccgcacgcctttgtgaaccatatccgcctgcaaaaaggcgcgttgctgctgaaaaaaaacccggattcggttttgtcggtcgcactgtcggtaggctttcagtcggaaacgcacttcggcaaggcgttcaaacggcaatatcacgtttcgccgggtcaataccggaaagaaggcgggcaaaaataa

SEQ ID NO: 29833 - DNA, 2625 bp, Neisseria meningitidis
atgaaaacctccgaactgcgccaaaaattcctaaaattttttgaaaccaaaggccacaccgtcgtccgctcttccagcctcgtgccgcacgacgacccgaccctgctgtttaccaacgcgggcatgaaccagtttaaagacgtattcttaggtttcgacaaacgcccgtacagccgcgccaccaccgcgcaaaaatgcgtacgcgcaggcggcaagcacaacgacttggaaaacgtcggctacaccgcccgccaccacaccttctttgaaatgatgggcaacttctccttcggcgactacttcaaacgcgacgccatccacttcgcttgggaatttctgacttcccccgaatggctcaacatccctaaagacaaactgttggcgaccgtttacgcggaagacgacgaagcctacaacatctggttgaacgaaatcggtatgccgtccgagcgcatcgtccgcatcggcgacaacaaaggcgcgaaatacgtgtccgacaacttctggcaaatgggcgacaccggcccttgcggcccctgctccgaaattttctacgaccacggcgaagaaatctggggcggcattcccggcagccccgaagaagacggcgaccgctggatcgaaatttggaactgcgtatttatgcagttcaaccgcgacgaacaaggcaatatgaatccgctgcccaagccgtccgtcgataccggtatgggcttggaacgtatggccgccgtcatgcagcatgttcacagcaactacgaaatcgacttgttccaagacctgctcaaagccgttgcccgcgaaaccggcgcagctttcagcatggatgaacccagcctgaaagtcatcgccgaccacatccgctcctgctccttcctgattgcagacggcgtattgccgtccaacgaaggccgcggctacgtattgcgccgcattatccgccgcgccgtgcgccacggttacaaactgggtcaaagcaaaccgttcttccacaaactggtggccgatttggtcaaagagatgggcggtgcctaccctgaattgaaagaaaaacaagcacaaattgaagaagcattgaaaaacgaagaaagccgttttgcccaaacgctggaaaccggtatggctttgttggaaaacgcgctggccaaaggcggcaaaacactcgacggcgaaatcatcttcaaactctacgacacctacggcttcccatacgacttgactgccgacatctgccgcgaacgcaatatcgaactggacgaagcaggcttcgagcgcgaaatggaagcccaacgcgcacgcgcacgcgccgcccaaagcttcaaagccaacgcccaactgccttatgacggtcaagacaccgagtttaaaggttatagcgaacgccaaaccgaatccaaagtcctcgccctctacaaagacggcgagcaagtcaacgaattgaacgaaggcgacagcggcgcagtcgtcatcgactttaccccgttctatgcagaatccggcggccaagtcggcgatgtcggctatatcttctcaagcgaaaaccgctttgaagtacgcgatacccaaaaaatcaaagcggccgtgttcggacaattcggcgtacaaacttcaggccgtctgaaagtcggcgacagcgttaccgccaaagtggacgacgaaatccgcaatgccaatatgcgcaaccacagcgcaacccacttgatgcacaaagccctgcgcgacgtattgggcggacacgtcgaacaaaaaggctctttagttaccgccgaatccacccgtttcgacatttcccatccccaagcggtcactgccgaagaaatcgccgaagtcgaacgccgcgtcaacgaagccgttttggcgaacgttgccgtcaatgcagccattatgagcatggaagacgcgcaaaaaaccggcgcgatgatgctcttcggcgaaaaatacggcgaagaagtgcgcgtactgcaaatgggcggtttctctaccgaattgtgcggcggcacacacgtttcacgcaccggcgacatcggcctcttcaaaatcatcagcgaaggcggtattgccgcaggcgtgcgccgtatcgaagccatcaccggcctgaacgcactcaaatgggcgcaagagcaagagcgtttggtgaaagacattattgccgaaaccaaagcccaaaccgaaaaagacgtactggcgaaaatccaagcaggcgcggcacacgccaaagcattggaaaaagaattggcacgcgccaaagccgaactcgccgtccacgcaggcgcaaaactcttggacgacgcaaaagacttgggcgcagccaaactcgttgccgcccaaatcgaagccgacgcagccgccctgcgcgaaatcgtaaccgacctgaccggaaaatccgacaacgccgtgattcttttagcggcagtaaacgacggcaaagtctccctgtgcgccggcgtatccaaaccgttgaccggcaaagtgaaagcaggcgatctggttaaatttgcagccgaacaagtcggcggcaaaggaggcggccgtcccgacttggcgcaggccggcggcacggatgccggcaaattgcccgaaatgctggtaagcgtggaaagctggctttgtcagaaattaagttaa

SEQ ID NO: 29834 - DNA, 1620 bp, Neisseria meningitidis
atgaagcaaaatgttatgtttcttatcctagggcgaaattttttaaagattatcctatgctttagtttttttgtacctaaatttgcattggcatcagtaaatgttccgggtaaatttgatagggttgaagtttatgatgatggcagatatttaggtattcgaggttcagatgacaaaagaagaagaatttggaaaggtgtatttgatagagaatcgggaagatatttaacttcagaagctcaagatttaaaagttaggcatgtatctactggagcatcaagtacgggtaaagttagttcggttgtatcttcatcagtttcccgcgccggagtcttggcaggagtcggcaaacttgcccgcttaggcgcgaaattcagcacaagggcggttccctatgtcggaacagcccttttagcccacgacgtatacgaaactttcaaagaagacatacaggcacaaggctaccaatacgaccccgaaaccgacaaatttgtaaaaggctacgaatatagtaattgcctttggtacgaagacgaaagacgtattaatagaacctatggctgctacggcgttgacagttcgattatgcgccttatgtccgattacagcagattccccgaagtcaaagaattgatggaaagccaaatggaaaggcttgcccgtccgtattgggaaaagttaaggaatcgtcctgatatgtattattttaaaaactacaattttaaacgttgttatttcggattgaacggcggagattgtttagttgctaaaggtgatgatggtagaacttttatcagtttctcacttcaaggaaattcaaaatacaaagaagaaatggatgccaaaaagctggaagagattttatcgttgaaagtcgatgccaatcccgacaaatacataaaggcaaccggatatcccggttattccgaaaaagtagaagtcgcacccggaacaaaagtgaatatgggacccgtcacggacaggaacgggaatcccgttcaggttgtcgcaacattcggcagggattcgcaaggcaacaccacagtggatgttcaagtaatcccgcgtcccgacctcacacccggaagcgcggaagcaccgaacgcacagccgctgcccgaagtatcgcccgccgaaaaccccgcaaacaacccggcccccaatgagaaccccggcacgcgtcccaatcccgaacccgaccccgatttgaatcccgatgcaaatcccgatacggacggacagcccggaacaagccccgattccccggccgttccggaccgcccaaacggcagggacggcaaagatggcgggcttttgtgcaaattcttccccgacattctagcttgcgacaggctgcccgagcccaatccggcagaagatttaaatctgccgtctgaaaccgtcaatgtagagtttaagaaatccggaatctttcaagattccgcacagtgtcccgcccccgttacgttcactataaccgtgcttgattcaagcaagcagttcgcgttcagctttgagaacgcatgtaccatagccgaacggctaaggtacatgcttctcgcccttgcttgggcggttgccgcatttttttgtatccgcacagtatcccgtgaagtctag

SEQ ID NO: 29835 - DNA, 2298 bp, Neisseria meningitidis
atgcaaccgcacgctccacataccgattccaatacgctgatgctcggccgatacgccgaacgcgcctatctcgaatacgccatgagcgtggtcaaaggccgcgcgctgcctgaagtttcagacggccaaaagcccgttcagcggcgcattttgtttgccatgcgcgatatgggtttgacggcgggggcgaagccggtgaaatcggcgcgcgtggtcggcgagattttgggtaaataccacccgcacggcgacagttccgcctatgaggcgatggtgcggatggcgcaggattttaccttgcgctatcccttaatcgacggcatcggcaacttcggttcgcgcgacggcgacggtgcggcggcgatgcgttacaccgaagctcggctgacgccgattgcggaattgctgttgtccgaaatcaatcagggaacggtggatttcgtgccgaactacgacggcgcgtttgacgagccgctgcacctgcccgcccgcctgcctatggtgttgctcaacggcgcgtcaggcatcgcggtgggcatggcgaccgagattccgtcgcacaatttgaacgaagtgacgcaggcagcgattgcgctgttgaagaagccgacgctggaaaccgccgacctgatgcaatatattcctgcgcccgattttgccggcggcggtcaaatcatcacgccggcggacgaattgcgccggatttacgaaaccggcaaaggcagcgtgcgcgtgcgtgcgcgttatgaaatcgagaagctggcgcgcggacagtggcgcgtcatcgtaaccgagctgccgccgaacgccaattccgccaaaatccttgccgaaatcgaagaacaaaccaacccgaaaccgaaagcgggtaagaaacagctcaaccaagaccagctcaacaccaaaaagctgatgctggatttaatcgaccgcgtgcgcgacgagtccgacggcgaacatcccgtgcgactggtgttcgaaccgaaatccagccgcatcgataccgataccttcatcaacacgctgatggcgcaaacttcgctggaaggcaatgtgtccatgaacttggtgatgatggggctggacaaccgccccgcgcagaaaaacctgaaaacgattttgcaggaatggctggatttccgcaccgtaaccgtaacacgccgtctgaaattccgtttgaaccaagtggaaaaacggctgcacatcctcgaaggccgtctgaaagtctttctgcacatcgacgaagtgattaaagtcatccgcgaatcagatgacccgaaaaccgatttgatggcggcgttcgggctgaccgaaatccaagccgaagacattttggaaatccgcctgcgtcagttggcgcgtttggaaggtttcaaactcgaaaaagaattgaacgaattgcgcgaagaacaaggccgtctgaacatccttttgggcgacgaaaacgaaaaacgcaagctgattgtcaaagagatgcaggcggacatgaaacagttcggcgacgcgcgccgcacgctggtggaagaagccggacgcgccgtgctgacacaaaccaccgccgacgaacccatcacactgattctgtcggaaaaaggctggatacgcagccgcgccggacacaatctcgatttgagccaaaccgcgttcaaagaaggcgaccgcctcaaacaaaccctcgaaggcagaacgattttacccgtcgtcattctcgattcatcgggcagaacctacacccttgatgccgccgaaatccccggcgggcgcggcgacggcgtgccggtttcatccttgatcgagctgcaaaacggcgcgaaacccgttgcgatgttgacaggattgccggaacaacattatttattatcaagcagcggcggctacggcttcatcgccaaactgggcgatatggtcgggcgcgtgaaagcgggcaaagtggtgatgaccgcagacagcggcgaaaccgttttgccgccggttgccgtctatgcctcctcgttcatcaaccccgactgcaaaatcattgccgccaccaatcaaaaccgcgccctcgccttccccatcggcgaattgaaaattatggcgaaaggcaaagggctgcaaatcatcggattaaacgccggcgaatcgatgacgcataccgccgtttcttccgagccggaaatcctgattgaaagcgaaggcaggcgcggcgcagcgcacaaagaccgcatccccatctccctgcttgaggcaaaacgcggcaaaaaaggcaaactattacccatatcgggcagcctgaaacagctttcttccccgaaataa

SEQ ID NO: 29836 - DNA, 807 bp, Neisseria meningitidis
atgaatatgaaaaaatggattgccgccgcccttgcctgttccgcgctcgcgctgtctgcctgcggcggtcagggtaaagatgccgccgcgcccgccgcaaatcccgacaaagtgtaccgcgtggcttccaacgccgagtttgccccctttgaatctttagactcgaaaggcaatgtcgaaggtttcgatgtggatttgatgaacgcgatggcgaaggcgggcaattttaaaatcgaattcaaacaccagccgtgggacagccttttccccgccttgaacaacggcgatgcggacgttgtgatgtcgggcgtaaccattaccgacgaccgcaaacagtctatggacttcagcgacccgtattttgaaatcacccaagtcgtcctcgttccgaaaggcaaaaaaatatcttcttccgaagatttgaaaaacatgaacaaagtcggcgtggtaaccggctacacgggcgatttctccgtatccaaactcttgggcaacgacaacccgaaaatcgcgcgctttgaaaacgttcccctgattatcaaagaactggaaaacggcggcttggattccgtggtcagcgacagcgcagtcatcgccaattatgtgaaaaacaatccgaccaaagggatggacttcgttaccctgcccgacttcaccaccgaacactacggcatcgcggtacgcaaaggcgacgaagcaaccgtcaaaatgctgaacgatgcgttgaaaaaagtacgcgaaagcggcgaatacgacaaaatctacgccaaatattttgcaaaagaagacggacaggccgcaaaataa

SEQ ID NO: 29837 - DNA, 1641 bp, Neisseria meningitidis
ttgtctttaccgtacaaacgctggcactatttcaacctgataaaaaacagccttcaaaaaggttgtttaaaacagcagcagacacttaccgccacaaccttgaaaaggaacacaatcatgaccgtcatcaaacaggaagactttatccaaagcatttgcgatgccttccaattcatcagctactaccatcccaaagactacatcgacgcgctttataaggcgtggcagaaggaagaaaaccccgccgccaaagacgcgatgacgcagattttggtcaacagccgcatgtgtgccgaaaacaaccgccccatctgccaagataccggtatcgcgaccgtgtttttgaaagtcggtatggatgtgcaatgggatgcagacatgagcgtcgaagagatggttaacgaaggcgtgcgccgcgcctacacttgggaaggcaatacgctgcgcgcttccgttctcgccgaccccgccggcaaacgccaaaataccaaagacaacacgcccgccgtcatccatatgagcatcgtgccgggcgacaaagtcgaagtaacctgcgcggcaaaaggcggcggttctgaaaacaaatccaaactcgccatgctcaacccttccgacaacatcgtcgattgggtattgaaaaccattccgaccatgggcgcgggctggtgtcctcccggcatcttgggcatcggcatcggcggtacgcccgaaaaagccgtgttgatggcgaaagaatccctgatgagccacatcgacatccaagaattgcaggaaaaagccgcgtccggcgcggaattgtccaccaccgaagccctgcgcctcgaactctttgaaaaagtcaacgcgctaggcatcggcgcgcaaggcttgggcggtctgaccaccgtgttggacgtgaaaatcctcgattacccgacccacgccgcctccaaaccgattgccatgattccgaactgcgccgccacccgccacgtcgaatttgaattggacggctcaggccctgtcgaactcacgccgccgcgcgtcgaagactggcccgatttgacttacagccccgacaacggcaaacgcgtcgatgtcgacaagctgaccaaagaagaagtggcaagctggaaaaccggcgacgtattgctgttgaacggcaaaatcctcaccggccgcgatgccgcacacaaacgcctcgtcgatatgctcgacaaaggcgaagaattgcccgtcgatttcaccaaccgcctgatttactacgtcggccccgtcgatccggtcggcgacgaaatcgtcggcccagcaggtccgaccaccgccacccgcatggacaaattcacccgccaaatgctcgaacaaaccgacctcttgggcatgatcggcaaatccgagcgcggcgcggccacctgcgaagccatcgccgacaacaaagccgtgtacctcatggcagtcggcggcgcggcgtatctcgtggcaaaagccatcaaatcttccaaagtcttggcgttccccgaattgggcatggaagccatttacgaatttgaagtcaaagacatgcccgtaaccgtcgccgtagacagcaaaggcgaatccatccacgccaccgccccgccccaatggcaggcgaaaatcggcatcatccccgtcaaatcttga

SEQ ID NO: 29838 - DNA, 1413 bp, Neisseria meningitidis
gtgaaaatcctcattttaggcaacggacaggtaggttctaccgtcgcacaaaaccttgccgccatacccaacaacgacgtaaccgttatcgacatcgacgaaaaagcattgcaggaaacaggcagccgcctcgatgtccaaaccgttttcggcaacggcgcatcccccttcacattagaacgcgccggcgcggaagatgccgacttgctgctcgcgctctcccgcagcgacgaaaccaacatcgtcgcctgcaaagttgccgccgacctgttcaacatccccggccgcatcgcgcgcgtccgttccagcgaatacctcgaatacctcagccccaagctcgaaaacaacgaaaacggcagcctttccatattcggcataaccgaaaccatcagccccgaacagctcgttaccgaacagcttgccggcctgatagactgcccgggcgcattgcaggttttacgttttgcagacgaccgcgtgcggatggtcatcatacaggcgcggcgcggcggactgcttgtcggacgcagcattgccgacatcgcccaagatttgcccgacggggccgactgccaaatctgcgccgtttaccgcaacaaccgcctcatcgtccccgcgccgcaaaccgtcatcatcgaaggcgacgaaatcctatttgccgccgccgccgaaaacatcggcgcggtcatacccgaattgcgccccaaagaaaccagcacccgccgcatcatgattgccggcggcggcaacatcggctaccgtctcgccaagcagctcgaacacgcatacaacgtcaaaatcatcgaatgccggccgcgccgtgccgaatggatagccgaaaacctcgacaacaccctcgtcctgcaaggttcggcaaccgacgaaaccctgctcgacaacgaatacatcgacgaaatcgacgtattctgcgccctgaccaacgacgacgaaagcaacattatgtccgcccttttggcgaaaaacctcggcgcgaagcgcgtcatcggcatcgtcaaccgctcaagctacgtcgatttgctcgaaggcaacaaaatcgacatcgtcgtctccccccacctcatcaccatcggctcgatactcgcccacatccggcgcggcgacatcgttgccgtccaccccatccggcgcggcacggcggaagccatcgaagtcgtcgcacacggcgacaaaaaaacttccgccatcatcggcaggcgcatcagcggcatcaaatggcccgaaggctgccacattgccgccgtcgtccgcgccggaaccggcgaaaccattatgggacaccataccgaaaccgtcatccaagacggcgaccacatcatctttttcgtctcgcgccggcgcatcctgaacgaactggaaaaactcatccaagtcaaaatgggctttttcggataa

SEQ ID NO: 29839 - DNA, 276 bp, Neisseria meningitidis
gtgaataaatccgaattaatccaagccatcgccgacgaggcggaattgagcaaacgcgctgcggcggagtttgtcaatgcgtttgtcagcgtggtaacgcaagaactgaaagacggaaacgacgttacgctggtcggcttcggcacgttccacgccgcccaatccgccgagcgtcagggacgcaatccgaaaacgggcgaaccgctgaccatcgcggcgcgcaaaacacccaagttccgctcgggcaaggcgttaaaagatgcggtaaacggttaa

SEQ ID NO: 29840 - DNA, 558 bp, Neisseria meningitidis
atggatgctttaaaattattgacgaaccgccgatcttccaaaaagctgaagcaccccgcccccgatgcggcggagttggaacaaatatttcaggcggcaacccaagttcccgatcacggcaatatgcgccccttccgttttaccgtgattcaaggcgaggtaggattgcaacgttttcgcgatgtgttgaagcaaacggttgccgaattgaatttcggcgacgatgcgatgaaaaaggcggaaaaagtgggcaatatggcgccgatggttatcggggtaacgtttgcgccgaaccgcgatgtgcctaagccgaaaccggaatgggaacagatgctgacggcgggttgtgcggcgtatgcgctgcaactggcggcaacggcgcaaggtttcgacaatgtctggattacggggatgtgggtcaacagccccctgttgcgtgaggctttcggatgtgcggataaggataaaatcatcgggctgatgatggtcggcacgccgacagaggaagtgcataagcccaagaataccgatttggaagcgtttgtcagtcattggtaa

SEQ ID NO: 29841 - DNA, 1518 bp, Neisseria meningitidis
ttggagatgttcaaaatgagtcgtgaaatgttacagctggcagaagcactggcaagcgaaaaaaacgttgatgcggaagtcgtcttccaagcactggaattcgccctgtctaccgccgccaagaaaaaggcagaccgcgaacacatggacgtgcgcgtccaaatcaaccgcgacaccggcgaataccaaaccttccgccgctggctgattgtcgccgatgaagactatacctatcccgatgtcgaaaaaaccatcgaggaaatccaagaggaaattcccggcactaccatccaaatcggcgaatactacgaagagcagctgcccaacgaaggcttcggccgccaagccgcgcaaaccgccaaacaaatcatcctgcaacgcatccgcgatgccgagcgcgagcagaatctgaacgagtttctcgccgtcaaagaagacatcgtgtctggcacggtcaaacgcgtcgaacgccacggcatcatcgtcgaagtcgttgccggcaaactggacgcgctgattccgcgcgaccaaatgattccgcgcgaaaacttccgcagcggcgaccgcatccgcgccctcttcctgcgcgtcgaagaaatcggcaacaccggccgcaaacaagtcatcctgagccgtacttccggcgatttcctcgtcaaactgtacgccaatgaagtacctgaaattgcagacggcatgcttgaaatccgcgctgtcgcccgcgacccgggccagcgtgccaaagtcgccgtcaaagccaacgaccagcgcatcgatccgcaaggcacctgtatcggcgttcgcggttcgcgtgtcaatgccgtcagcaacgaattgtccggcgagcgcatcgacgttgtcctttggtcgcccgagcctgcccaattcgtcatgagcgcgctctcacccgccgaagtcagccgcatcgtcatcgacgaagacaaacacgccgtcgatgtcatcgttgccgaagaccagctcgcgctcgccatcggacgcggcggtcaaaacgtgcgccttgcttccgacctgaccggctggcagctcaacatcatgacttccgccgaggcagacgaacgcaatgcggcagaagatgccgccatccgccgcctgtttatggatcacttgaacgtggacgaagaaaccgccgacgtactggttcaggaaggttttgcaaccttggaagaagtcgcctatgttcctgccgccgaactgcttgccattgaaggatttgacgaagaaatcgtcgatatgctccgcaaccgcgcccgcgatgccatcctgaccatggcgattgccgccgaagaaaaactgggcgaagtgtccgacgatatgcgcaacctcgaaggcatagatgccgatatgctccgcagccttgccgaagcaggcattaccacccgcgacgacttggcagagcttgctgtggacgaactgattgaaatcaccggtgtaaacgaagaaaccgcaaaagccgtcatcctgaccgcacgcgaacactggtttaccgaagacaaataa

SEQ ID NO: 29842 - DNA, 2889 bp, Neisseria meningitidis
atgagtaacacaaccgtagaacaatttgccgccgagctgaaacgccccgtcgaagacctgttgaaacagttgaaagaagccggcgtcagcaaaaacagcggcagcgattccctgacgctggacgacaaacagcttctgaacgcctacctgaccaagaaaaacggcagcaacggcggcaccatcagcatccgccgcaccaaaaccgaagtcagcaccgttgacggcgtaaaagtcgaaacacgcaaacgcggacgcactgtcaacattccttctgccgaagagttggcagcacaggtaaaagccgcccaaacccaagccgcacctgtccggccggagcagacggcagaagacgcggcaaaagcccgagccgaagctgccacacgtgcagaagcccgtgccaaggcagaagcggaagcggcaaaactgaaagcggcaaaagcaggcaacaaagccaaacctgccgcgcagaaacccaccgaagcaaaagccgaaaccgcacccgttgcggcggaaaccaaacccgccgaagaaagcaaagcggaaaaagcccaagccgacaaaatgccgtctaaaaaacccgccgagcccaaagaaaaagccgccaagccgaaacacgagcgaaacggcaaaggcaaagatgccaaaaaaccggcgaaacctgccgcacctgccgtgccgcaacccgtggtcagcgcagaagaacaggcgcaacgcgatgaagaagcacgccgtgccgccgcacttcgcgcccaccaggaagccctgttgaaagagaaacaggaacgccaggcacgccgcgaagccatgaaacaacaggcagaacaacaggcaaaagccgcacaggaagccaaaaccggcagacagcgtcccgccaaacctgccgagaaaccgcaggcagccgcgccggccgtcgaaaacaagcctgtcaatccggcaaaagcgaaaaaagaaaaccgccgcaaccgcgatgacgaaggtcaaggccgcaacgccaaaggcaaaggcggaaaaggcgggcgcgaccgcaacaatgcacgcaacggcgacgacgagcgcgtacgcggcagcaaaaaaggcaaaaaactcaaactcgagccgaatcaacacgccttccaagcaccgaccgaacctgtcgttcatgaagttttggttcccgaaaccattaccgttgccgatttggcgcacaaaatggcggtcaaaggcgtggaagtggtcaaagccctgatgaagatgggcatgatggtaaccatcaaccaatccatcgaccaagacaccgccctgatcgtggtggaagaactcggccatatcggcaaacctgccgcagcggacgatccggaagcattcttggacgagggcgcggaagcggtggaagccgaagcattgccgcgtccgccggtggttaccgtgatggggcacgtcgaccacggtaaaacctcgctgctggactacatccgccgtgccaaagtggtacagggcgaagcaggcggcattacgcagcacattggcgcgtaccacgtcaaaacgccgcgcggcgtgattactttcttggacaccccgggacacgaagcctttaccgctatgcgcgcacgcggtgcgaaagcaaccgacatcgtgattcttgtggtcgcggccgacgacggcgtgatgccgcaaaccatcgaagcgattgcccacgccaaagctgcgggtgtaccgatggtggttgccgtcaacaaaatcgataaagaagccgccaacccagagcgtatccgccaagagctgaccgcacacgaagttgtgcctgacgaatggggcggcgatgtacagtttatcgacgtttccgctaaaaaaggcctgaacatcgatgcattgctcgaagccgtcttgctcgaagctgaagttttggaactgactgccccagtcgatgcacctgccaaaggtatcattgttgaggcacgtttggacaaaggccgcggcgcggttgccacattactggttcaaagcggtacgctgaaaaaaggcgatatgctgctggccggtaccgcgttcggcaaaatccgcgcgatggtcgatgaaaacggcaaagccatcaatgaagccggcccgtccatccccgtcgaaatcctcggcttgtccgacgtaccgaacgcaggcgaagacgcgatggtgttggcggacgagaaaaaagcgcgcgaaatcgccctcttccgccaaggcaaataccgcgacgtacgccttgccaaacagcaggcggcaaaactggaaaatatgttcaacaatatgggcgaaacccaagcccaatctttgtcggtcatcatcaaggcagacgtgcaaggttcttacgaggctttggcgggcagcctgaaaaaactgtccaccgacgaagtgaaagtggacgtgttgcacagcggcgtgggcggcattaccgaatcggatgtcaacttggccatcgcgtccggggcgttcattatcggctttaacgtgcgtgcagatgcctcttcgcgcaaacttgccgaaaatgaaaacgtggaaatccgctactacaacatcatctacgatgccatcgacgacgtgaaggcggcgatgagcggtatgctttccccggaagagaaagaacaggttaccggcacggtcgaaatccgtcaggtcatctccgtttccaaggtcggcaacattgcaggctgtatggttaccgacggtgtggtcaaacgcgattcccatgcccgcctcatccgcaacaacgtggttatccataccggcgagctgtcttctttgaaacgctacaaagacgacgtcaaagaagtccgtatgggctttgagtgcggcctgatgattaaaggctacaacgaaattatggaaggcgaccaactcgaatgtttcgacatcgtcgaagtggcacgcaccctgtga

SEQ ID NO: 29843 - DNA, 627 bp, Neisseria meningitidis
atgtatacaggcgaacgcttcaatacttacagccatttgagcggtttgattctggcggcggcaggtttggcgctgatgctgctgaaaaccataggacacggggacggctaccgtatcttcagcgtatcggtttacggcatcagccttcttctgctctatttgagttcctcgctgtaccacggaattgcagccggaaaactgaaaagcattttgaaaaaaaccgaccactgcatgatttatgtgctgattgccggaagctacacaccgtttgcactggtttctttgagaaacgggccgggctggacggtattttcactgtcctggctgctggcggctgcaggaatcgcacaagaactcaccattggacggaaaagcgaaaaacgactgctgtctattgcgatttatatcgtaatgggctggatggtcttggcggtaatgaaatccctgacagcctcactcccgccggcaggactggcttggctggcggcaggcggtatgctgtacagcgtcggcatttactggtttgtaaacgatgaaaaaatccgacacgggcacggaatctggcatctgttcgtattgggcggcagcatcacccaatttgtcagcgtgtacggttacgtaatctga

SEQ ID NO: 29844 - DNA, 1059 bp, Neisseria meningitidis
atgcgccctttgaacgtgcagatcaggttgggcaaccttaggcacaattatcggattttgaaggaaatgcacggaggcaaactgttggcggtagtgaaggccgacgcatacggacacggtgcggtcagatgtgctttcgcgctggcagacttggcagacggctttgccgtggcgacaatcgacgagggaatcaggctacgggagagtggcattacccatccgattgtccttttggaaggcgtatttgaagcatcagagtacgaagcggtcgaacaatactcgctctggccggcagtcggaaaccaatggcaacttgaggctttgctttcccgccattggaaaaaacctgtcaaggtctggttgaaaatggattcgggaatgcaccgtaccggatttttccctcatgattacgcttcggtatatgcggcattgaagcagtcggaatatgtggacagtattgtcaaattctcgcatttctcctgtgcggacgaacccgaaagcggtatgacggaaatacagatggaagcattcgatttgggtacggaagggctggaaggcgaagaaagccttgccaactccgccgctattttgaatgttcccgaagcacgcagggactgggggcgagccggcttggcgttgtacggcatttccccgttcggaggcagcgatgacaggctgaaacccgtgatgaggctttccacccgtattttcggcgaacgcgttttacagccgcactcccctatcggttatggcgcaacattttataccagtaaatctacgcgcgtcggcctgattgcctgcggttatgcggacggttatccgcgccgcgccccaagcaattcccccgtcgccgtcgacggtaaattgacccgggtcatcggcagggtctctatggatatgatgaccatcgagctggacgcttcgcaagaaggtttgggacacgaggtcgaactgtggggcgatacggttaatatcaataccgttgccgaagcggccggaaccatcccttacgaattgatgtgcaatatcaaacgtgcaaaattcacttatatcgagtaa

SEQ ID NO: 29845 - DNA, 2178 bp, Neisseria meningitidis
atgttccgaaagccgtctgaaatgcctgtccctcaacccaccgcaccttacgaccatttaactgccgaagcacgcaccttgcttttccgtaccgcttcctatctcaagcctgaagaacaggttgagctcgagaaggccgttgcctatgcatttcacgctcatgacggacaaacccggaaaagtggcgaaccatacattacgcatccaattgccgttgcgacgcagctcgccctttggcatatggacatacagggtctgtgtgcaggcgtgatgcacgacgtattggaagatacgggcgtgacaaaaggggaaatggcggcggtgttcggcaatacgattgccgagatggtggacggtctgtccaaactcgaaaaactcaaatttgaagatcatgcggaacatcaggcggagagtttccgcaaactgattttggcaatgaccaaagatgtgcgcgtgattgtcgttaaacttgccgaccgtctgcataatatgcggacactcggttcgatgcgcccggacaaacgccgccggattgcaagggaaacccttgaaatctatgcacagattgccaaccgtataggtttgaataacgcatatcaagagcttcaggatttatcgttccaaaacctgcatcccaaccgctacgagactttaaaaaaagcgatggacaagagccggaagaaccggcaggacgttgtcggcaaagtgttgcgcgcattcggccagcggctggtgggtgtgaatatagaggccaaaatcaaaggcagggaaaaaaacctgtacggcatccatcagaaaatgatggcgaaaaagctgcgctttgccgaggttatggatatttacggtttccgcgtcattgtcaacagcattccagcctgttatgccgcactcggcgcattgcacaccctctatcagcccaagcccgggcggttcaaagactatatcgccattccgaaaagcaacgggtatcaaagtctgcatacgactttggtcggtccttacggcttgccgattgaagttcagatacgtaccaaggaaatggatgctgttgccgaaggtggaatcgccggacattggagctataaatcatattctaagacggtcgatcaggcggtgcttcacacaaaccggtggctgaaaaatatcttagatttgcaggcaagcagtgccaatgccattgagtttctcgaacacgtcaaagtcgatttgtttccgaacgaaatctacatccttacgccaaaaggaaaaatcctaactttgcccaaaggggcaacgcctgtcgattttgcttatgcggtgcataccgatatcgggcacaaaaccgttgccgcacgtatcaacaatatcatgatgccgttgcgtacgaagctcaaaaccggcgattccgtcgaaattattacatccgaacatgccaaacccaatcctgcatggttgaatttcgccgtgtcaggcagggcgcgcagtgccatacgccaatatattaaaaaccttaaccggcacgatgcggtcgttttgggagagagcctcttacaaaaagccctgtccagtttgctgcccaaagatgtcctgctttcagacggcatcaaagaaaaataccttgccgatctcaacgacaaacagacttcatttgaggaagtgctgtacaacgtcggtatggggcataccctgcctgtttatgtcgccatgcacattgccgagttggcaggggagcatttcggtagcgaggtcaggctcagttccattaaagtcgatggtcaggaaagcgggcatattcattttgcagagtgctgccaccctgttcccggtgattccatccgtttgctgttggttaagggaaaaggcatgattatccatagggatacctgcccgacgttgttgaagtccgatcccgaacagcagctggatgcagactgggaaaatatgaacgggcagaactaccgtgtcgggcttcaagtccaatcggaagacagccacggcttgctggcattaatggcgcaagcgatttccgattccggtgcggacattgagtcggtcgaaacaccgtctaaatcccagtcgggaacggaaggttttgtcgaattcaaattcttattgaaagtcaagaatctgaatcaattgaatcagattattcaaaatctgcatagtattccatatatccgcaaagtcatcagaagttga

SEQ ID NO: 29846 - DNA, 1356 bp, Neisseria meningitidis
atgaaagcacccgaactcttattgcccgccggcggattggaaagaatgcgcaccgcctacgactacggcgcagatgccgtttatgccggcagcccgcgttactcactgcgcgcccgcaacaacgaatttgccaaactcgacgttctcgagcaaggcattaaagaagcgcacgagcgcaacaaaaaattctttttgaccgtcaacaccctgccgcacaactccaaactcaaaaccttcgtttccgatatggagccgctgattgccatgaaacccgacgcgctgattatggcggatccgggtttgattatgaccgtgcgcgaaaaatggccggaaatgccgatccacttgtccgtacaggccaacaccaccaactactggggcgtgaaattctggcagaatatcggcgtcgaacgcatcatcctgtcgcgcgaattgagtatggaagaaatcgccgaaatccgccaacaatgccccgacatcgaactcgaagtcttcattcacggcgcattgtgcatcgcctactccggccgttgcctactctccggctacttcaaccaccgcgaccccaaccaaggcacctgcaccaactcctgccgttgggactacaaagtccacaacgctacggaaaacgatgcgggcgatgcccagcttctgcaaggttttaactttgaaaaagcccaagaagaagccaaccaaaactttgaaggcatcaacggtcaaaaacgccatccctacgccgacaaagttttcctgattgaagagtccaaccgcccgggcgagatgatgccgattatggaagacgaacacggcacttacatcatgaactccaaagacctgcgcggcattgaagtggttgagaaactcgccaaaatcggcgtggacagcctcaaagtcgaaggccgcaccaagtcgctctattatgtcgcacgcgtcgcccaatcctaccgcaaagcgattgacgatgccgtcgcaggccgtccgtttgattacagcctgttgagcgaactcgaaggccttgccaaccgcggctacaccagcggcttcctcgaacgccaccaaacccaagactatcaaaactacctcagcggccattccaccgccaaacaaagccaatacgtcggacacgttaccgaaatcgacaaaaacggctgggcgaccatcgaagttaaaaaccgcttcgccgtcggcgattcactcgaaatcatccacccgaacggcaaccaaaccatcaaattggaacaaatggcccgaaaaggccagcctgtcgatgtcgcacccggcaacggcattcaggtcaaaatccccgatatgcagggcaaagaaaaagccctcatcgcacgcgtgttgaacccctga

SEQ ID NO: 29847 - DNA, 642 bp, Neisseria meningitidis
atgccatctgaaaaaccaatgaacagaagaaccttcctcctcggcgcaggcgcgttgctccttaccgcctgcggcagaaaatccgcccgaacccacgccaaaattcccgaaggaagcaccgtacttgccttgggcgattcgcttaccttcggctacggcgcaaaccccggcgaatcctaccccgcgcaactgcaaaaactgacgggttggaatattgtcaacggcggcgtatcgggcgatacatccgcccaagccctgtcgcgcctgcccgcgctgttggcacgcaaacccaagcttgtgattgtcggcataggcggcaacgactttctgcgcaaagttcccaaggagcagacccgcgccaatatcgcgaaaatcatcgaaaccgtgcagaaggaaaacatccccgccgtcctcgtcggcgtgccgcacattaccttgggcgcgttgttcgggcatttgagcgatcatccgctgtatgaggatttgtccgaggaatacggcattccgctgttcggcggcgcgtgggcggaaattttgggcgataataatctgaaatccgaccaaatccacgccaacggcaaaggctatcggaaatttgccgaagatttgaatcaatttttgagaaaacaggggtttagataa

SEQ ID NO: 29848 - DNA, 2853 bp, Neisseria meningitidis
atgaaactgtccgaactgttcaaccccaacgaatttgccgcgcgccatttgagtttcggcgacgaagcggcgttgcttgccgctgtcgacgagaagagcatggacgaatttgtcggcaataccgtgccgcaaagcatccgtatgccgtccgaactcgatttgcccgaggccttgaccgaagcggacgcgttggcaaaattgaaaggcattgcgtcgaaaaacatgatcaacaaatcctatatcggtttaggctattacccgacccgcgtgccgaacgtgattttgcgtaacgtattggaaaatccgggttggtacaccgcctacacgccgtatcaggcggaaattgcccagggtcgtttggaagctttgttgaacttccaacaagtgtgcatcgatttgaccggttttcccgtggcgggcgcgtctttgctggacgaggcaactgccgccgccgaagcgatggcgatggcgcaccgcgtgggcaaggtaaaatccgagcgtttcttcgtggacgagcgcgtgtatccgcagactttggacgtgatgaaaacccgcgccaaatatttcggctttgaactggtggtcggcgattttgcccaagccgacgaaggcgaatacttcggcgcgctgttccaatacgtcggcaaagacggcgatgtgcaagacttgcaggacgttatcggccgtctgaaagcaaaaggcacgatcgtggccgttgccgccgacatcatgagtttggttttgctgaagtctccggctgaattgggcgcggacattgcgttgggcaacactcaacgcttcggtgtgccgatgggcttcggtggtccgcacgctgcttatttcgcgtttaaagacgagttcaaacgttccgctccaggccgcatcatcggcgtatccaaagacgcatcgggcaaacctgccttgcgcatggcgttgtccacccgcgagcaacacatccgccgcgaaaaagcgacatccaatatttgtaccgcgcaggcattgctggcgaacttggccggtatgtatgccgtttaccacggccccaaaggcgtgaaacgcatcgccgaccgcattcacgcgctggcttctgcctttgccgatgcgctggtttcagacggcctgaatgtggttcataaggtcttcttcgataccgttaccgtcgatttcggcaacaaagagaaagcagaccaagtgtttgccgctgctttggaatcgggctataacctgcgccgcgttaacgatactcaagttgcggctgcattccacgaaacatcggcatgcgaagatttggttgatttgtaccgcgcgtttaccggcaaggatacgttcgcatttgccgatgatgtcaaaggccgtctgaatgcagaattgctgcgtcaggacgatattctgcaacatcctgtgttcaacagttaccacaccgaacacgaaatgctgcgctacctgaaaaaactcgaagaccgcgatttggcgatgaaccgcagcatgatttcgctcggtagctgcaccatgaagctcaatgcgactgcggaaatgctgccgattacttgggcggagttctccgacatccatccctacgctcccgaagcgcaaaccgcgggctaccgcgaattgctcgccgatatggaaaacagcctgaaagccatcaccggctttgacgcgatttccctgcagccgaactccggcgcacaaggcgaatataccggtatgctctctatccgccgttatcaagaagcccaaggcgaagcgcaccgcaacatctgcctgattccaaaatcagcccacggtaccaaccctgcgactgcggccatgctgggcttgaaagtcgtcgttgtcgacaccgacgaacacggtaacgtcaacattgacgatttgaaagccaaagccgagcaacaccgcgacgctttgtctgccatcatgattacctatccgtccacccacggcgtgtacgaagaaggcatccgcgacatctgccgcattattcacgagaacggcggacaggtttacatggacggcgccaacctcaacgcccaaatcggcatcatgcagcctgccgaggtcggcgcggacgtgttgcacatgaacctgcacaaaaccttctgtatccctcacggcggcggcggcccgggcatgggtccgattggcttgaaagcccatctggctccgttcgcaccgggacacactttgaccgacacccacagcgcaagtgccgggcaaactgccgtggctgccgcagcatatggttctgcgtccatcctgccgattacttggatgtacctgaccatgatgggcaaacaaggcatggaacaggcgacacgctgggcattgctcaacgccaactacgtcgccaaacgtctgagcgaagactatccgatcctgtatacaggcaaaaacggccgcgtcgcgcacgaatgtatcgtcgacttgcgtccgctcaaagccgaaagcggcattaccgaaaccgacatcgccaaacgcctgatggactacggcttccacgccccgaccgtctccttccccgttgccggcacgctgatgatcgaaccgaccgaaagcgagagcaaagccgaactcgaccgcttcatcgccaccctgaaatccattcgccgcgaagtgcagaaagtcatcgacggcgaatggccgaaagacgataatccgctggtgaatgctccgcacaccgccgcagatataaccggcaactgggcgcatccgtattcccgcgaagaagccgtcttcccgttgccgttcgtccgcgaacacaagttttggcccttcgtcaaccgcgtggacgacgtgtacggcgaccgcaatctcgtgtgcagctgcccaccgatggaaaattatgaagactga

SEQ ID NO: 29849 - DNA, 1101 bp, Neisseria meningitidis
atggcaggcaacactttcggacaactcttcaccgttaccaccttcggcgaaagccacggcgcgggtttgggctgtatcatcgacggctgcccgcccggcttggaattaagcgaagcggatatccaatttgacctcgaccgacgcaaacccggcaccagccgccacgttacccaacgccgcgaagccgaccaagtcgaaatcctctccggcgtattcgaaggcaaaaccaccggcacgcccatcgccctcttaatccgcaataccgaccagcgcagcaaagactacggcaacatcgccaccagcttccgccccggccacgccgactatacctattggcacaaatacggcacgcgcgactaccggggcggcggcaggagttccgcccgcgaaaccgccgcccgcgttgccgccggagccgttgccaaaaaatggttgaaagaaaaattcggcacggaaatcaccgcctacgttacccaagtcggcgaaaaagaaatccggtttgaaggctgcgaacacatttcccaaaatcctttttttgccgccaaccatagccaaattgccgagctggaaaactatatggacagcgtgcgcaaatccttggattccgtcggcgcgaagctgcatattgaagccgccaacgtccccgtcggcttgggcgaacccgtattcgaccgcctcgatgccgaaatcgcctacgccatgatgggcatcaacgccgtcaaaggcgtggaaatcggcgcaggttttgacagcgtaacgcaacgcggcagcgaacacggcgacgaactcaccccgcaaggcttcctgtccaaccactcaggcggcatcctcggcggcatcagcaccggacaagacatccacgtcaatatcgccatcaaacccaccagctccatcgccaccccgcgccgcagtatcgacatcaacggcaaccccatcgaactcgccacgcacggcaggcacgacccctgcgtcggcttgcgcgccgcgccgattgcagaagctatgctggcattggttttaatcgaccacgccctgcgccatcgcgcgcaaaatgcggatgttcaggttaatacgcccgacattaccctttcaaacaaataa

SEQ ID NO: 29850 - DNA, 1986 bp, Neisseria meningitidis
atggctaaaaacaaccaatacagcgaatccagcatcaccgtcctcaaaggcttggagccggtcaaagaacgtcccggcatgtacacccgcaccgacagcccgacccacatctgtcaggaagtgattgataatgcggcggacgaggcgttgggtggtttcgcgactgcaatcgacgtgcaaattcatgaagacggttcgctttccgtccgtgataacggccgcggtattcccgtcggcctgcaccctgaagaaggcgtacccgtagtcgaactcgtgttcacccgtctgcacgcgggcggcaagttcaacaaaaaagacggcggcagcgcgtatgccttttcaggcggactgcacggcgtgggcgtatccgtcaccaacgccctctccacccgccttgaggtaacggtcaaacgtgaaggcaaaatccaccgtatcgtgtttgccggcggcgacgtggtcgaaccgttggcacaagtgggcaaatgcgccgtcaaagacagcggcaccgaagtgcgcgtctggccggacggcaaatattttgaaagcccgaattacagcattcccgaactcgaacgcctgctgcgtgccaaagccgtgctgctgccgggtgtgcgcgtttccctgacccgtccggtcaaaggcgaagacgaagcgcacacccaaacctggcattaccccgacggcctgaaaagctatctgaccgacctgattgccgacgcgcaggaagccgtaccgctgttctcttgcgaaaactacatttcagacgaacacaacggcgatttcagcatcggcgaaggcgccgcctttgccctgacttggctggaagaaggctcgtgtgccaacgaaagctatgtcaacctcatccccaccccgctgggcggcacgcacgaagcgggcttgaaacaagccgtgttcaacgccgtcagcaacttcatcaacctgcacaacctcttaccgcgcggcgtgaaagtgcaaagcgacgacgtgttcggcaaaactgcctttgtcctctctgcccgtgtcctcgacccgcagttccaaggtcagaccaaagacaaactgaccaaccgcgacgcgctgaaactcgttgctaccgtatcgggcgaccctttggaactgtggctgaaccaaaacgtggacttcggcaaaaaaatcgccgaactcgccatccgtcaggcacaggcgcggatgcgttcggttaaaaagattgaaaagaaaaaaggcagcggcgtcgccgtcctgcccggtaagctgaccgactgcgaaagcgaagacatccgcgaaaacgaactcttccttgtcgaaggcgattccgccggcggctccgccaaactcgctcgcgacaaagccacccaggccatcctgcccctgcgcggcaaagtgctcaacagctttgaagtccaccccgaccagctcttcggcaacgccgaaatccacgacatttcagttgccatcggcgtcgatccgcacggcatcaacgaccatcccgatttaagcggcctgcgttacggcaaaatcgccatcctgtccgatgccgacgtggacggctcgcatattcaagttttgctgctgaccctgttctaccgccacttcccgaaactggtcgctgacggacacatctacgtcgcccagccgccgctgttccgcgtagatgtcaacgcacaaggtaaaagcaaacccgcccgcaaattctacgccctcgaccaaaacgaacttgacggcattttagagcggctgcaaaaagaaggcgttaaagaaactgcttattccatcagccgtttcaaaggtttgggtgagatgaacccagaccagctcaaagatactaccatgcaccccgacacccgccgcctgttgcaggtacaaatccccgaaggcgcggatgacgagacgcgcgacatcttcttcaaactgatgggcaaaggcgaagccgccgcccgccgcgcttggatggaacgcgaaggcgatacggcggaattggatatttga

SEQ ID NO: 29851 - DNA, 1296 bp, Neisseria meningitidis
atgttagatatccaattgctccgcagcaacaccgccgccgttgccgaacggcttgcacggcgcggttatgactttgataccgcacgttttgacgcactggaagaacgacgcaagtccgttcaggtgaaaaccgaagaactacaagcctcgcgcaacagcatttccaaacaaatcggcgctctgaaaggtcagggcaaacatgaagaggcgcaggtggccatggatcaagtcgcccaaatcaaaaccgatttggaacaggctgccgccgatttggatgccgttcaaaaagaattggacgcatggttgttgagcattccgaacctgccgcatgaggacgtgcctttcggtaaggatgaaaccgaaaacgtcgaagtccgcaaagtcggcacgccacgcgaatttgactttgaaatcaaagaccatgtcgatttgggcgaacctttgggtttggatttcgaaggtggcgcgaaactttccggcgcacgatttaccgtgatgcgcggacaaatcgcccgcctgcaccgcgcgctggcgcaattcatgctcgatacgcacacgctgaaacacggctacaccgagcattacacaccctatatcgtggacgacaccaccttgcaaggcacgggtcagctgccgaagtttgcagaagatttgttccacgttacccgtggcggcgacgagagcaaaaccacgcaatatctgattccgacagctgaagttaccctgaccaataccgttgccggcagcattatcccgtccgaacaactgccgctgaagctgaccgcgcattcgccctgtttccgcagcgaggcgggttcgtacggcaaagacacgcgcggtctgattcgccagcaccagttcgacaaagtggaaatggttcaaatcgttcatcccgaaaaatcatacgaaacgctggaagaaatggtcggccatgccgaaaacatcctgaaggctttggaactgccctaccgcgtgattaccctgtgtaccggcgacatgggcttcggcgcaaccaaaacgtatgatttggaagtttgggtaccggcgcaaaatacctaccgcgaaatctcaagctgttccaactgcgaagatttccaagcccgccgcatgaaggcgcgtttcaaagacgaaaacggcaaaaaccgcttggtacatactttgaacggctccggcttggcagtcggcagaacgctggtcgccgtattggaaaaccatcaaaacgccgacggcagtatcaatatcccagccgctttgcagccttatatgggtggcgttgccaagttggaagtgaaataa

SEQ ID NO: 29852 - DNA, 1077 bp, Neisseria meningitidis
atgaagccgtctatcttagaaaaactgcaacaactcggcgaccggttggaagaagttacccaccttttagggcaacccgaagccacgtccgatatggacaactaccgcaagctcacgcgcgaacacgctgaactgacccccgtcgtcgaagtgttccaaaactatcggcttgcccaaagcgacttggcggatgccgaagaaatgttgtccgaccccgaaatgaaagactttgccgccgaagaaatcgaagcggcgaaagccaaaatcggcgaactcgataccgaactgcaaaaactgctgctgcccaaagatgccgacgacgacaaaaacatcttcatcgaaatacgcgccggaacgggcggcgacgaagccgcgctgtttgctggcgatttgctgcgtatgtacagccgctacgccgaacgcaaccgctggcaggttgaaatcgtgtccgccaacgaaagcgagttgggcggctataaagaagttatcgcccgtattatcggcttaggcgcgtacagccgtttgaaatttgaatcgggcggacaccgcgtgcagcgcgtccccgccaccgaaagccaaggccgtatccacacctccgcctgcaccgttgccgtcatgcccgaagcggacgaactggaagacatcgaactgaacccagccgacctgcgcatcgacaccttccgcgcatccggcgcgggcggtcagcacatcaacaaaaccgactccgccgtccgcatcacccacctgcccaccggcatggtggtcgagtgccaagacgggcgcagccaacacgccaacaaagcgcaggcgatgaaagtcctcgccgcccgcctgaacgacgcgcaaaaacgcgaagcccaagccaaagaagccgccgaacgcaaatccctcatcggcagcggcgaccgcagcgaacgcatccgcacctacaactatccccaaggcagggtaacagaccaccgcatcaaccttaccctgcacaagctggattttgtgatggacggcgacttggcagaaatcaccaatgccctgattgccgagcatcaggcggagcttctggcggcaatgggcgattga

SEQ ID NO: 29853 - DNA, 1335 bp, Neisseria meningitidis
atggcaaaaaaatatttcggcacggacggcgtgcgcggcgaagtcgggcagtttccgattacgcccgattttgtattgaaactcggctatgcggcgggtcaggttttggttcagcacgacaccgaccagaaaccgaccgtcctcatcggcaaagacacgcgcatttccggctatatgctggaagccgctttggtggcaggttttacggcggcgggtgtgaatgtggtacagaccggaccgctgcccacgcccggcgtggcttatctgacccgcgcgttgcgcctgtccgccggcgtgatgatttccgcgtcgcacaacgcctattccgacaacggcatcaaattctttgccgagggcggcgtgaaactgagcgatgaaatcgagttggaaatcgaagccaaaatcgacgaagaaatgaaaacccagccttctgcacgcctcggtcgcgcacgccgcatcagtggtgcggacgaccgctatatcgaattttgcaaatctacctttcccagccattccgaccttcggggtttgaagttggttatcgatactgccaacggcgcggggtacggtgtcgcacccaaggtgtttcacgaactgggcgcacaagtcgtcagcatcggcgacgaacccaacggctacaatatcaatgaaaaatgcggtgcgacttataccaagacactccaggcagccgttttacagcatgaagccgactacggtatcgccttagacggcgacggagaccgcctgatgatggtcgataaaaacggtaaggtttacgacggcgacagcctgatttacgtcattgctaaagcccgcgcccgagaaggtatcaacatcggcggcgtggtcggcacggtcatgaccaatatggcgatggaaatcgccctgaaagagcagggcgtggatttctgccgcgccaaagtcggcgaccgctatgtgttggaacagctgaaccaacgcagctggctcatcggcggcgaagccagcggccatattttgtgcatggacaaacacaacaccggcgacggcattatttccgcgctgcaagttttggcggcactgcaaacgctgaaccaagacctcgccaccgtttgcgccgattggcagccgtatccgcaaactatgattaacgtgcgcatccaaaaaggtcagaaatggcaggaagcctcaaaagacgtgttggcggaagtggaaaaagaactcgaaggcaaagggcgtgtcgtgttgcgcgcttcgggaaccgaacccgtcgtgcgagtgatggttgaggcgcggcaggcggattgggcgcgcgacggtgcggaacgtattgcttccgccatcggcagcctttag

SEQ ID NO: 29854 - DNA, 852 bp, Neisseria meningitidis
atggtcggatgcgtttggcaggcaggacggtttgaaatcggtttggacaaaccgaaaatcatgggtatcgtgaatctcacgcccgattctttgtccgacggcggcgcgtattcgcaaaacgcccaaacagctttggcgcatgccgaacggcttttgaaagagggcgcggacattctcgacatcggcggcgaatcgacgcggccgggtgcggattatgtttcgcctgaagaagaatgggcgcgggttgagtctgtattggcggaagtggcagggtggggcgttcccgtcagtttggacacgcgccacacggtggttatggaaaaagcgttggcactcggcggcatcgatattattaacgatgtggcggcgttgaccgacgaaggcgcgctcgaattgctggcgtgtcaggcggatacgggcatttgcctgatgcatatgcagggcttgcctaagaatatgcagattaatccgaaatatcaggatgttgtcggtgaagtggcgcggtatttgaaagcgcgggcggcggaatgcatcgcggcaggcatcgccccgcaacgcattacactcgaccccggtttctgcttcggcaaaaccttgcaacacaatatcacactgatgcggcatctgcccgaattgatggcggaaacgggctatccgctgctgatcggcgtgtcgcgcaaaagcatgataggcgaactgacgggcgaaaccgacgcggcggcgcgcggacacggcagcgtggcggcggctttggcggctgtggcacgcggcgcgaaaatcgtgcgcgtgcacgatgtgaaggcgacggcggatgctttgaaggcgtgggaagcgttgggcatcaatctgtaa

SEQ ID NO: 29855 - DNA, 2223 bp, Neisseria meningitidis
atgcctgcttatgggcattacccctttatacaagataatccgcccacacaaaataggatttctacaagccgtgttatactgtggcgtgttttacagacttttcaggctatggatttattatcggtcttccacaaataccgtctgaaatatgcggtagccgtgctgacgatactgcttttggcggcaatcgggctgcacgcttccgtatatcgcatcttcacacctgaaaacatccgaagccgcctccaacaaagcattgcccatacgcaccggaaaatctcgtttgatgcggatatacagcgcaggcttctgccccggccgaccgtcatcctgaaaaacctgaccattaccgaacccggcggcgaccggactgccgtttccgtccaagaaaccaaaatcggattgagctggaaaaacctgtggtcggatcagatacagattgaaaaatgggtggtttcgagtgcggaacttgccctgacgcgcgacgggaaaggtgtttggaacatccaagacctgatcgacagccaaaaacgccaagcctcagtcaaccgcattatcgtcgaaaacagcaccgtccgcctcaatttcctgcaggaacagcttatcctgaaggaaatcaacctcaacctgcaatcccccgattcgtcggggcagccgtttgaaagttcgggcatactggtttggggaaagctgtccgtcccgtggaaaagcagggggctgttcctttcagacggcatcggcacgcccaaaatctcaccgttccattttgaagcttccacttcgctggacggacacggcattaccatttccaccaccggcagcccttctgtccgcttcaacgccggcggagcggatgccgccggcctcggcctgcgtgcagacacttccttccgcaacctccacctgaccgcccaaatccctacgctggcactcaggaacaacagcattaaaattgaaaccgtcaacggcgcatttaccgccggcggcgaatatgcccaatgggacggttcgttcaaactcgacaaagccaacctgcactccggcatcgccaacatcggcaacgccgaaatctccggcagcttcaaaacaccgcgccaccagaccaacttctccctcaattcgccgctcgtatggacggaaaacaaagggctggacgcgccgcgcctgtatgtatcgacccttcaggataccgtcaaccgcctgccgcaaccccgtttcatcagccggctcgacggttcgctgtccgtaccgaatctgcaaaattggaatgccgaattaaacggcacattcgaccgccaaaccgttgccgcgaaattcagatacacacatgaagacgcaccgcatctggaagccgccgtcgcactgcaaaaattgaacctgaccccctatcttgacgacgtgcggcaacaaaacggcaaaatatttcccgacaccctcgccaagctgtccggcgacatcgaggcgcacctgaaaatcggaaaagtccaacttcccggcctgcaactggacgatatggaaacctacctccacgccgacaaaggccatatcgcgctcagccgtttcaagtcagggctttacggcggccataccgaaggcggcatcagcatcgccaacacccgtcccgccacttaccgcctgcaacagaatgcaagcaacatccaaatccaaccgctgctgcaagacctgttcggcttccacagcttcagcggcaacggcgacgcggtcatcgacctgaccgcgggcggcgaaacccgaaaagagcttatccgctcgcttcagggcagcctgtcgctaaatatttccaacggtgcatggcacggtatcgacatggacaatatcctgaaaaacggcatttcgggcaaaactgccgacaatgccgcacccagcacacccttccaccgattcacgctcaacagcgaaatttcagacggcatcagccgccacatcgataccgaactcttctccgacagcctctatgttaccagcaacggctataccaatctggatacgcaggaattgtctgaagatgtccttatccgcaacgccgtccatccgaaaaacaaaccgattcccctgaaaatcaccggtacggtggacaaaccgtccattaccgtcgattacggcaggctgaccggcggcatcaattcgcgcaaagagaaacagaaaatcctcgaagacaccctgctggaacaatggcagtggctcaaacctaaagaaccgtaa

SEQ ID NO: 29856 - DNA, 795 bp, Neisseria meningitidis
atgaaagcctatttggacttgatgcgccacgtcctcgacaacggtacggacaaatcagaccgcaccggtacgggcacgcgctccgtattcggttatcagatgcgttttgacttgggcaaaggttttccgctgctgacgaccaaaaagctgcatttgcgctcgattatccacgagctgctttggtttctcaaaggcgataccaatatcaaatacctaaaggacaacaatgtttccatttgggacgagtgggcggacgaaaacggcgacttaggcccggtttacggctaccagtggcgtaactggcccgcgcccgacggcaggcatatcgaccaaatcgccaatgtgctggaacaaattaagaaaaaccccgattcgcgccgcctgattgtatcggcgtggaatccggctttggtcgatgaaatggccttgccgccctgccacgcgctgtttcagttttacgttgccgacggcaaactgtcctgccagctttaccagcgcagcgcggatattttcctcggtgtgccgtttaatattgccagctacgcattgttgaccatgatgatggcgcaagtgtgcggattggaggcgggcgagtttgtccatacgtttggcgacgcgcacctgtaccgcaaccatttcgagcaggccgcattgcagttggaacgcgaaccgcgcgccttgcctgtgatgaaaatcaatcctgaagtcaaagatttgtttgccttcaaatttgaagattttgagttggaaggctacgatccgcatccgcacatcaaggcggcagtgtcggtttag

SEQ ID NO: 29857 - DNA, 1335 bp, Neisseria meningitidis
atgactgacctgaacaccctgtttgccaacctcaaacaacgcaatcccaatcaggagccgttccatcaggcggttgaagaagtcttcatgagtctcgatccgtttttggcaaaaaatccgaaatacacccagcaaagcctgctggaacgcatcgtcgaacccgaacgcgtcgtgatgttccgcgtaacctggcaggacgataaagggcaagtccaagtcaaccggggctaccgcgtgcaaatgagttccgccatcggtccttacaaaggcggcctgcgcttccatccgaccgtcgatttgggcgtattgaaattcctcgcttttgaacaagtgttcaaaaacgccttgaccaccctgcctatgggcggcggcaaaggcggttccgacttcgaccccaaaggcaaatccgatgccgaagtaatgcgcttctgccaagcctttatgaccgaactctaccgccacatcggcgcggacaccgatgttccggccggcgacatcggcgtaggcgggcgcgaaatcggctacctgttcggacaatacaaaaaaatccgcaacgagttttcttccgtcctgaccggcaaaggtttggaatggggcggcagcctcatccgtcccgaagcgaccggctacggctgcgtctatttcgcccaagcgatgctgcaaacccgcaacgatagttttgaaggcaaacgcgtcctgatttccggttccggcaacgtggcgcaatacgccgccgaaaaagccatccaactgggcgcgaaagtgctgaccgtttccgactccaacggcttcgtcctcttccccgacagcggtatgagcgaagcgcaactcgccgccttgatcgaattgaaagaagtccgccgcgaacgggttgccacctacgccaaagagcaaggtctgcaatactttgaaaaccaaaaaccgtggggcgtcgccgccgaaatcgccctgccctgcgcgacccagaacgaattggacgaagaagccgccaaaaccctgttggcaaacggctgctacgtcgttgccgaaggtgcgaatatgccgtcgactttgggcgcggtcgagcaatttatcaaagccggcatcctctacgccccgggcaaagcctccaacgccggcggcgtagcaacttcaggtttggaaatgagccaaaacgccatccgcctgtcttggactcgtgaagaagtcgaccaacgcctgttcggcatcatgcaaagcatccacgaatcctgtctgaaatacggcaaagtcggcgacacagtaaactacgtcaatggtgcgaacattgccggtttcgtcaaagttgccgatgcgatgctggcgcaaggcttctaa

SEQ ID NO: 29858 - DNA, 783 bp, Neisseria meningitidis
gtgatgaaactggtaaggcctcagaaaatcagcgatcaggtattgtcggtattggaaggccgcatcgtggaaggggtttacgcggaagggggcaagattccgcccgaacgcgttttggcggaagagttcggcgtgtcccgcccgtcggtcaggtcggcattgaatgttttggtcgcccgtcaggttttggaagcgaggcagggagacggttattatgtttcggtcaagccacagcaggattttttgcaaagttggcaggagcttttgggcaagcattccaattgggaacaggatgtttttgatttcagctgccacatcgagggctgtatggcggcattggcggcagaacgccggacggatgccgatttgaagcggattgggttttggcttgaaaagtttgaggaggcgtgcgaaagcggcaatctggaacatcagagcgaagccgatgtcagcttccatcagacgattgcggatgcggcgcacaatttgttgttcagccatttgtcgggcggtttgttgaaaatgctgtaccggcagacgcgcagcagccttatttatctgaatcaggaagaagatccgcgtccgaaactgatggcgcagcaccgcgtgctgtatgaggcgatatcgaaccgtcggccgggcgaggcttcggaggcggcaaaggcgcatttgaattatgtggcgagcagtatattgaaagacagggaatatcagagccgtaaccgccacgcggatactttggcgcaaaacgatttgaagcgcgtgcaggattgggaggtatga

SEQ ID NO: 29859 - DNA, 3204 bp, Neisseria meningitidis
atggctaaattttttatcgaccgccctatttttgcgtgggttatttcgattttcattattgcggcgggtattttcggcatcaaaagcctgcctgtttcgcaatatccgtccgtcgccgccccgaccattactttgcacgccacttatccgggtgcgtccgcgcaggtaatggaagacagcgtgctttccgtgatcgagcggaatatgaacggcgtggaaggtttggattatatgtccacttccgccgattcgagcggcagcggcagcgtgagcctgacctttacgcccgataccgacgagaatctggcgcaggtggaagtgcagaacaagctttccgaagtattgagcacgctgccggcaaccgtccagcaatacggcgtaaccgtatccaaggcgcgttccaatttcctgatgattgtgatgctttcgtcggatgtgcagtcaaccgaagagatgaacgactacgcgcagcgtaatatcgttcccgagttgcagcgtatcgaaggcgtggggcaggtacgcctgttcggcgcgcaacgcgcgatgcggatttgggttgatcctaagaaactgcaaaactacaatttgtcgtttgccgatgttggcagcgcgctgtccgcccagaacgtccagatttcagcgggttctatcggttcgcttcccgccgttcgcggacagacggttacggctaccgtaacggcgcaagggcagttgggtacggccgaagaattcggcaacgtcattctccgcgccaataccgacggttctaatgtttacctgaaggatgtggcaagggtcggactgggtatggaagactattcttcctcaacccgtctgaacggtgtaaataccaccggtatggcggtgatgctgtccaacagcggcaatgcgatggcgacggcaaaggcggttaaagaacgcatggcgacgttggaaaaatactttcctcagggtatgagctggaaaaccccttacgatacttccaaattcgtcgaaatttcgattgaaaaagtgattcacactttaatcgaagcgatggtgttggtgtttgtcgtaatgtatctcttcctgcaaaacatccgttatacgctgattccgaccatcgtcgtaccgatttcgctgttgggcggtttcgccttcatctcttatatgggcatgtcgattaacgtactgaccatgtttgcgatggttttggtcatcggcatcgtggtcgatgacgcgattgtggtggttgaaaacgtcgagcgcattatggcggatgaaggcttgccgcccaaagaagcgaccaaaaaagcgatgggtcagatttcgggtgcggtcatcggtattaccgccgttctgatttccgtgttcgtaccgttggcgatgttcagcggggcgacgggcaatatttacaaacagtttgccctgacgatggcgtcatcaatcgcattctccgccttccttgcgctgacccttacccctgctttgtgtgccacaatgttgaagacaatcccgaaagggcatcacgaagagaaaaaaggtttcttcggctggtttaacaagaaattcaatagttggacgcacggttacgaaggccgggttgccaaagtgctgcgtaagactttccgcatgatggttgtctatatcggcttggcggttgtgggcgtgttcctgtttatgcgcctgccgacttcattcctgccgaccgaagaccaaggcttcgtcatggtcagcgtgcaactgcctgcaggagcgacccaagagcgcaccaatgcgactttggcgcaagttacccaactggcgaaaagcattcctgaaatagaaaacatcattaccgtttccggcttcagcttttcgggcagcggtcagaatatggcgatgggttttgccatattgaaagattggaacgagcgtaccgcgcccggcagcgatgccgttgcgattgccggcaagctgacgggtatgatgatggggacgcttaaagacggttttggcatcgccgtcgtcccgcctccgattctggagttgggcaatggttcgggcctgagcatcaacctgcaagaccgcaataataccggccataccgcattgctggcgaagcgcaacgagttgattcagaaaatgcgtgccagcggtttgtttgaccccagcaccgtccgtgctggcggtttggaagactcgccgcagttgaaaatcgacatcaaccgtgccgccgcggcggcgcaaggcatttcgtttgccgacatccgcaccgcattggcaagcgcgctgagttcgtcttatgtcagcgacttcccgaaccaaggccgtctgcaacgcgtgatggtgcaggccgacgaggatgcccgtatgcagcctgccgatattttgaacctgaccgtgccgaacaaatccggcgtcgccgtaccgctttccaccattgctactgtttcttgggaaaacggtacggaacagagcgtacgcttcaacggttatccttcgatgaagctgtccgcttcgcctgcaaccggcgtttccaccgggcaggctatggcggcggttcaaaaaatggttgacgaattgggcggcggttacagcctggagtggggcggacagtcgcgcgaagaggcaaaaggcggctcgcaaaccctgattttgtacggtttggcggttgcagccgtatttttggtacttgccgcgctttatgaaagctggtcgattccgctggcggtcatccttgtgattccgttgggtttgatcggtgcggctgcgggcgtaaccgggcgcaacctgtttgaaggactgttgggcagcgttccctcgttcgccaacgacatctactttcaagtcggtttcgttaccgtgatgggtttgagtgcgaaaaacgcgattttgattatcgagtttgccaaagaccttcaagcgcaagggaaaagcgcggttgaagccgctttggaagcagcccgcctgcgtttccgtccgattatcatgacctcgttcgcctttattttgggcgtggttcccctgtatattgccggcggtgcaagttctgccagccagcgcgccattggtacaaccgtattctgggggatgctcatcggcacgctcttgtccgtgttccttgttccgcttttctatgtggtggtgcgcaaattcttcaaagaaaccgcgcacgaacacgaaatggcagtaaaacacgccgccgaagcgggcattaccggttcggacgacagccaacattaa

SEQ ID NO: 29860 - DNA, 1569 bp, Neisseria meningitidis
atgagtcaaaccgatacgcaacgggacggacgatttttacgcacagtcgaatggctgggcaatatgttgccgcacccggttacgctttttattattttcattgtgttattgctgattgcctctgccgccggtgcgtatttcggactatccgtccccgatccgcgccctgttggtgcgaaaggacgtgccgatgacggtttgattcacgttgtcagcctgctcgatgctgacggtttgatcaaaatcctgacgcataccgttaaaaatttcaccggtttcgcgccgttgggaacggtgttggtttctttattgggcgtggggattgcggaaaaatcgggcttgatttccgcattaatgcgcttattgctcacaaaatctccacgcaaactcactacttttatggttgtttttacagggattttatctaataccgcttctgaattgggctatgtcgtcctaatccctttgtccgccatcatctttcattccctcggccgccatccgcttgccggtctggctgcggctttcgccggcgtttcgggcggttattcggccaatctgttcttaggcacaatcgatccgctcttggcaggcatcacccaacaggcggcgcaaatcatccatcccgactacgtcgtaggccctgaagccaactggttttttatggtagccagtacgtttgtgattgctttgattggttattttgttactgaaaaaatcgtcgaaccgcaattgggcccttatcaatcagatttgtcacaagaagaaaaagacattcgacattccaatgaaatcacgcctttggaatataaaggattaatttgggctggcgtggtgtttgttgccttatccgccctattggcttggagcatcgtccctgccgacggtattttgcgtcatcctgaaacaggattggtttccggttcgccgtttttaaaatcaattgttgtttttattttcttgttgtttgcactgccgggcattgtttatggccgggtaacccgaagtttgcgcggcgaacaggaagtcgttaatgcgatggccgaatcgatgagtactctggggctttatttggtcatcatcttttttgccgcacagtttgtcgcattttttaattggacgaatattgggcaatatattgccgttaaaggggcgacgttcttaaaagaagtcggcttgggcggcagcgtgttgtttatcggttttattttaatttgtgcttttatcaatctgatgataggctccgcctccgcgcaatgggcggtaactgcgccgattttcgtccctatgctgatgttggccggctacgcgcccgaagtcattcaagccgcttaccgcatcggtgattccgttaccaatattattacgccgatgatgagttatttcgggctgattatggcgacggtgatcaaatacaaaaaagatgcgggcgtgggtacgctgatttctatgatgttgccgtattccgctttcttcttgattgcgtggattgccttattctgcatttgggtatttgttttgggcctgcccgtcggtcccggcgcgcccacattctatcccgcaccttaa

SEQ ID NO: 29861 - DNA, 1446 bp, Neisseria meningitidis
atggagactctcatggacacacaaacttacaactacaaagtggtgcgccagttcgccatcatgactgtagtttgggggattgtgggtatgttggtcggcgttatcgtcgccgcccagctttttgctcctgccctcgacttgtctaatatcggaccttggttccacttcggccgcctgcgtccgctgcacaccaatgcggttattttcgcatttggcggttgcggcctgatcggcacatcatactacgttgtccaacgtacttgtaatacccgtcttttcggcggttggctgccggcatttaccttttggggctggcaggcggtaatcgttgccgccgtcgtcagcttccctatgggttggacccaaggtaaggaatatgccgaactggaatggccgatcgatattctgattactttggtttgggtggcttacgccatcgtattcttcggtacgattgccaaacgtaagattaaacatatttacgttgccaactggttctacggcggctttattttggcggtcgcacttttacacatcgtcaacaatatcagcatcccggccggtttgatgaagtcataccccgtctattccggtgcgattgatgctatggttcaatggtggtacgggcataacgccgtgggcttcttcctgactgccggcttcttgggtatgatgtactatttcgtacccaaacaagcagcccgccccgtttactcctaccgcctgtccgtcgttcacttctgggcgttgattttcacctatatgtgggcgggtccgcaccatcttcactacactgcgctgcctgactggacgcaatctttgggtatggttctgtctttgattctgttcgcaccctcttggggcggtatgattaacggcatcatgaccttgtccggcgcgtgggacaaactgcgtacagacccgattcttaaattcctgattgtatccttgtccttctacggtatgtctacctttgaaggcccgatgatgtcgattaaaacggtcaatgcattgagccactatacggactggaccgtcgcgcacgttcatgcgggtgcgttgggctgggtaggctttgtaaccatcggttccgtctattacatgattccccgtctgttcggcaaagaacagatgcacagcaccaagctggtagaagcacatttttggattgcgaccatcggcgtggttctgtatatcgctgccatgtggattgccggtgtgatgcagggtttgatgtggagttctttgaacgatgacggtacgctgacctactcgtttgtcgaatccgtaaaacgcaccatgccttactacgtgatccgttttgcaggtggtttattgtatctgagtggtatgtgcattatggcgtacaacgtgtaccgcacagccatcggtggtaaagcagtcgatgccgaaatccctgcggtttcccaaacacagcaccactaa

SEQ ID NO: 29862 - DNA, 2310 bp, Neisseria meningitidis
ttgcattttgaaaatgaaattttagtaacctatgttattgcaaaggtctcaagctgttacaataaactcgtttttatcggaacggaagaccccatcatgaccgccatcagcccgattcaagacacgcaaagcgcgactctgcaagaattgcgcgaatggttcgacagctactgcaccgcgctgccgaacaacgataaaaaacttgtcttagccgcccgttcgctggcggaagcacattaccccgccgatgccgccacgccgtatggcgaaccgctgcccgaccacttcctcggcgcggcgcaaatggttcatgaactcgacctgctccccgatgccgtcgccgccaccctgcttgccgacatcggacgctacgtccccgactggaacctattggtttccgaacgctgcaacagtaccgtcgccgagctggtcaaaggtgtggacgaagtgcagaaactcacccacttcgcccgggtggacagcctcgccacgccggaagaacgcgcccagcaggcagaaactatgcggaaaatgctgctggcgatggttaccgacatccgcgtcgtgttaatcaaactggcgatgcgtacgcgcaccctgcaatttttaagcaacgcccccgacagccccgaaaaacgcgccgtcgccaaagaaaccctcgacatcttcgccccgctcgccaaccgtttgggcgtgtggcagctcaaatggcagctcgaagatttgggcttccgccatcaagaacccgaaaaataccgcgaaatcgccctgcttttggacgaaaaacgcaccgaacgcctcgaatacatcgaaaacttccttaatatcctgcgtacggaactcaaaaaatacaatatccactttgaagtcgccggccgtccgaaacacatctactccatttacaaaaaaatggtgaagaaaaaactcagcttcgacgggttgttcgacatccgcgccgtgcggattctggttgataccgtccccgagtgttacaccacactgggcattgtccacagcctctggcagcccattcccggcgagttcgacgactacatcgccaacccgaaaggcaacggctataaaagtttgcacaccgtcatcgtcggcccggaagacaaaggcgtggaagtgcaaatccgcaccttcgatatgcaccaattcaacgaattcggtgtcgccgcgcactggcgttacaaagagggcggcaaaggcgattccgcctacgaacaaaaaatcgcctggttacgccaacttttggactggcgcgaaaacatggcggaaagcggcaaggaagacctcgccgccgccttcaaaaccgagcttttcaacgacacgatttatgttttgaccccgcacggcaaagtcctctccctgcccacaggcgcgacccccatcgacttcgcctacgccctgcacagcagcatcggcgaccgttgccgcggtgcgaaagtcgaagggcagattgtgccgctgtccaccccgctcgaaaacggacagcgtgtcgaaatcattaccgccaaagaagggcatccttccgtcaactggctttacgaaggctgggtcaaatccaacaaggcaatcggcaaaatccgcgcctacatccgccagcaaaacgccgacaccgtgcgcgaagaaggccgcgtccaactcgacaaacagcttgccaaactcacgcccaaacccaacctgcaagagcttgccgaaaatctcggctacaaaaagccagaagacctctacaccgccgtcggacaaggcgaaatttccaaccgcgccatccaaaaagcctgcggcacgctgaacgaaccgccgcccgtacccgtcagcgaaaccaccatcgtcaaacagtccaaaatcaaaaaaggcggcaaaaacggcgtgctcatcgacggcgaagacggtctgatgaccacgcttgccaaatgctgcaaacccgcgccgcccgacgacattgtcggcttcgttacccgcgatcgcggcatttcggtacaccgcaaaacctgcccctctttccgacacctcgccgaacacgcgcccgaaaaagtactggacgcaagttgggcggcgttgcaggaaggacaagtgttcgccgtcgatatcgaaatccgcgcccaagaccgctccgggcttttgcgcgacgtatccgacgcgctcgcccgccacaaactcaacgttaccgccgtgcaaacccagtcccgcgacttggaagccagcatgaggttcacgctcgaagtcaaacaagttaccgacctcccacgcgtcctcgccagcctcggcgacgtcaaaggcgtattgagcgttacccggctttaa

SEQ ID NO: 29863 - DNA, 1143 bp, Neisseria meningitidis
atgaaggtttttaaacaacagcttgaacaactcggcgcgcaaaaccaatatcgttcgattccggatttgattcatcaagggcggtatattacgcgggaaaactgcaaaatgctgaatatgtcgtctaatgattatttgggtttggcatcagatgaaaacttgcgccggtcttttttgcagcaatacggcggtaattttccctcttttaccagttcttcatcgcgtttattaacgggcaactttcctatttataccgatttggaagagcttgtcgcacaacgtttccaacgggaaagcgcgttattgttcaacagcggctatcacgccaatctcggtattttgcctgctttgacgacgacgaaaagtttgattttggcagataaatttgttcacgccagtatgattgacggcatccgtttgagccggtgtgcgtttttccgttatcgtcataatgattatgaacatttgaaaaatctgcttgaaaaaaacgtcggaaaatttgaccgcacttttatcgttaccgaatctgttttcagtatggacggcgatgtggcggatttgaaacagcttgtccaattaaaaaaacagtttcccaatacttatctttatgtggatgaagcccacgcaatcggtgtttatgggcaaaacggattggggattgccgaacgggataatttgattgccgagattgatttattggtcggcactttcggtaaagccttagcctcggtgggggcgtatgccgtctgcaaccaagtattgaaagaatgtttgattaatcaaatgcgcccattgattttttcaaccgcattgccgccgtttaatgtggcttggacttattttatttttgaacgattgccgcaattctcaaaagaaagaagccatcttgagcagttaagcgcatttttacggcgggaagtggcgcatcggacgcaaataatgccgagccaaacctgtatcgtcccctatattttaggcgggaatgaagccacccttgccaaagcggaatacctgcaaaggcagggttattattgcctgcccatcagaccaccgacagtaccaaaaggtacatccagaatacgattgtctttgacggcagatatgacaatggatgaagtgcggcagtttgcggcgtgcctgtaa

SEQ ID NO: 29864 - DNA, 924 bp, Neisseria meningitidis
atgcaatacagcacactggcaggacaaaccgacaactccctcgtttccaataatttcgggtttttgcgcctgccgcttaattttatgccgtatgaaagtcatgccgattgggttattaccggtgtgccttatgatatggcggtttcagggcgttccggcgcgcgtttcggtcctgaagccatccggcgcgcctccgtcaacctcgcttgggagcaccgcaggtttccatggacatttgatgtgcgcgaacgcctgaacattattgattgcggcgacttggttttttcttttggcgacagcagggattttgtcgaaaaaatggaagcgcacgccggcaaattactttcttccggcaaacgctgtttgagtttgggcggcgaccatttcattaccctcccgttgttgcgcgcccacgcccgctatttcggcaaactcgcactgattcattttgacgcgcacaccgacacctacgacaacggcagcgaatacgaccacggtacgatgttctataccgcccccaaggaaggcctcatcgacccgtcccgttccgtacaaatcggcatacgcaccgaacacagtaaaaaattgccttttactgtgttgtccgcccctaaagtcaatgaagacagtgttgaagagaccgtccgtaaaatcaaagaaaccgtcggcaatatgcccgtttacctgactttcgacatagactgcctcgacccgtcgttcgcacccgggaccggtacgcccgtatgcggcggcttgagcagcgacagggcattaaaaatcctacgtgggctgacggatctcgacatcgtcggtatggatgttgtagaagttgccccctcttacgaccaatccgacattaccgctttggccggcgccacaattgccttggaaatgctttaccttcaaggtgcgaaaaaggactga

SEQ ID NO: 29865 - DNA, 1809 bp, Neisseria meningitidis
atgcgtaccaactattgcggtctgattagcgagcaatacttagaccaaaccgttaccgtcaaaggctgggtacaccgtcgacgcgaccatggcggtgtgatttttatcgacctgcgcgaccgcgaaggcatcgtccaagtcgtgatcgatcccgacacgcccgaagcgtttgccgctgccgattccgcccgtaacgaatacgttttgagcattaccggccgcgtacgcaaccgtcccgaaggtacgaccaacgacaaaatgatttccggcaaaatcgaaatccttgccaaagaaatcgaagtcttgaacgctgccgctacgccgccgttccaaatcgacgacgaaaacatcagcgaaaacgtgcgcctgaccaaccgcgttatcgacctgcgccgccctgtgatgcagcgcaacctgcgcctgcgttaccaagtcgctatgggcgttcgccgttatctggacgcacaaggcttcatcgacattgaaacgccgatgctgacccgctccacgcctgaaggcgcacgcgactacctcgtgccgagccgcgttcatccaggcgagtttttcgcgctgccgcaatcgccgcaattattcaaacaactgttgatggtggcgggtttcgaccgttactaccaaatcaccaagtgcttccgcgacgaagacctgcgtgccgaccgtcaacctgaattcactcaaatcgacttggaaacctcgttcttgaacgaggatgaaatcatggacattaccgaaggtatggcaaaacaagtcttcaaagacgcgctgggcgtggacttgggcgacttcccacgcatgccttactctgaagccatgttctactacggctctgacaaaccggacatgcgtatcaacttgaaattcaccgagttgaccgacctgatgaaaacggaagaattcaaagtcttccgtggcgcagccgacatgaaaggcggccgcgtggttgccctgcgtgtgccgaacggtgcgaaattcagccgcaaagaaatcgacgaatacaccaaatttgtcggcatctacggtgcgaaaggtctggcatacatcaaagtaaatgatgtgggcaacctctccaacggcgaagacagcggcctgcaatctccaatcgtaaaattcctgtctgagaatgccctgaaggaaatcatcgcgcgtaccggcgcacaaaacggcgatattatcttcttcggtgcagacaaaaccaaagttgtgaacgaagccatcggcgcattgcgtatcaaagtcggcttggaacacggcaaagataacggctacttcacagacgaatggaaacctttgtgggttgtcgacttcccaatgttcgaatacgacgaagaagccgaccgctacgttgccgtacaccatccgtttaccgcgccaaaagaaggtcatgaagacctgatggtttccgaccctgcaaactgcctggctcgtgcctacgatatggtattgaacggctgggaaatcggcggcggctctatccgtatccaccgcgcagacgtacaagagaaagtgtttgccgcgctgaaaatcagccctgaagagcaacaagagaaattcggcttcctcttggacaacctgaaattcggtgcacctccgcacggcggccttgcattcggcctcgaccgtttggttaccctgatgaccggcgccgaatctatccgcgacgtgattgccttcccgaaaacacaacgtgctcaatgcctgctgaccaacgcgcccaacagcgtggacgacaagcagttgcgcgaattgagcttgcgcctgcgtcaaaaggcggctgaaaccaaagaagcataa

SEQ ID NO: 29866 - DNA, 264 bp, Neisseria meningitidis
atggcaaacagcgcacaagcacgcaaacgtgcccgccagtccgtcaaacaacgcgcccacaacgctagcctgcgtaccgcattccgcactgcagtgaaaaaagtattgaaagcagtcgaagcaggcgataaagctgccgcacaagcggtttaccaagagtctgtcaaagtcatcgaccgcatcgccgacaagggcgtgttccacaaaaacaaagcggcacgccacaaaagccgtctgtctgcaaaagtaaaagcactggcttga

SEQ ID NO: 29867 - DNA, 813 bp, Neisseria meningitidis
atggaaaatatcggcaggcagcgacccatcggcgtttttgactcgggaatcggcggtttgaccaatgtacgcgcgctgatggagcggctgccgatggagaacatcatttatttcggcgacacggcgcgcgtgccttacgggacgaaatctaaggcgaccatcgaaaatttctcgatgcagattgtcgattttttattggaacacgatgttaaggcgatggttatcgcgtgcaatacgattgcggcggtggcggggcagaaaatccgtcaaaagacgggcaatatgcctgtgttggacgtgatttccgccggcgcgaaagccgcgctagcaaccacgcgcaacaataaaatcggcattatcgccaccaataccacagtcaacagcaacgcctatgcgcgcgccatccataggaacaaccccgacacgctcgtccgcacgcaggccgcgccgctgctcgtccctttggtggaagagggctggttggaacacgaagttacccgcctgaccgtatgcgaatacctcaaaccattgcttgcagacggcatcgatacgctggtgttgggctgcacgcactttcccttgctcaaacccttaatcggcagggaggcgggcaatgtcgcgttggttgattctgcaattacaacggccgaagaaaccgcacgcgtccttgctcaggaaggattgctcaataccgacaacaacaatcccgactaccgtttttacgtcagcgatattcctttgaaattcagaaccatcggcgagcgttttctgggcaggacgatggagcagattgaaatggtgtctttgggttaa

SEQ ID NO: 29868 - DNA, 1251 bp, Neisseria meningitidis
atgaccaaactgacacgaagacaaatcatccgccgcaccgccggcacactgttcgccctaagccccatcgcatccgccgttgccaaaacggtacgcgccccgcagtttaccgccgtacggatatggccgtcgcacacctacacccgcctgacgctggaaagcacaaccgcgctcaaataccaacacttcacgctcgacaacccgggcaggttggtcgtcgacatacaaaacgcgaacatcaataccgtattgcacggactgtctcagaaggttatggcggacgacccctttatccgcaatatacgcgccggtcagaacacgcccgacaccgtccgcctcgtcatcgatttgaaacagccttcctacgcgcaagttttttccctcccccccgtcggcggctttaaaaaccgcctcgtcgtcgatctctatccgcaagggatggatgccgacgatccgatgatggcgctgctcaacggcagcctgaacaaaaccctgcgcggctctcccgaagccgacctcgcccaaaacaccacgccccaacccgggcgcggcagaaacggacgcagacccgtcattatgatcgaccccggacacggcggcgaagaccccggcgccgtcagctcgggcggtttgcaggaaaaacacgtcgtcctctccatcgcccgcgaaaccaaaaaacaattggaagccttgggttacaacgtctttatgacgcgcaacgaagacgtgttcatccccttgggcgtgcgtgtcgccaaagggcgagcacggcgggcggacgtattcgtctccatccacgccgacgctttcaccagcccctccgcgcgcggcacaggggtttatatgttgaacaccaaaggcgcgaccagctccgccgccaaattcttagaacagacgcaaaacaatgccgacgcggtcggcggcgtaccgaccagcggcaaccgcaacgtcgataccgccctgctcgatatgacccaaaccgccacactgcgcgacagccgcaaactcggcaaactggtgcttgaagaattgggcaggctcaaccatctgcacaaaggcagggtggacgaagccaatttcgccgttttgcgcgcacccgatatgccgtctatcctggtcgaaaccgccttcctgtccaaccctgccgaagagaagctgctgggcagcgaatccttccgccgacagtgcgcccaatccattgcctcgggtgtccaacgctacatcaatacatccgtattgaagcggggttga

SEQ ID NO: 29869 - DNA, 378 bp, Neisseria meningitidis
atgatttacggcataggcacagatattgtttccctcaagcgcatcgtccgcctgagcaaaaagttcggacaggcgtttgccgagcgcatcctcacccccgaagaactgcttgaattccctcaggcgggcaaacccgtcaactaccttgccaaacgctttgccgccaaagaagccttcgccaaagccgtcggtacgggcatacgcggcgcggtttccttccgcaacatcggcatcgggcacgacgcattgggcaaacccgaatttttctatgcccccgccctgtccaaatggctggaggaacaaggcatcagccgcgtcagcctcagcatgagcgacgaagaagacaccgtattggcgtttgccgttgccgaaaaataa

SEQ ID NO: 29870 - DNA, 1233 bp, Neisseria meningitidis
atgccttctgcccattatcctgaaatgagcgaaaaactgatggcggttttgatggcgatgctggttacgctgatgccgttttccatcgatgcctacctgcccgcgattcccgaaatggcgcagtcgctgaacgcggatgtccaccgcatcgaacagagcctgagtttgtttatgttcggcacggcgttcggacaggtggtcggcggttcggtgtccgacatcaaagggcgcaaacccgtcgcgctgaccggactggccgtctactgccttgccgttgccgccatcgtatttgcttcgagtgccgaacagctcctcaacctgcgcgtcgtgcaggcattcggtgcgggcatgactgtggtcatcgtcggcgcaatggtgcgcgattattattccggacgcaaagccgcccagatgtttgcccttatcggcatcattttgatggttgtgccgctggtcgcacccatggtcggcgcattgttgcagggcttgggtggctggcaggcgatttttgtttttctggcggcgtattcgctggtgctgctcggtttggtacagtatttcctgcccaagcccgccgtcggcggcaaaatcggcagggatgtgttcgggctggtggctgggcggttcaaacgcgtattgaaaacccgtgccgcgatgggttatctgttttttcaggcattcagcttcggttcgatgttcgcctttctgaccgaatcttccttcgtgtaccagcagctctaccacgttacgccgcaccagtacgcttgggcgtttgcactcaacatcatcacgatgatgtttttcaaccgtattaccgcgtggcggctcaaaaccggcgtgcatccgcaaagcatcctgctgtgggggattgtcgtccagtttgccgccaacctgtcccaactcgccgccgtgctgtttttcgggttgcccccgttttggctgctggtcgcgtgcgtgatgttttccgtcggtacgcagggcttggtcggtgcaaacacgcaggcgtgttttatgtcctatttcaaagaagagggcggcagcgcaaacgccgtattgggtgtattccaatctttaatcggcgcgggggtgggtatggcggcgaccttcttgcacgacggttcggcaaccgtgatggcggcaaccatgaccgcgtctacctcttgcggcattgcgcttttgtggctctgctcgcatcgtgcgtggaaagaaaacgggcaaagcgaatacctttaa

SEQ ID NO: 29871 - DNA, 1155 bp, Neisseria meningitidis
atgactgaaactactcaaaccccgaccctcaaacctaaaaaatccgttgcgctttctggcgttgcggccggtaataccgctttgtgtaccgttggccgtaccggcaacgatttgagctatcgcggttacgacattctggatttggcacaaaaatgcgagtttgaagaagtcgcccacctgctgattcacggccatctgcccaacaaattcgagctggccgcttataaaaccaagctcaaatccatgcgcggcctgcctatccgtgtgattaaagttttggaaagcctgcctgcacatacccatccgatggacgtaatgcgtaccggcgtatccatgctgggctgcgttcatcctgaacgtgaaagccatccggaaagtgaagcgcgcgacatcgccgacaaactgatcgccagcctcggcagcatcctcttgtactggtatcaatattcgcacaacggcaaacgcattgaggttgaaagcgacgaagagaccatcggcggtcatttcctgcaactgttgcacggcaaacgcccaagcgaatcacacatcaaagccatgcacgtttcactgattctgtatgccgaacacgagttcaacgcttctacctttaccgcccgcgtgatcgccggtacaggctctgatatgtactccagcattaccggagcaatcggcgcgttgaaaggtccgaaacacggcggcgcgaacgaagtggcttacgatattcaaaaacgctaccgcaatgccgacgaagctgaagccgacatccgcgaacgcatcggccgcaaagaaatcgtgatcggtttcggtcatccggtgtacaccatttccgaccctcgcaacgttgtcattaaagaagtggcacgcggtttgagcaaagaaaccggcgatatgcgcctctttgacattgccgaacgtttggaaagcgtgatgtgggaagagaaaaaaatgttcccgaatctggactggttctctgccgtttcctaccaaaaattgggcgtaccgaccgctatgttcacaccgctgttcgtaatttcccgtacaaccggttggagcgcacacgttcttgagcaacgcaaagacggcaaaatcatccgtccgagcgcaaactacacaggccctgaagatttggcgtttgtggagattgaagaacgataa

SEQ ID NO: 29872 - DNA, 1179 bp, Neisseria meningitidis
atggaatttgtttacgacgtggcagaatcggcagtcagccctgcggtgattaaagtaatcggcttgggcggcggcggttgcaatgcaatcaataacatggttgccaacaatgtgcgcggtgtggagtttatcagtgccaatacggatgcgcagtctctggcaaaaaaccatgcggcgaagagaatccagttgggtacgaatctgacacgcggtttgggcgcgggcgcgaatcccgatatcggccgtgcggcagcccaggaagaccgggaagccattgaagaagccattcgcggtgcgaatatgctgtttatcacgaccggtatgggcggcggtaccggtaccggttccgcgccggttgttgctgagattgccaagtctttgggcattctgaccgttgccgtggttacccgaccgttcgcatatgaaggtaagcgcgtccatgtcgcacaggcagggttggaacagttgaaagaacacgtcgattcgctgatcatcatcccgaacgacaaactgatgactgcattgggtgaagacgtaacgatgcgcgaagccttccgtgccgccgacaatgtattgcgcgatgcggtcgcaggcatttccgaagtggtaacttgcccgagcgaaatcatcaacctcgactttgccgacgtgaaaaccgtgatgagcaaccgcggtatcgctatgatgggttcgggttatgcccaaggtatcgaccgtgcgcgtatggcgaccgaccaggccatttccagtccgctgctggacgatgtaaccttggacggagcgcgcggtgtgctggtcaatattacgactgctccgggttgcttgaaaatgtccgagttgtccgaagtcatgaaaatcgtcaaccaaagcgcgcatcccgatttggaatgcaaattcggtgcggctgaagacgagaccatgagcgaagatgccatccggattaccattatcgctaccggtctgaaagaaaaaggcgcggtcgattttgttccggcaagggaggtagaagcggttgctccgtccaaacaggagcaaagccacaatgtcgaaggtatgatccgcaccaatcgcggtatccgcacgatgaaccttaccgctgcggatttcgacaatcagtccgtacttgacgactttgaaatccctgcgattttgcgtcgtcaacacaattcagacaaataa

SEQ ID NO: 29873 - DNA, 1245 bp, Neisseria meningitidis
atggaacagcagcaaagatacatcagcgtactggatatcggtacgtctaaagtcctcgcactgatcggggaagttcaagatgacgacaaaatcaacatcgtcggtttggggcaggctccttcacggggcttgcgcgcgggcatggtaaccaatatcgatgccaccgtccaagccatcaggcaggcggtcaatgatgccgagctgatggcggataccaaaattacccacgttaccacaggtatcgcaggcaaccacatccgcagtctcaattcgcaaggtgtggttaaaattaaagacggggaagtcacgcaggcagacatcgaccgcgccattgaaacggcaaaggcaatcaatatcccgcccgatcaaaaaattctcgatgccgtggttcaagactacattattgacacccaacttggcgtgagggagcccatcggtatgagcggtgtgcgtctggatacgcgggtgcacatcattaccggtgcaagtacggcagtgcagaatgtccaaaaatgtatcgagcggtgcggtttgaaaagcgatcagatcatgcttcagccgttggcaagcgggcaggcggtgctgactgaagatgaaaaagacctcggcgtatgcgtcatcgacattggtggcggaacgaccgatattgccgtttatatgaacggtgccatccgccatacgtccgtcattccggccggtggtaatctgattaccaaagatttgtccaaatcgttgagaacacctctcgatgccgccgagtacattaaaatccattatggcgtggcatcatgcgatacggaaggcttgggtgagatgattgaagttccgggcgtgggtgaccggacatcgcgtcaggtttccagtaaggttttggcagcaatcatcagcgcacgtattcaggagatttttggcgtagtgctgggcgagctgcaaaaatcgggtttccccaaagaagtgctgaatgcgggtatcgttctgaccggcggtgtgtccatgatgaccgggattgtggaatttgccgaaaaaatcttcgatctgcctgtacgcaccggtgcaccccaagaaatgggcggtttgtccgaccgcgtccgcacaccgcgcttttctaccgccatcgggctgcttcatgcagcatgcaagctggaaggaaacttgccgcagctggaaaacggtgcagtgcaagagagggaagggggcggcggtttgttggcaagattgaaacggtggattgaaaacagcttctga

SEQ ID NO: 29874 - DNA, 729 bp, Neisseria meningitidis
atgtgggataatgccgaagcgatggaacggctgacgcgctggctgcttgtcatgatggcgatgctgcttgctgcgtccgggctggtttggttttacaattcgaatcatctgcccgtcaagcaggtgtcgctgaagggcaacctagtttattccgataagaaagcattgggcagtttggcgaaagaatacatccatgggaatattttgaggacggacatcaatggcgcacaggaggcctaccgccggtatccgtggattgcgtcggtcatggtgcgccgccgttttcccgacacggttgaggtcgtcctgaccgagcgcaagccggtcgcgcgttggggcgaccatgccttggtggacggcgaaggcaatgtttttgaagcccgtttggacagacccggaatgccggtattcagaggcgcggaaggaacgtctgccgaaatgctccgccgttatgacgaattttcgactgttttggcaaaacagggtttgggcatcaaagagatgacctatacggcacgttcggcgtggattgtcgttttggacaacggcatcaccgtcaggctcggacgggaaaacgagatgaaacgcctccggctttttaccgaagcgtggcaacatctgttgcgtaaaaataaaaatcggttatcctatgtggatatgaggtataaggacggattttcagtccgctatgctcccgacggtttacccgaaaaagaatccgaagaatag

SEQ ID NO: 29875 - DNA, 915 bp, Neisseria meningitidis
atgcagaattttggcaaagtggccgtattgatgggcggtttttccagcgaacgagaaatctcgctggacagcggcaccgccattttgaatgctttaaaaagcaaaggcatagacgcatacgccttcgatcccaaggaaaccccattgtctgaattgaaggcacaaggttttcagacggcattcaacatccttcacggtacttacggcgaagacggggctgttcagggtgcattggaactgttgggcattccctataccggcagcggtgtcgccgcatccgccatcggcatggacaaataccgctgcaaactgatttggcaggcattgggattgcccgttcccgagttcgccgtcctgcacgacgacactgatttcgatgccgtcgaagaaaaattgggcctgccgatgtttgtgaaaccggcggccgaaggcagcagcgtaggcgtggtaaaagtcaaaggaaaaggccgtctgaaaagcgtttacgaagaattgaaacactttcagggcgaaatcattgccgaacggtttatcggcggcggcgaatattcctgccctgtgttgaacggcaaaggcctgcccggcatacacatcatccccgcgaccgagttttatgactacgaagccaagtacaaccgcaacgacaccatttatcaatgtccttcggaagatctgaccgaagccgaagaaagcctgatgcgcgaactggcggttcgcggcgcgcaggcaatcggtgcggaaggctgcgtgcgcgtcgatttcctcaaagataccgacggcaaactctatctgttggaaatcaacaccctgcccggtatgaccggccatagtttagtaccgaaatccgctgccgttatgggcgtgggttttgccgatttatgtattgaaattttgaagaccgcacatgtgggataa

SEQ ID NO: 29876 - DNA, 1521 bp, Neisseria meningitidis
atgttttttatttcaatccgctatatatttgtcagaaaactatggcgcgcaaacggtcagccctttaaaataacgcctttacgcatcgaaaatccaccggaacgcaacattatgatgaaaaatcgagtgaccaacatccattttgtcggtatcggcggcgtcggcatgagcggtatcgccgaagtcttgcacaatttgggttttaaagtttccggttcggatcaggcgcgaaatgccgctaccgagcatttgggcagcctgggcattcaagtttatcccggccataccgcagaacacgttaacggtgcggatgtcgtcgttacctctaccgccgtcaaaaaagaaaatcccgaagttgtcgctgcgttggagcagcaaattcccgttattccgcgcgccctgatgttggcggagttgatgcgcttccgtgacggcatcgccattgccggcacgcacggcaaaaccacgaccaccagcctgaccgcctccatcctcggcgcggcaggacttgacccgactttcgttatcggcggcaaactcaacgccgcaggcaccaacgcccgcttgggcaaaggcgaatacatcgttgccgaagccgacgagtcggatgcatcctttctgcacctgacaccgattatgtccgtcgttaccaatatcgacgaagaccatatggatacctacgggcacagtgttgagaagctgcatcaggcgtttatcgatttcatccaccgtatgcccttctacggcaaagcctttttgtgtattgacagcgaacacgtccgcgcgattttgcccaaagtgagcaaaccttatgctacttacggtttggacgataccgccgacatctacgccaccgacatcgaaaacgtcggcgcgcaaatgaaattcaccgtccatgttcaaatgaaaggacatgagcaggggtcgtttgaagtcgtgctgaatatgcccggcagacacaacgtgctgaacgcattggcagccatcggcgtggcgctggaagtcggcgcatcggttgaagcgatccaaaaaggcttgctcggctttgaaggtgtcggccgccgcttccaaaaatacggcgacatcaagttgccaaacggtggaaccgcgctcttggtggacgactacggacaccaccccgtcgaaatggcggcgaccctttccgccgcacgcggcgcgtatccggaaaaacgtttggtactcgccttccagccgcaccgctatacccgcacgcgcgatttgtttgaagactttaccaaagtcctcaataccgttgacgcgctggtgctgaccgaagtttatgccgccggtgaagagccgattgccgccgctgattcccgcgctcttgcccgcgccatccgcgtgttgggcaaactcgagccgatttactgcgaaaacgttgccgatctgcccgaaatgctgttgaacgttttgcaggacggcgacatcgtgttgaatatgggtgcgggaagcatcaaccgcgtccccgccgcgctgctggaattgtcgaaacagatttga

SEQ ID NO: 29877 - DNA, 1068 bp, Neisseria meningitidis
atgggcggtaaaacctttatgctgatggcgggcggaacgggcggacatattttccccgcgctggcggtggcggattcattgcgcgcgcgcggccatcatgtaatttggctgggcagcaaggattcgatggaagagcgcatcgtgccgcaatacgacatcctgctcgaaacgctggcgattaaaggcgtgcgcggcaacggcatcaaacgcaagctgatgctgccgtttactttgtatcaaactgtccgcgaagcgcagcagattatccgcaaacaccgtgtcgagtgcgtcatcggcttcggcggcttcgttacctttcccggcggtttggcggcgaagttattaggcgtgccgattgtgattcacgagcaaaacgccgtggcaggtttgtccaaccgccacctgtcgcgctgggcgaagcgggtgttgtacgcttttccgaaagcgttcagccacgaaggcggcttggtcggcaaccccgtccgcgccgatattagcaacctgcccgtgcctgccgaacgcttccaagggcgtgaaggccgtctgaaaattttggtggtcggcggcagtttgggcgcggacgttttgaacaaaaccgtaccgcaggcattggctttgctgcccgacaatgcgcgtccgcagatgtaccaccaatcgggacggggcaagctgggcagcttgcaggcggattacgacgcgctgggcgtgcaagcggaatgcgtggaatttattaccgatatggtgtccgcctaccgcgatgccgatttggtgatttgccgtgccggcgcgctgacgattgccgagttgacggcggcgggattgggtgcgttgttagtgccgtatcctcacgccgttgatgaccatcaaaccgccaacgcgcgttttatggtgcaggcggaggcgggattgctgttgccgcaaacccagttgacggcggaaaaactcgccgagattctcggcggcttaaaccgcgaaaaatgcctcaaatgggcagaaaacgcccgtacgttggcactgccgcacagtgcggacgacgttgccgaagccgcgattgcgtgtgcggcgtaa

SEQ ID NO: 29878 - DNA, 1308 bp, Neisseria meningitidis
gtggtttttttgaagatttcggaagtattggtaaaagtgggcgacggtgtccacactctgctgctcgacaggccgattgtgcgcgacggcaggaaattcgacgcgccgcttttgtggatggtggtgctgatgacggcgttcagcctgctgatgatttattcggcttctgtgtatttggcatcaaaagaaggcggcgatcagtttttctatttgaccagacaggcggggttcgtcgttgccggcttgatagcgagcggtttgttatggtttctttgcaggatgaggacatggcggcggcttgtgccgtggatttttgccctatccggcctgttgctggtagtcgtattgattgccgggcgcgaaatcaatggcgcgacccgttggatacctttgggtccgttgaatttccagccgaccgagctgttcaagctggcggtcatcctttatttggcaagcctgttcacgcgccgtgaagaagtgttgcgcagcatggaaagtttgggttggcagtcgatttggcgggggacggccaatctgatcatgtccgccaccaatccgcaggcacgtcgtgaaacattagaaatgtacggccgtttccgggcgatcatcctgccgattatgctggtggcgttcggtttggtgctgataatggtacagccggatttcggttcgtttgtcgtcattaccgtcattgccgttggaatgctgtttttggcaggattgccgtggaaatattttttcgtcctggtaggcagcgtcttgggcgggatggtgctgatgattaccgccgctccctaccgtgtgcagcgggtagtggcatttttggacccgtggaaagacccgcagggtgccggctaccagcttacccactctctgatggcaatcgggcgcggagagtggttcggtatgggtttgggtgcgagtttgagcaaacgcggctttctgccggaagcgcataccgattttatttttgccatcatcgccgaagaattcggtttcttcggtatgtgcgtgctgatattctgttacggctggctggtggtgcgggcgttttccatcggcaagcagtcgcgcgatttgggtttgactttcaacgcctatatcgcttcgggtatcggcatttggatcggtatccaaagtttcttcaatatcggtgtgaacatcggtgctttgccgaccaaaggtctgacgctgccgttgatgtcctatggcggttcgtcagtctttttcatgctgatcagcatgatgctgctgttgcgtatagattatgaaaaccgccggaaaatgcgcggttaccgggtggagtaa

SEQ ID NO: 29879 - DNA, 1338 bp, Neisseria meningitidis
atgactttccaaaacaaaaaaatcctcgtcgccggacttggcggcacgggtatttccatgattgcctacctgcgcaaaaacggcgcggaggttgctgcgtatgatgcggagctgaagccggaacgcgtgtcgcaaatcggtaagatgtttgacgggttggtgttttacacgggccgtctgaaagatgcgctctccaacggtttcgatattctggcactcagccccggcatcagcgagcggcagccggatatcgaggcctttaagcgaaacggcggacgcgtgttgggcgacatcgaattgctggcggacattgtgaaccgccgcggcgacaaggtgattgcgattaccggcagcaacggcaaaaccacggtaacgagcctggtcggctatctctgcatcaagtgtgggctggataccgttatcgcgggcaatatcggcgcgccggttttggaggcggaattgcagcgcgaaggcaaaaaggcggacgtgtgggtgttggagctttccagtttccaactggaaaacaccgaaagcctgcgcccgactgcggcgacagtgctgaacatttccgaagaccatctcgaccgctacgacgacttgctcgactacgcgcataccaaagccaagattttccgtggcgacggtgtgcaggttttgaatgcggacgatgcgttctgtcgtgcgatgaagcgcgccgggcgcgaggtgaaatggttttcgttggaatacgaagccgatttttggttggaacgtgagacaggtcgcctgaaacaaggcaatgaagatttgattgccacgcaagatattccgctgcaaggcttgcacaacgccactaacgtgatggctgccgttgccttgtgcgaagccgtcggtttgccgcgcgaagcattgctcgaacacgtcaaaacctttcaaggcctgccgcaccgcgtggaaaaaatcggcgagaaaaatggcgtggtgttcatcgacgacagcaaaggcacgaacgtcggtgcgaccgccgccgcgattgccggtttgcaaaatccgctcttcgtgattttaggcggcatgggcaaagggcaggacttcacgcccctgcgcgacgcgcttgccggcaaggcaaaaggcgtgttcctgatcggtgtcgatgcgccgcaaatccgccgcgatttggacggctgcgatctgaatatgaccgactgcgccactttggaagaagcggttcagaaggcatatgcccaagccgaagcgggcgatatcgtgctgctcagccccgcctgcgcgagtttcgatatgtttaaaggctacgcgcaccgttcggaagtgtttatcggggcgtttaaggctttgtga

SEQ ID NO: 29880 - DNA, 1083 bp, Neisseria meningitidis
atgtttttatggctcgcacatttcagcaactggttaaccggtctgaatatttttcaatacaccacattccgcgccgtcatggcggcgttgaccgccttggcgttttccctgatgttcggcccgtggacgatacgcaggctgaccgcgctcaaatgcgggcaggcagtgcgtaccgacggtccgcaaacccacctcgtcaaaaacggcacgccgacgatgggcggttcgctgattctgaccgccattaccgtgtccaccctgttgtggggcaactgggcaaacccgtatatctggattctcttgggcgtattgctcgccacgggcgcactcggtttttacgacgactggcgcaaagtcgtctataaagaccccaacggcgtgtccgccaaattcaaaatggtgtggcagtcaagcgttgccattatcgccggtttggcattgttttaccttgccgccaattccgccaacaatattttgattgtcccgttcttcaaacaaatcgccctgccgctgggcgtggtcggctttttggtgttgtcttacctgaccatcgtcggcacatccaatgccgtcaacctcaccgacggcttggacggccttgcgaccttccccgtcgtcctcgttgccgccggcctcgccatcttcgcctatgccagcggccactcacaatttgcccaatacctgcaattaccttacgttgccggcgcaaacgaagtggtgattttctgtaccgccatgtgcggcgcgtgcctcggtttcttgtggtttaacgcctatcccgcgcaagtctttatgggcgatgtcggtgcattggcattgggtgccgcgctcggtaccgtcgccgtcatcgtccgccaagagtttgtcctcgtcattatgggcggattatttgtcgtagaagccgtatccgttatgcttcaggtcggctggtataagaaaaccaaaaaacgcatcttcctgatggcgcccatccatcaccactacgaacaaaaaggctggaaagaaacccaagtcgtcgtccgcttttggattattaccatcgtcttggtgttgatcggtttgagtaccctcaaaatccgctga

SEQ ID NO: 29881 - DNA, 1359 bp, Neisseria meningitidis
atgaaaccactggacctaaatttcatctgccaagccctcaagcttccgatgccgtctgaaagcaaacccgtgtcgcgcatcgtaaccgacagccgcgacatccgcgcgggcgatgtgtttttcgcattggcgggcgggcggtttgatgcgcatgattttgttgaagacgtattggctgcgggtgcggcggcggttgtggtttcgcgcgaagattgcgttgcaatggatggcgcgttgaaagtcgatgacacgcttaccgcgttgcaaatgttggcgaaggcgtggcgcgagaatgtgaacccgtttgtgttcggtattaccggctcgggcggcaagacgacggtgaaggaaatgttggctgcggtattgcgccgccgtttcggcgataatgccgttttggcgacggcaggcaacttcaacaaccacatcggattgccgttgactttgttgaaattaaacgaaaaacaccgctatgccgtgattgaaatgggtatgaaccattttggcgaactggcggttttgacacaaatcgccaaacccgatgccgcattggtcaacaacgccatgcgcgcccatgtcggctgcggtttcgacggagtgggcgatattgccaaagcgaaaagcgagatttatcaaggcttatgttcagacggcatggcgctgattcctcaagaagatgccaatatggctgtcttcaaaacggcaacgcttaatttgaatacgcgcactttcggcatcgatagcggcgatgtccacgcggaaaatatcgtgctgaaaccgttgtcgtgcgaatttgatttggtgtgcggcaacgagtgcgcagccgtggttctgcccgttcccggccgccacaatgtccacaacgccgccgccgccgccgcgctgtctttggctgcaggtttgagtttgaacgatgtggcggaaggtttgaaaggcttcagcaatatcaaaggccgtctgaacgtcaaatccggaatcaagggcgcaaccctgattgacgatacttataatgcgaaccctgacagcatgaaagctgcggttgacgtgttggcgcgtatgcctgcgccgcgtattttcgtgatgggcgatatgggcgaactgggtgaggacgaagccgccgccatgcacgccgaagtcggcgcgtacgcccgcgaccaaggcatcgaagcggcttattttgtcggcgacaacagcgtcgaagcggcggaaaaatttggcgcggacggtttgtggttcgccgccaaagacccgttgattcaagtgttgcgccacgatttgcccgaacgcgccaccgtgttggtgaaaggttcgcgctttatgcagatggaagaagtggtcgaggcattggaggataagtga

SEQ ID NO: 29882 - DNA, 1479 bp, Neisseria meningitidis
atgttcagcaagttaacccctttggctgaaaccggcatcccgaccctgtcgtgtgcaaacgcggcagggcgtttgttgcattcagacagccgccaaatcaaacaaggcgatattttcgttgcctgtccgggcgaatatgccgacggacgcagttatatccccgccgccgttgccaacggcgcggcttttgttttttgggacgacgacggcaaatttgcgtggaatcccgaatggaaagtccccaatcaaggcatcaaagatttgaaacaccgtgccggcatattggcggcgcaagtttacggcaacgtttcagacggtctcaaattctggggcgtaaccggaaccaacggcaaaacctccatcacgcaatggctggcgcaagctgccgatttgttgggcgaaaaaaccgccattgtcggcacggtcggcaacggcttttggggtgcattggaagaaaccacgcataccacacccgcccccgtcgatgtccaaaccctgctctaccgtttccgtcaacaaggcgcaacagtcgccgcgatggaagtctccagccacgggcttgaccagtcgcgcgtcaacggcgtgtcattccgcagcgcaatctttaccaacctcacccgcgaccacctcgactaccacggcacgatggaagcctacggtgccatcaagtcgcgcctgttttactggcacggcttgaaacacgcagtcatcaacgtggatgacgaatacggcgcggaactcgcaggtcgtctgaaaaaagattgtcccgatttagccgtttacagttacggcttcagcgagcaagccgacatccgcattatcgatttcaccgcctcttcagacggcatagcagccgtattccaaaccccgtggggcgaagggaaatgccgcacgcgcctgctcggacggttcaacgcgcaaaacctcgccgcctgcatcgccttgctgtgcgccaacggctatccgcttgataatgtattggatgtgctggcaaaaatccgtcccgcttcagggcgcatggactgcatcatgaacagcggcaaacctttggtcgttgtcgattatgcccacacgcccgacgcattggaaaaagcactcgccaccttgcaggaaatcaaaccgcagggtgcggctttgtggtgcgtattcggttgcggcggtaaccgcgatcgcggcaaacgcccgctgatgggcgcggcagccgtacagggcgcggataaagtcgtcgtcaccagcgacaatccgcgtttggaaaatccgcacgacatcatcaacgacatcctgcctgccgttcccgcgcccgaatgcgtcgaagccgaccgtgccgccgccatccgttatgcggttgaacaagccgccgcaaacgacatcatcctgattgccggcaaagggcatgaaaactatcaggatgtacaaggcgtgaagcaccgtttttccgatcttgaaatcgtcggacaggctttgttaactcgtaaataa

SEQ ID NO: 29883 - DNA, 1746 bp, Neisseria meningitidis
atgttgattaagagcgaatataagcctcggatgctgcccaaagaagagcaggtcaaaaagccgatgaccagtaacggacggatcagcttcgtcctgatggcaatagcggtcttgtttgccggtctgattgctcgcggactgtatctgcagacggtaacgtataactttttgaaagaacagggcgacaaccggattgtgcggactcaaacattgccggctacacgcggtacggtttcggaccggaacggtgcggttttggcgttgagtgcgccgacggagtccctgtttgccgtgcctaaagagatgaaggaaatgccgtctgccgcacaattggaacgcctgtccgagcttgtcgatgtgccggttgatgttttgaggaacaagctcgaacagaaaggcaagtcgtttatctggattaagcggcagctcgatcccaaggttgccgaagaggtcaaagccttgggtttggaaaactttgtatttgaaaaagaattaaaacgccattacccgatgggcaacctgtttgcacacgtcatcggatttaccgatattgacggcaaaggtcaggaaggtttggaactttcgcttgaagacagcctgcatggcgaagacggcgcggaagtcgttttgcgggaccggcagggcaatattgtggacagcttggactccccgcgcaataaagccccgaaaaacggcaaagacatcatcctttccctcgatcagaggattcagaccttggcctatgaagagttgaacaaggcggtcgaataccatcaggcaaaagccggaacggtggtggttttggatgcccgcacgggggaaatcctcgccttggccaatacgcccgcctacgatcccaacaggcccggccgggcagacagcgaacagcggcgcaaccgtgccgtaaccgatatgatcgaacccggttcggcaatcaaaccgtttgtgattgcgaaggcattggatgcgggcaaaaccgatttgaacgaacggctgaatacgcagccttataaaatcggaccgtctcccgtgcgcgatacccatgtttacccctctttggatgtgcgcggcatcatgcagaaatcgtccaacgtcggcacaagcaaactgtctgcgcgtttcggtgccgaagaaatgtatgacttctatcatgagttgggcatcggtgtgcgtatgcactcgggctttccgggcgaaactgcaggtttgttgagaaattggcgcaggtggcggcctatcgaacaggcgacgatgtctttcggttacggcctgcaattgagcctgctgcaattggcgcgcgcctataccgcactgacgcacgacggcgttttactgccggtcagctttgaaaaacaggcggttgcgccgcaaggcaaacgcatattcaaagaatcgaccgcgcgcgaggtacgcaatctgatggtttccgtaaccgagccgggcggcaccggtacggcgggtgcggtggacggtttcgatgtcggcgcgaaaaccggcacggcgcgcaagttcgtcaacgggcgttatgccgacaacaaacacatcgctacctttatcggttttgcccccgccaaaaatccccgtgtgattgtggcggtaaccattgacgaaccgactgcccacggttattacggcggcgtagtggcagggccgcccttcaaaaaaattatgggcggcagcctgaacatcttgggcatttccccgaccaagccactgaccgccgcagccgtcaaaacaccgtcttaa

SEQ ID NO: 29884 - DNA, 987 bp, Neisseria meningitidis
gtgagtggagcagaaagttaccggcatatcacggtcttgctgaatgaggcggtggatgcgcttgccgtgcgcgaagacggtgtctatgtggacggtacgttcggcaggggagggcattcccggctgattttgtcgcgtttgggcgatgcggggcggttgattgttttcgacaaagaccctcaggcgattgctgtggcagaagagctggcgcgttcggacaaacgggtcggtgtcgtgcatggcggttttgcttcgtttcagacggcattggacggtttgggtatcggcaaggtggacggtgcgctgtttgatttggggatttcgtccccgcaaatcgatgacggcagccgcggtttcagcttccgtttcgatgcccctttggatatgcgtatggatacgacgcgcggtatgtctgccgcagagtggatagcggttgcgtcggaacaggatttgcacgaggtaatcaagaattatggtgaagagcggtttagccgccagattgcgcgcgccattgttgcgcaacgggcggaaagtccaatcgatacaacccgcaagctggcgcagatcgtggcacaaaacgtccgtactcgcgagcgggggcaggatcctgcgacgcgcaccttccaggcaatccgcatctttattaaccgcgagcttgaagaagtaggggcagtattgccgcaggtcatgtgtcgtctgaaagagggcggacgtttggcggtcattgctttccattcgttggaagaccgcattgtgaagcagtttgtcaaaaaatattcgcaacacgcgcccctgccgcgctgggcggcggtcagggaagcggatttgcccgagccgcccctgaaaatcgcgggcagggcattaaagccgggtgaggcggaaattgccgccaatccgagggcgagaagtgcggttttgcgtgtggcggagcggactgccggtccgataccggaacaatcacagagaaaaacgtctgaatggcaatga

SEQ ID NO: 29885 - DNA, 456 bp, Neisseria meningitidis
atgttcggcggcgcacacgaattaagcatcgacagtaaggggcggttggctgttcctgccaaattccgtgacattctgtcgcgcctctatacgcctgccgtagtggtaacgctcgagtcgaaacacaagctgttgatgtaccctgttgcggagtgggaaaaggttgcggcgcaacttttaaacttaaaagtggcggataaccctgttttgcggcggtttcaaaatcttttgctgcataacgcggaaattttggaatgggacagcgccggccgggtgctggttcctgccggactgaggaagagggtggatttcgaccgtgaagtcgttttggtcggtcgtgccaaccgtttggagctttggggtcgcgagcagtgggaggctgagatggttcaggctttggatgacgatcctgacgaacttgccttccagttgggtcagacggatttgcaattgtga

SEQ ID NO: 29886 - DNA, 207 bp, Neisseria meningitidis
ttggacggcgattgcaatattgccgagctgtccgaatccctgtccatgcctgcgacagcggtttccaaccatttgagccgactgcgcgtggaaggtctggtggactttacgcgttaccaccgcattatcgaataccgcctgatttccgaagacgcggcggcgattctgcggacaatccgcgatttggaaaacaaacgcgcggtatag

SEQ ID NO: 29887 - DNA, 1053 bp, Neisseria meningitidis
gtggatttagaaatgaagaaaataaatggaattggtttttttgagaaaaacctgactttttgggtattaatttgtatggcaataggcatatttattgggaaatattttccttctattccagataggttaggaaaatttgagttctacaacgtgtctataccaacaacaattttactttggataatgatttatccaatgatgttgaaaattgattttaagagtataaaagacataggaaaaaaccctaaaggtctatttattacatggtttgtaaattggatcattaagccactcaccatgtatttaattgcatccttatttttctttgttatttataaaggatttattaataaggaattggcatcagaatatttagctggggcggttttactcggagctgcaccatgtaccgcaatggtatttgtatggagcaagttaacaagaggtgatagtgcttataccttagtacaggtagctagtaacgacttaattattttgattgcatatataccaattgtgagcttcttattaaagattggaaatataaatattccatggggaacacttttattatccattgtattatttattgttgttcctcttattttaagcatggcaactaggagtataatcattaaaaacaaaggggaggactacctaaataaaacttttatccctgcatttgataaatacactatgatgggattattgttgacgttgattataatattttcatttcaaggacagaagatattggatcagccactaaatattatccttattgcaattcctttgataattcaaactctgtttatatttgcaataacatttttcatggcatatttagcaaagctaccatattcaattgcagctccatgtggcatgattggtgcatctaacttttttgagctgtccgttgcagtttctatatctctatttgggctattatcaggagctacgttaacaactgtagtaggtgttctggttgaggttcctgttatgctagccttagtgaggtttgccaattttatggaaaataaatttaatcattga

SEQ ID NO: 29888 - DNA, 1677 bp, Neisseria meningitidis
atgtcccaacaatacgtctattctatgctgcgcgtgagcaaggttgtgccgccgcagaaaaccatcattaaagatatttccctttctttcttccccggcgcgaaaatcggtttgctcggtttgaacggcgcgggcaagtccaccgtgctgcggattatggcgggcgtggataaagaatttgagggcgaagccgtgccgatgggcggtattaaaatcggctacctgccgcaagagcctgagcttgatccggaaaaaaccgtgcgtgaggaagtggaaagcggtttgggcgaagtggctgccgcgcagaaacgtttggaggaagtgtatgccgagtacgccaatcccgatgcggattttgacgcgttggcggaagagcaggggcgtttggaagcgattattgcggcgggttcgtccacgggcggcggtgcggaacacgaattggaaatcgctgccgacgcgctgcgcctgccggaatgggatgccaaaatcgataatttgtccggcggtgaaaaacgccgcgtcgctttgtgcaaactcttgttgagcaagcccgatatgcttttgctggacgagccgaccaaccacttggatgcggaatcggtcgagtggctggagcaatttctcgtgcgcttccccggtacagtcgttgccgtaacacacgaccgctacttcctcgacaacgccgccgaatggattttggaactcgaccgcgggcacggtattccgtggaaaggaaattactcgtcttggttggagcagaaagaaaaacgtttggaaaacgaggcgaaatccgaagccgcgcgcgtgaaagcgatgaagcaggaattggaatgggtgcgccaaaatgccaaaggccgtcaagccaagtccaaagcgcgtttggcgcgttttgaagaaatgagcaactatgaataccaaaaacgcaatgaaacgcaggaaatcttcattcccgtcgccgagcgtttgggtaacgaagtgattgaatttgtgaatgtttccaaatcgttcggcgacaaagtgctgattgacgatttgagcttcaaagtgcctgcgggcgcgattgtcggcatcatcggtccgaacggcgcgggtaaatcgacactgtttaaaatgattgcgggcaaagagcagcccgattccggtgaagtgaaaatcgggcaaaccgtgaaaatgagcttgattgaccaaagccgcgaaggtttgcaaaacgacaaaaccgtgttcgacaacattgccgaaggtcgcgatattttacaggtcgggcagtttgaaatccccgcccgccaatatttgggacgcttcaatttcaaaggcagcgaccaaagcaaaatcacggggcagctttccggcggcgaacgcggacgtttgcacttggcaaaaaccttgttgggcggtggcaatgtgttgctgctggacgaaccgtccaacgacctcgacgtggaaaccctgcgcgcgttggaagacgcattgctggaatttgccggcagcgtgatggtgatttcgcacgaccgctggttcctcgaccgtattgctacgcatatcttggcttgcgaaggcgactccaaatgggtgttctttgacggcaactatcaggaatacgaagccgacaagaaacgccgactcggcgaagaaggcacgaaaccgaaacgcatcaaatacaaaccggtaacgcgttaa

SEQ ID NO: 29889 - DNA, 957 bp, Neisseria meningitidis
atgaaagaatttgacttcatcaaacggtatttgcaaacaggcacggataaggatgtcgtattgggcataggcgacgatgcggcgattgtccgcccgcgtgaaggcttcgatttgtgtttcagtgcggatatgcttttgaaggacaggcatttttttgccgatgtcaaacctgaggacttggcttggaaggttttggccgtcaatatttcagatatggcggcgatgggcgcgataccgcgttgggtgttgttaagtgcggctttgcccgaattggatgaggtatggctggaacggttttgcggcagctttttcggtttggcaaaaaagtttggcgtaacgttaatcggcggcgatacgaccaagggcgatatggcgttcaatgtaaccattatcggcgaattgccgaagggtagggcattgcggcgtgatgcggcggttgcgggcgacgatatttgggtgtcggggcgtgtcggtatggcggcggcggctttgaactgccgtctgaaacggtgtgtgttgccggatgatgtgtttgccgaatgcgaacaaaagctgctccgccccgagccaagggttgggctggggcttgcgctgttgccgtttgcccgggcggcgcaggatgtttcagacggcctcgcgcaagatttggggcatatcctgaccgcttccggcgtgggggcggaaatttgggccgattcgctgccgtctttatccgtattgaaagatattttgccccgagcgcaatggctgtcttatactttggcgggcggcgacgattacgagctggtgtttaccgcgccggaaagttgccgcagccgcgtgcttgatgcggcagaacggtgcggcgtgccggtaacgcgcatcggcaaaatcaacggaggatgccgtctgaaggttttagatgccgacggcagggaattggaactacattctttaggattcgatcattttggctga

SEQ ID NO: 29890 - DNA, 1575 bp, Neisseria meningitidis
atggctcaaatccaaatgagcgcaaatgttaaaaccatcaacgccgtctttgccgccatgctggtaggtacagtcggctattttatttattggggcttgggttatacccattacaattacgccgccttattcattattgccacgatgttcggcgtgtttatggcgttcaacatcggcggcaacgatgttgccaattctttcggcaccagcgtcggtgcgggtacgctgaccatcccgcaggctttgctgattgcggcggtatttgaggtcagcggcgcggtcatcgcgggcggtgaggtaaccaataccatacgcaaaggcatcgtcgatttgaagggtgttgatttcgaacccatacagtttgtgtttattatgatgtccgcgcttttggcggcggcgttgtggctgttgtttgcctcgaaaaaagggcttccggtatctaccacccattccattatcggcggcattgtcggcagcgcggtatgtatggcggtaatgaacgatgccgcatcgggcgatttgatacgttggggcaagctgggcggtattggtgtttcttgggtattgtcgcccgtgttgggcggcgcggtgtcctatttcctgttttcgcgcgtcaagaaaaacgtcttagattacaacgcttgggcggaaggcacgctcaagggcatcaagcaggaaaaaaaggcctataaagaacggcaccgcctgtttttcgagggtttgtccgaagccgaaaaagtcgagtacgccaccaaaatggcgcacgacgcgcaaatttacgacgaacccgaattcgatccgcaagagctgcaatcggagtattaccgcggtctttatgcgttcgacaaccgtaaaaacaatgtcgattcctacaaagcgctgcattcttggattccctttatcgcttcgttcggcgcgatgatgatttccgctatgctgattttcaagggcttgaaaaacctgcatttggggatgagcaacgtcaacagcttcctgaccatctttatgataggcgcggcggtgtggatggggacgtttgtgtttgccaaaagcctcaagcgtaaagacttgggcaaatcaacctttcagatgttttcatggatgcaggtctttaccgcctgcggcttcgcattcagccacggggcgaacgatatcgccaacgccatcggtccgtttgccgcgattatggatgttttgcgtaccaacagcgttgccgcgcaaaatgtcgtccccccgattgcgatgctgactttcggtatcgcgctgattgtcggtttgtggtttgtcggtaaagaggtgattaaaaccgtcggtacgagtttggcggaaatgcatcctgcttcgggttttaccgccgaactgtccgccgcatccgtcgtgatgggcgcgtcgctgatggggctgcccgtgtccagtacgcatatcttggtcggcgcggtactcggcatcggtctggtcaaccgcaatgccaactggaaactgatgaagcccatcggtttggcgtgggtcattaccctgcctgccgccgccgtattgtcggttgtctgctacttggttttacaggcagtattctga

SEQ ID NO: 29891 - DNA, 1419 bp, Neisseria meningitidis
atgtctattaaaaacgccgtaaaattgattgaagaaagcgaagcccgctttgtcgatttgcgctttaccgataccaaaggcaagcagcaccactttaccgtgcctgcgcgcatcgtgttggaagaccccgaagagtggtttgaaaacggtcaggcgtttgacggttcgtctatcggcggctggaaaggcattcaggcttccgatatgcagttgcgtcccgatgcgtctacggccttcgtcgatcctttttatgatgatgcgactgttgtgttgacttgcgacgttatcgatcccgccgacggtcagggttacgaccgcgacccgcgctccatcgcacgccgcgccgaggcctatttgaaatcttccggtatcggcgacacggcatacttcggccccgagcctgaattcttcgtcttcgacggcgtagaatttgaaaccgacatgcacaaaacccgttacgaaatcacgtccgaaagcggcgcatgggcaagcggcctgcacatggacggtcaaaacaccggccaccgccctgccgttaaaggcggttacgcgcccgttgctccgattgacgcgggacaagacctgcgctccgcgatggtaaacattttggaagaactcggcatcgaagtcgaagtccaccacagtgaagtcggtaccggcagccaaatggaaatcggcacgcgtttcgccaccttggtcaaacgcgccgaccaaacccaagacatgaaatatgtgattcaaaacgttgcccacaacttcggcaaaaccgccactttcatgcccaaacccattatgggcgacaacggcagcggtatgcacgttcaccaatccatctggaaagacggtcaaaacctgttcgccggcgacggctatgccggtttgagcgacaccgccctttattacatcggcggcatcatcaaacacgccaaagccctgaacgcgattaccaatccgtccaccaactcctacaaacgcctcgtgccgcactttgaagcgccgaccaaactcgcctactccgccaaaaaccgttccgcttccatccgcattccgtccgtgaacagcagcaaggcgcgccgcatcgaagcgcgtttccccgatccgaccgccaacccatacttggcgttcgccgctttgttgatggccggtttggacggtattcaaaacaaaatccatccgggcgatcctgccgataaaaacctctacgatctgccgccggaagaagatacattggtgccgaccgtttgcgcttctttggaagaagcactcgccgccctcaaggccgaccacgaattcctcctgcgcggcggcgtgttcagcaaagactggatcgacagctacatcgctttcaaagaagaagacgtacgccgcatccgcatggcacctcacccgctggaatttgaaatgtattacagcctgtaa

SEQ ID NO: 29892 - DNA, 816 bp, Neisseria meningitidis
atgactatgcacgccctcccccgctacgccgtttttggcaaccccgtcgcccacagcaaatcgccgcaaattcatcaacaatttgcccttcaggaaggcgttgacattgaatacgaacgcatttgcgccgacatcggcggtttcgcgcaggcggtttcgacattttttgaaacaggcggttgcggggcaaacgttaccgtaccgttcaagcaggaagcgtttcatctggcggacgagcattctgaacgcgcattggctgccggcgcggtcaacacgctgatttttctgaaaaacggaaaactgcgcggcgacaataccgacggtatcggtttggccaacgacatcacgcaggtcaaaaacattgccatcgaaggcaaaaccatcttgcttttgggcgcgggcggcgcggtgcgcggcgtgattcctgttttgaaagaacaccgtcctgcccgtatcgtcattgccaaccgtacccgcgccaaagccgaggaattggcgcagcttttcggcattgaagccgtcccgatggcggatgtgaacggcggttttgatatcatcatcaacggcacgtcgggcggtctaaacggtcagattcccgatattccgcccgatatttttcaaaactgcgcgcttgcctacgatatggtgtacggctgcgcggcaaaaccgtttttagattttgcacgacaatcgggtgcgaaaaaaactgccgacggactgggtatgctagtcggtcaagcggcggcttcctacgccctctggcgcggatttacgcccgatatccgccccgttatcgaatacatgaaagccctataa

SEQ ID NO: 29893 - DNA, 702 bp, Neisseria meningitidis
atgttccgcatcatcaaatggctgattgccctgcccgtcggcatctttatctttttcaatgcctatgtgtacggcaacatcattacctaccgcgccgtcgcgccccatcggactgcctttatgtcgatgcggatgaagcagtttgaacaggaaggtcgcgatgtcgcactggattaccgctggatgccctacaaacgcatttccaccaacctgaaaaaagccctgattgcttccgaagatgcccgtttcgccgggcacggcggcttcgattggggcggcattcaaaacgccatcaggcgcaaccggaacagcggcaaagtgaaggcgggcggctcgaccatcagccagcagcttgccaaaaacctgtttttaaacgaaagccgcagctatatccgcaaaggcgaagaagcggcgattaccgcgatgatggaagccgttaccgacaaagacaggatttttgaactgtatttaaactcaatcgaatggcactacggcgttttcggcgcggaagccgcgtcccggtatttttatcaaatacccgccgccaagctgaccaaacagcaggcggcaaaactgacggcgcgcgtccccgccccgctctactacgccgaccatccgaaaagcaaacggctccgcaacaaaaccaatatcgtgctcagacgcatgggttcggcagagttgcctgaaagcgacacggactga

SEQ ID NO: 29894 - DNA, 1056 bp, Neisseria meningitidis
atgactattttatcggacgttaaagcattaggacaacaaatctggctggacaacctttcccgctcgctcgtgcaaagcggcgaattggcgcaaatgctgaaacaaggcgtgtgcggcgtaacttccaatcccgccatctttcaaaaagccttcgccggcgatgcgctttacgccgacgaggttgccgccctcaagcagcaagacctgacccccaaacaacgctacgaaacgatggcggttgccgatgtgcgtgccgcctgcggcgtctgtcttgccgaacacgaatccaccggcggcaaaaccggcttcgtcagcctcgaagtttcgcccgaattgtccaaagacgcgcaaggcacggttgaagaagcgcgccgcctctacgccgccatcgggtgcaaaaacgcgatgattaaagtgcctgccaccgacgcaggcatcgatgcgctcgaaaccctcgtttcagacggcatcagcgtgaacctgaccctgctgttctcacgcgcccaaaccctcaaagcctacgccgcctacgcgcgcggcattgccaaacgcttggcagccggacaaagcgttgcccatatccacgtcgtcgccagcttcttcatctcgcgtgtggacagtgcgctggacacaacactgcccgaccggctcaaaggcaaaatcgccatcgcccttgccaaagccgcctatcaagattgggaacaatatttcaccgcccccgaatttgccgcactggaagcccaaggcgcaaaccgcgtgcagcttttatgggcatctaccggcgtgaaaaacccagcctatcccgacacgctctacgttgacagcctgatcggcgcgcacaccgtcaacaccgttcccgatgccacgctcaaagcctttatcgaccacggcacagccaaagccacgctgaccgaaggcgcggacgaagcgcaagcgcagcttgccgaaattgccgcgctcggcatcgatgtcgaaaccttggcggcgcgtttgcaggaagacggtttgaaacaatttgaagaagcctttgaaaaactgctcgcaccgttggtttaa

SEQ ID NO: 29895 - DNA, 888 bp, Neisseria meningitidis
atgtacacaggacgtttcgcccccagcccgaccgggctgctccacatcggctcgctgctgaccgccgccgcttcctatgccgatgcacgctcaaacggcggcaaatggctggtccgcatggaagacctcgatccgccgcgcgaaatgccgggggcggcaaaccatatcctgcacacgcttgaggcattcggattcgagtgggacggagaagtcgcctatcagagccgccgttacgccctgtatgaagaaacactatgccgtctgcaaaccgccggactggtctatccctgccattgcagccgcaaagactggcagaccggggcaaggcggggcgcagacgggttcgtctataacggacgctgccgcaatccgcagcaacgccctgcaccgcaaggcaaacagccggcgtggcgcatccgcgtccccgaccgcgttatcggtttttcagacggcatcgtcggcggttacgcccaaaacctcgccggcgacatcggcgatttcgtcctgcttcgtgcagacggttactgggcataccaactcgccgtcgttgccgacgatgccgaacagggcgttacccacatcgtccgcggacaagacctgctcgtttctacgccgcgccaaatctatttgcagcagtgtttggacgttccgacaccgcaatatgcccacctgccgctgctgaccaacgcacaagggcagaaatggtcgaaacagacgctcgcacccgcattggatttaaaccgccgcgaacaactcctccgccaagtgttccgttacctcaacctgcccgaagcaccggaagccgaccgccctgccgaactgctcgactgggcggtggcacactgggatatggacaaagtgccgaaacacgccattaccaccccctaa

SEQ ID NO: 29896 - DNA, 1011 bp, Neisseria meningitidis
atgaacgacaatacacacacccttcccccgcgccgcctttccgtcgccccgatgctcgactggacggacaggcactaccgttatatggcgcgccagattacccgcaatacttggctgtacagcgaaatggtcaacgccggcgcgattgtttacggcgacaaagaccgctttttgatgtttaacgaaggcgagcagcccgtcgccctgcaactgggcggcagcgacccgtccgatttggcgaaagccgccaaagccgccgaagaatacggctacaacgaggtcaacctcaactgcggctgccccagtccgcgcgtccagaaaggcgcgttcggcgcgtgtctgatgaacgaagtcgggctggttgccgactgcctcaacgccatgcaggacgcggtcggtattcccgttaccgtcaaacaccgcatcggtgtggacaggcagaccgaataccaaaccgttgccgatttcgtcggcacgctgcgcgacaaaaccgcctgcaaaaccttcatcgtccacgcccgcaacgcttggctggacggtctttcccccaaagaaaaccgcgacgttcccccgttgaaatacgattacgtttaccgcctcaagcaggagtttcccgggctggaaatcatcatcaacggcggcatcaccaccaacgaagcaatcgccggacacctgcaacacgttgacggcgtgatggtcgggcgcgaggcgtaccacaacccgatggtgatgcgcgaatgggacagattgttttacggcgacactgcgaacccgatcggatacgccgatttggtgcaacgcctctacacatacagccaagcccaaatccaagccggacgcggcacaatcctgcgccatatcgtccgtcacagcctcgggctgatgcacggcttgaaaggcgcgcggacttggcggcgtatgctttccgacgcaacgctcttgaaagacaacgacggcagcctgattctcgaagcgtggaaagaggtcgaacgggcaaatacgcgcgaatag

SEQ ID NO: 29897 - DNA, 531 bp, Neisseria meningitidis
atgaaattcgtcagcgaccttttgtctgtcatcttgttttttgctacttataccgttaccaaaaatatgattgccgctacggcggttgccttggttgccggtgtggttcaggcggcttttctgtattggaaatataaaaagctggatacgatgcagtgggtcggactggtgctgattgtcgtattcggcggcgcaaccattgttttgggcgacagccgcttcattatgtggaagccgagcgttttgttttggctgggcgcgctgttcctgtggggcagccacctcgccggtaaaaacggcttgaaggcgagtatcggcagggagattcagcttccggatgccgtatgggcgaaattgacgtatatgtgggtcggtttcctgatttttatgggtatcgccaactggtttgtgtttacccggttcgagtcgcaatgggtcaactataaaatgttcggctcgactgcactgatgcttgttttctttattattcagggtatttatctgagtacctgtctgaaaaaggaggattga

SEQ ID NO: 29898 - DNA, 417 bp, Neisseria meningitidis
atgcgcttactccatactatgctccgcgtgggcaatctcgaaaaatccctcgatttctaccaaaacgttttgggtatgaaactgctccgccgaaaagattatcccgaaggcagatttacccttgccttcgtcggttacggcgatgaaaccgacagcacggttttggaactgacgcacaactgggatacggaacgatacgacttgggcaacgcctacggacacatcgcggttgaagtggacgatgcctacgaagcctgcgaacgtgtgaagcggcagggcggaaacgtcgtccgcgaagccggcccgatgaaacacggcacaaccgtgatagccttcgtcgaagaccccgacggatacaaaatcgagttcattcaaaagaaaagcggtgacgattcggttgcctatcaaactgcctga

SEQ ID NO: 29899 - DNA, 999 bp, Neisseria meningitidis
atgagcagacccgtacccgccgtattcggcagcgtttttcacagtcaaatgcccgtcctcgcctaccgcgaaggcaaatggcagccgaccgaatggcaatcttcccaagacctctccctcgtaccgggtgcgcacgccctgcactacggcagcgaatgtttcgagggactgaaagccttccgtcaggcagacggtaaaatcgtactgttccgtccgactgccaatatcgcgcgtatgcggcaaagtgcggacattttgcacctgccccgccccgaaacccaagcctatctcgatgctttggtcgaactggtcaaacgtgccgccgacgaaattcccgatgcgcctgccgccctgtacctgcgcccgaccttaatcggtaccgatcccgtcatcggcaaggccggttctccttccgaaaccgccctgctgtatattttggcttcccccgtcggcgactatttcaaagtcggctcgcccgtcaaaattttagtggaaaccgaacacatccgctgcgccccgcatatgggccgcgtcaaatgcggcggcaactacgcttccgccatgcactgggtgctgaaggcgaaagccgaatacggcgcaaaccaagtcctcttctgcccgaacggcgacgtgcaggaaaccggcgcgtccaactttatcctgattaacggcgatgaaatcattaccaaaccgctgaccgacgaatttttgcacggcgtaacccgcgattccgtactgacggttgccaaagatttgggctataccgtcagcgaacgcaatttcacggttgacgaactcaaagctgcggtggaaaacggtgcggaggcgattctgaccggtacggcagccgtcatctcgcccgttacttccttcgtcatcggcggcaaagaaatcgaagtgaaaagccaagaacgcggctatgccatccgtaaggcgattaccgacatccagtatggtttggcggaagacaaatacggctggctggttgaagtgtgctga

SEQ ID NO: 29900 - DNA, 786 bp, Neisseria meningitidis
atgggttttctgcaaggcaaaaaaattctgattaccggcatgatttccgagcgttccatcgcttatggcatcgccaaagcctgccgcgaacaaggcgcggaactggcgtttacctacgttgtggacaaactggaagagcgcgtccgcaaaatggcggcggaattgggttccgaactcgtattccgctgcgatgtcgccagcgacgacgaaatcaaccaagtgttcgccgacttgggcaaacattgggacggcttggacggtttggtgcattccatcggcttcgcgccgaaagaagccttgagcggcgacttcctcgacagcatcagccgcgaagcgttcaacaccgcacacgaaatttccgcatacagcctgcccgcattggcaaaagccgcccgtccgatgatgcgcggcagaaactccgccatcgttgccctgagctacttgggcgcggtgcgcgcgattccaaattacaacgtgatgggtatggcaaaagccagccttgaggcgggcatccgttttaccgccgcctgtctgggcaaagaaggcatccgctgcaacggcatttccgccggcccgattaaaacgcttgccgcctccggtatcgccgatttcggcaaacttttgggacacgtcgccgcccacaatccgctgcgccgcaacgttaccattgaagaagtcggcaataccgccgccttcctgctgtccgacctgtcgtccggcattaccggcgaaatcacttacgttgacggcggttacagcattaatgccttgagcaccgagggataa

SEQ ID NO: 29901 - DNA, 822 bp, Neisseria meningitidis
atgtctttgcaaaacatcatcgaaaccgcctttgaaaaccgcgcggacattaccccgaccaccgttactcccgaagtcaaagaagccgtgttggaaaccatccgccaactcgattccggcaaactgcgcgttgccgaacgcttgggcgtgggtgagtggaaagtcaacgaatgggcgaaaaaagccgtgttgctgtccttccgcatccaagacaacgaagtcctcaacgacggcgtgaacaaatacttcgacaaagtgccgaccaagtttgccgactggtctgaagacgagttcaaaaacgcaggcttccgcgccgttccgggtgcggttgcccgacgcggcagctttgtggcgaaaaatgtcgtgctgatgccgtcttacgtcaacatcggcgcatacgtcgacgaaggcgcgatggttgatacttgggcgactgtcggctcttgcgcgcaaatcggtaaaaacgtgcacttgagtggcggcgtcggtatcggcggcgtactcgaacccctgcaagccagcccgaccattattgaagacaattgcttcatcggtgcgcgttccgaaatcgttgagggcgtgattgtcgaagaaggcagcgtgatttctatgggcgtgttcatcggtcaatccaccaaaatcttcgaccgcaccaccggcgaaatctaccaaggccgcgtaccggccggttcggtcgtcgtgtccggcagtatgccttccaaagacggcagccacagcctttactgcgccgtcatcgtcaaacgcgtggacgcgcaaacccgtgcgaaaaccagcgtgaacgaattgttgcgcggcatctga

SEQ ID NO: 29902 - DNA, 975 bp, Neisseria meningitidis
atgctcgagaatctgccctatttccagcgacatctgcctgaagaccttgccaaagtcaatgaagtcatcaaccgtgcggtgcaatccgatgtcgcactgatttcgcaaatcggtacatatatcatcagcgcgggcggcaaacgcctgcgtccgattatgacgattttggcgggtaaggcggtcggttatgatgacgagaaactgtattcgctggcggcgatggtcgagtttatccacacttccaccctcctgcacgacgatgtcgtcgatgaaagcgatttgcgccgtgggcgggcaacggcaaacaatctgttcggcaatgcggcggctgtgttggttggcgactttttatacacgcgcgcctttcaactgatggttgcctcgggcagtatgcgcgttttggaagtgatggcggatgcaaccaacattattgccgagggcgaagtcatgcagctgatgaacatcggcaatacggacattaccgaagaacaatatatccaagtcatccaatataaaacggcaaaattgtttgaagctgccgctcaagtcggcgcaattttgggcaaggcttcccccgaacacgaacgggcgttgaaagactacggtatgtatgtcggtacggcattccaaattattgacgatgtgctggactattctggcgaaaccgaagaaaccggcaaaaacgtcggcgacgatttggcggaaggaaaaccgactttgcctttgatttatctgatgcgtcagggttccgaacaggttgcgaacgatgtgcgtactgctttggaaaatgcagatcgcagctattttgagaaaatccacgattatgtcgtccgttcggatgcgttggcatattcgataggcgaggcgcgcaaagcagtcgattgtgccgttaccgccttggatgccctgcccgacagcgaagtgaaggatgccatgattcagctggcgaaggaatctttggtcagggtgtcttga

SEQ ID NO: 29903 - DNA, 309 bp, Neisseria meningitidis
atgtacgcggtcgtaaaaaccggcggcaaacagtataaagtttccgtcggcgaaaaattgaaagtagaacagataccagccgaactcgacagccaaatcgaactgaccgaagttttgatgattgctgacggcgaatctgtaaaagttggcgcaccctttatcgaaggtgcaaaagtaacggctaaagtagtggcacacggtcgtggcgaaaaagtccgcatcttcaaaatgcgccgccgcaaacactaccaaaaacgccaaggccaccgccaaaatttcacccaaatcgaaatcgtggcaatcgcctaa

SEQ ID NO: 29904 - DNA, 273 bp, Neisseria meningitidis
atggcaagtaaaaaagcaggcggcagcacccgcaacggtcgcgattcagaagccaaacgcttgggcgttaaagcctacggcaacgagctgattcccgcaggttccatcatcgtacgccaacgcggtaccaaattccacgcaggcgacaacgtaggtatgggcaaagaccacactttgttcgccaaagttgacggttatgtcgaattcaaaaccaaaggcgcgctgaaccgtaaaactgtcagcatccgtccttacaccggttctgaagaataa

SEQ ID NO: 29905 - DNA, 1185 bp, Neisseria meningitidis
atgagtttacacagcgacatcctcgtcgtcggcgcaggcccggcgggtttaagttttgcagccgaacttgccggcagcggtttgaaagttaccctgatcgaacgcagcccactgactgttctgcaaaatcctccatatgacggacgcgaaatcgccctgacccatttttcccgcgaaatcatgcagcgtttgggtatgtgggacaaaattcccgaaaacgaaatctaccctttgcgcgatgccaaagtgctgaacggacgttccgactaccagctccactttccccaaccgaccgaggcgcgcggcgagcctgccgactgtttgggctatctgatttccaaccacaatatccgccgcgctgcctacgaagtcgtatcccaactcgacaacattaccattctgaccgatacggccgttaaagaagtcaaaacatctgacaacgaagcacaagtcattttagaaaacggcaaaatcctgaccgcccgcctgcttttggcggcagacagccgtttttcgcaaacccgccgacaactcggcatttcttcagatatgcacgactacagccgaaccatgttcgtctgccgcatgaaacatactctttccaaccaacataccgcttacgaatgcttccattacgggcgcaccatcgcactgctgccgctggaagaacacctgaccaataccgtcattaccgtcgataccgataaaatcaacagcgttcaaaacctttcgcccgaagaattggcggcaagcgtaaaagaacagctcaagggcaggctcggcgatatggaattggtcagcagcatccaccattacccccttgtcggtatgattgccaaacgtttctacggcaaacgcagcgcgctgatcggcgatgcggctgtcggtatgcaccccgttaccgcacacggtttcaacttgggtctgtccagcgcagatattttggcaaaactgatactcgaagccgagcagcgcggtcaggacatcggcgcggcttccttgttggaaaaatacagcagcaaacatatgctgcatgcccagccgctttatcacggaaccaatatgatgctgaaactgtttaccaatgagaccgcgccggcaaaactgctgcgcggtttggtattgcgtgccggcaacaacttcccgccgctgaaaaaactgattaccaaacaactgaccggttga

SEQ ID NO: 29906 - DNA, 156 bp, Neisseria meningitidis
atgcgcgataaaatcaaactggaatccagtgcaggtactggtcacttctacaccactaccaaaaacaaacgcactatgcccggcaaattggaaatcaaaaaatttgacccagttgcccgcaaacacgtagtgtataaagaaactaaactgaaataa

SEQ ID NO: 29907 - DNA, 234 bp, Neisseria meningitidis
atggcacgagtttgcaaagtgaccggcaaacgcccgatgtccggcaacaacgtatcgcacgccaacaacaaaaccaaacgccgttttttgcccaacttgcaatcacgtcgtttttgggtagaaagtgaaaaccgctgggttcgcctgcgcgtttccaacgctgcactgcgtaccatcgacaaagtaggcattgatgtcgtattggctgatttgcgtgctcgcggcgaagcttaa

SEQ ID NO: 29908 - DNA, 687 bp, Neisseria meningitidis
atgtacgcatttaccgccgcacagcaacagaaggcactcttctggctggtgctttttcatatcctcatcatcgccgccagcaactatctggtgcagttccccttccaaatttccggcatccacaccacttggggcgcgttttcctttcccttcatcttcctcgccaccgacctgaccgtccgcattttcggttcgcacttggcacggcggattatcttttgggtcatgttccccgcccttttgctttcctacgtcttttccgttttgttccacaacggcagttggacgggcttgggcgcgctgtccgaattcaacacctttgtcggacgcatcgcgctggcaagttttgccgcctacgcgctcggacaaatccttgatatttttgtgttcaacaaattacgccgtctgaaagcgtggtgggttgccccgactgcatcaaccgtcatcggcaacgccttagatacgttggtatttttcgccgttgccttctacgcaagcagcgatggatttatggcggcaaactggcagggcatcgcttttgtcgattacctgttcaaactcaccgtctgcggtctgtttttcctgcccgcctacggcgtgattctgaatctgctgacgaaaaaactgacgaccctgcaaaccaaacaggcgcaagaccgccccgcgccctcgctgcaaaatccgtaa

SEQ ID NO: 29909 - DNA, 1860 bp, Neisseria meningitidis
atgttcagagctcagcttggttcaaatactcgttctaccaaaatcggcgacgatgccgatttttcattttcagacaagccgaaacccggcacttcccattatttttccagcggtaaaaccgatcaaaattcatccgaatatgggtatgacgaaatcaatatccaaggtaaaaactacaatagcggcatactcgccgtcgataatatgcccgttgttaagaaatatattacagatacttacggggataatttaaaggatgcggttaagaagcaattacaggatttatacaaaacaagacccgaagcttgggaagaaaataaaaaacggactgaggaggcgtatatagaacagcttggaccaaaatttagtatactcaaacagaaaaaccccgatttaattaataaattggtagaagattccgtactcactcctcatagtaatacatcacagactagtctcaacaacatcttcaataaaaaattacacgtcaaaatcgaaaacaaatcccacgtcgccggacaggtgttggaactgaccaagatgacgctgaaagattccctttgggaaccgcgccgccattccgacatccatatgctggaaacttccgataatgcccgcatccgcctgaacacgaaagatgaaaaactgaccgtccataaagcgtatcagggcggtgcggatttcctgttcggctacgacgtgcgggagtcggacaaacccgccctgacctttgaagaaaaagtcagcggacaatccggcgtggttttggaacgccggccggaaaatctgaaaacgctcgacgggcgcaaactgattgcggcggaaaaggcagactctaattcgtttgcgtttaaacaaaattaccggcagggactgtacgaattattgctcaagcaatgcgaaggcggattttgcttgggcgtgcagcgtttggctatccccgaggcggaagcggttttatatgcccaacaggcttatgcggcaaatactttgttcgggctgcgtgccgccgacaggggcgacgacgtgtatgccgccgatccgtcccgtcaaaaattgtggctgcgcttcatcggcggccggtcgcatcaaaatatacggggcggcgcggctgcggacgggcggcgcaaaggcgtgcaaatcggcggcgaggtgtttgtacggcaaaatgaaggcagccggctggcaatcggcgtgatgggcggcagggctggccagcacgcatcagtcaacggcaaaggcggtgcggcaggcagttatttgcatggttatggcgggggtgtttatgctgcgtggcatcagttgcgcgataaacaaacgggtgcgtatttggacggctggttgcaataccaacgtttcaaacaccgcatcaatgatgaaaaccgtgcggaacgctacaaaaccaaaggttggacggcttctgtcgaaggcggctacaacgcgcttgtggcggaaggcgttgtcggaaaaggcaataatgtgcggttttacctgcaaccgcaggcgcagtttacctacttgggcgtaaacggcggctttaccgacagcgaggggacggcggtcggactgctcggcagcggtcagtggcaaagccgcgccggcattcgggcaaaaacccgttttgctttgcgtaacggtgtcaatcttcagccttttgccgcttttaatgttttgcacaggtcaaaatctttcggcgtggaaatggacggcgaaaaacagacgctggcaggcaggacggcgctcgaagggcggttcggcattgaagccggttggaaaggccatatgtccgcacgcatcggatacggcaaaaggacggacggcgacaaagaagccgcattgtcgctcaaatggctgttttga

SEQ ID NO: 29910 - DNA, 489 bp, Neisseria meningitidis
atgctcaaaataaccctaattgcggcgtgtgcggaaaacctgtgcatcggggcgggcaatgctatgccttggcacatccccgaagatttcgcatttttcaaagcctataccttgggcaaacccgtcattatggggcggaaaacgtgggaatccctgcccgtcaaacccctgcctggacggaggaacatcgtcatcagccggcaggcggattattgcgcggcaggcgcggaaacggcggcaagtttggaggcggcattggcattgtgcgcaggcgcggaagaagccgtcattatgggcggcgcgcagatatacggacaagcgatgccattggcgaccgatttgcggataaccgaagtggatttgtctgtggaaggagatgcatttttccccgcaatagaccggacgcattggaaagaagcagagcggacggaacgccgtgtcagcagcaaaggcacgagctatgcttttgtgcattatttgagatattga

SEQ ID NO: 29911 - DNA, 807 bp, Neisseria meningitidis
atgccgacagttttcatctttttgacggcggtttacgcaggattgggtgcatttgcatggcactgccaacagcaggggctcggccgggattacccgtggaagacggaattgccggttttgggcgcggcattgaccgtccatggcgcggcactgcttatgccggtcattcaagacaaaatcatcattatgggctttgggtattccggcagcctgattgtttggatgatgctgtttatttattttgccggcagcttcttttattcgctgcgcggagtgcagttgctgctgtatccttgcgccgcactgatgctgctgtcaggtttggtttttcctggaaaattctcgggatatgaaattaccgaccttccctttatgctgcatatcggaacttcgctgcttgcatacgggctgttcggcatcgcaacattattgtccgttttgaccctgctgctgaatcggagcctgcaccgcaggaacttctccaagctcgcaggattcctgccgtcgctgctcagtttggaaaaactcatgttccaggccatgtgggcaggtttcatcctgctgacctattccgtcgtcagcggaacattttttgccgaagccgtattcggcaaacccatgacctttacccataaaaccgtattcggcatattgtcatggctgatttacggcggactgctgctcaagcacagcatgaccgcatggcgcggcaaaaaagccgccgtgtggaccatcatcggatttgtcagcctgatgattgcctatatgggcagcaagttcgtattggaaatcattctgaacagataa

SEQ ID NO: 29912 - DNA, 1371 bp, Neisseria meningitidis
atgttagacaatttaaccggccgcttcagcaatgttctcaaaaacatccgcgggcaggccaaactgaccgaagacaatattaaagaagccttgcgcgaagtccgcctcgccctgcttgaggcggatgtcgccctgcctgtcgtcaaagagttcatcaacaacgtcaaagaaaaggccctcggtcaggaagtagcgggcagcctgacgccggatcaggcatttatcggcgtggtcaacaaagccctgaccgaactgatgggcagggaaaacaaaacgctggatttgtcggttgcgccacccgccgtcgtgttgatggcgggtttgcagggtgccggtaagacaacaaccgtcggcaaactcgcccgcctgctgaaaaacgatcagaagaaaaaagttttggtggtatctgccgacgtttaccgccctgccgcgattgaacagctgcgcctgttggctgaacaggtcggcgtggactttttcccatccgataccaaccaaaaaccggttgaaattgccactgccgccgtcgattacgccaaaaaacatttttacgatgtcttaatggtcgataccgccggccgtttggcaatcgatgaagagatgatgaatgaaatcaaagcccttcatgctgcggtcaacccggttgaaaccttgtttgttatcgatgccatgttgggtcaggatgcggtgaacactgctcaggcatttaatgaagccctgccgctgaccggtgtcgtattgaccaagatggacggcgactcgcgcggcggtgcggcattgtccgtacgccatgtaaccggcaaaccgattaaatttatcggtgtcggcgagaaaatcaacggcctcgaacctttccaccccgaccgtcttgccagccgtatcctcggcatgggcgacgtattgaccctgattgaagacgttcaaaaaggtattgatgaagccgccgccgccaaaatggcgaaaaagctgcaaaaaggcaaaggcttcgatctcaatgactttaaagaacaaatccagcagatgcgcaatatgggcggcttggaaaacctgatgtcaaaaatgccgggcgaactgggtcaaatatcgaaacaaatccccgaaggtacggctgaaaaagcgatgggcaaagtggaagccatcatcaactcgatgacccctaaagaacgcgccaaccctgccctgctcaaagctagccgcaaacgccgtattgcgatgggtgcgggtacgaccgtgcaggaagtgaataaattgctcaaacagtttgaacaaatgcaacaaatgatgaagatgttcagcggcaacggcttgggcaaactgatgcgcttggccaaaggcatgaagggaatgaaaggcatgttcccaggtttgtaa

SEQ ID NO: 29913 - DNA, 1869 bp, Neisseria meningitidis
atgcaagctgtccgatacagaccggaaattgacggattgcgggccgtcgccgtgctatccgtcatgattttccacctgaataaccgctggctgcccggaggattcctgggggtggacattttctttgtcatctcaggattcctcattaccggcatcattctttctgaaatacagaacggttctttttctttccgggatttttatacccgcaggattaagcggatttatcctgcttttattgcggccgtgtcgctggcttcggtgattgcctctcaaatcttcctttacgaagatttcaaccaaatgcggaaaaccgtggagctttctgcggttttcttgtccaatatttatctggggtttcagcaggggtatttcgatttgagtgccgacgagaaccccgtactgcatatctggtctttggcagtagaggaacagtattacctcctgtatcctcttttgctgatattttgctgcaaaaaaacaaaatcgctacgggtgctgcgtaacatcagcatcatcctatttctgattttgactgccacatcgtttttgccaagcgggttttataccgatattctcaaccaacccaatacttattacctttcgacactgaggtttcccgagctgttggcaggttcgctgctggcggtttacgggcaaacgcaaaacggcagacggcaaacagcaaatggaaaacggcagttgctttcatcactctgcttcggcgcattgcttgcctgcctgttcgtgattgacaaacacaatccgtttatcccgggaatgaccctgctccttccctgcctgctgacggcactgcttatccggagtatgcaatacgggacacttccgacccgcatcctgtcggcaagccccatcgtatttgtcggcaaaatctcttattccctatacctgtaccattggatttttattgctttcgcccattacattacaggcgacaaacagctcggactgcctgccgtatcggcggttgccgcgttgacggccggattttccctgttgagttattatttgattgaacagccgcttagaaaacggaagatgaccttcaaaaaggcatttttctgcctctatctcgccccgtccctgatacttgtcggttacaacctgtacgcaagggggatattgaaacaggaacacctccgcccgttgcccggcgcgccccttgctgcggaaaatcattttccggaaaccgtcctgaccctcggcgactcgcacgccggacacctgcgggggtttctggattatgtcggcagccgggaagggtggaaagccaaaatcctgtccctcgattcggagtgtttggtttgggtagatgagaagctggcagacaacccgttatgtcgaaaataccgggatgaagttgaaaaagccgaagccgttttcattgcccaattctatgatttgaggatgggcggccagcccgtgccgagatttgaagcgcaatccttcctaatacccgggttcccagcccgattcagggaaaccgtcaaaaggatagccgccgtcaaacccgtctatgtttttgcaaacaacacatcaatcagccgttcgcccctgagggaggaaaaattgaaaagatttgccgcaaaccaatatctccgccccattcaggctatgggcgacatcggcaagagcaatcaggcggtctttgatttgattaaagatattcccaatgtgcattgggtggacgcacaaaaatacctgcccaaaaacacggtcgaaatatacggccgctatctttacggcgaccaagaccacctgacctatttcggttcttattatatggggcgggaatttcacaaacacgaacgcctgcttaaatcttctcgcgacggcgcattgcagtag

SEQ ID NO: 29914 - DNA, 1371 bp, Neisseria meningitidis
atgatcaaccccatcgcctcgctttcccctttagacggccgttatgcccaatccgttgaagcattgcgcccgattttctcagagtacggcctgatgaaagcgcgcgtcaaagtcgaattaaactggctcaaagccctcgccgccgagccgaagattgccgaagtgccgcccttcagtgccgaaacgcttgccgaaatcgacacggtgattgaaaacttttcattggaagacgcggccgccgtcaaagccatcgaagccacgaccaatcatgatgtcaaagccattgaatattggctgaaaaaacgttttgccgaagtgccggaagtcgccgccgtgagtgagttcatccacttcgcctgcaccagcgaagacatcaacaacctgtcccacgctttaatgctgcaagaagcgcgtgaggctgttttgctgcccaaactggcagaaatcatcgaaaaactgaccgctatggcgcacgaccttgccgccgtcccgatgatgagccgcacccacggccagcccgccacgccgaccactttgggcaaagaaaccgccaatgtcgtgtaccgcctgcaacgccagtttaaaagccttcaggcgcaagagttcctcggcaaaatcaacggcgcggtcggcaactacaacgcccacatggtcgcctatcccgacgtcgattgggaaacccactgccgcaacttcgtcgaaatcagccttggcctgaccttcaacccctacaccatccaaatcgagccgcacgactacatggctgaattcttccaaaccctcagccgcatcaacaccatcctgatcgactttaaccgcgacgtttggggctacatttctttggggtacttcaaacaaaaagtcaaagcgggcgaagttggttcttccaccatgccgcacaaagtcaaccccatcgactttgaaaactccgagggcaaccttggtatggcaaacgccgtattgggttttttggcggaaaaactgccgatttcccgttggcagcgcgacctgaccgacagcaccgtcttacgcaatatgggcgtgggcgtgggctatgccgtgttgggtttcgccgcccacctgcgcggtctgaacaagctcgaacctaaccccgccgcgcttgccgccgatttggatgccacttgggagctgctcgccgagccgattcaaaccgtaatgcgccgttacggcgtggccaatccttacgagaagctgaaagacctgacgcgcggcaaaggcggcatcacgcccgaagtgctgaaaggctttatcggattgctggaaatccccgccgaagccaaagccaaattgcttgagctgacccccgcgctgtatgtgggcaaggctgaagcgttggcgaaacggatttga

SEQ ID NO: 29915 - DNA, 633 bp, Neisseria meningitidis
atggagaatacaaaccgtgtgccggagcaggcacgttatgatgccgaacgcaggcaggcagacgaagcattggcgggcgtgtttccggcagtcagtatcttcggcagcgcgcgcacgccgcagaatcatgcggattatgcgttctcctgccgtctggcgcggcggctgtcggattcgggcattgccgtcatttcgggcggcgggccggggattatggaggcggcaaacaagggcgcgtttgccgggaagtcggtttcggtggggctgaacatcgttttgccgcacgagcagaaaccgaatccgtatcaggacatcgccttgcggttttcccgttttgccgaacgcaaggcggtgtttttccgctattcccaagcatatgtcgtgatgccgggcggcttcgggacgctggacgaattgtttgaaatcctgaccttggtgcagacgggcaaagtgccgccgcgtccgattgttttggtcggaaaggcgttttggtcgggcttggcggagtggataaacgcgcagcttttggcgcgcggtctgatttccgaaggggcagcctctttgttcgccatatcggacgatgaagacgaaatcgttgcgtatctgtcggaacacgggcttcagacggcatag

SEQ ID NO: 29916 - DNA, 1539 bp, Neisseria meningitidis
atgaatatgctgggagctttggtaaaagtcggcagcctgacgatggtgtcgcgcgttttgggatttgtgcgcgatacggtcattgcgcgcgcattcggcgcaggcatggcgacggatgcgttctttgtcgcgttcaaactgcccaacctgcttcgccgcgtgtttgcggagggggcgtttgcccaagcgtttgtgccgattttggcggaatataaggaaacgcgttctaaagaggcgacggaggcttttatccgccatgtggcggggatgctgtcgtttgtactggtcatcgttaccgcgctgggcatacttgccgcgccttgggtgatttatgtttccgcacccggttttgccaaagatgccgacaaatttcagctctctatcgatttgctgcggattacgtttccttatatcttattgatttcactttcctcttttgtcggctcggtactcaattcctatcataaattcagcattcctgcgtttacgcccacgttcctgaacgtgtcgtttatcgtattcgcgctgtttttcgtgccgtatttcgatcctcccgttaccgcgctggcttgggcggtttttgtcggcggcattttgcaactcggcttccaactgccctggctggcgaaactgggttttttgaaactgcccaaactgagtttcaaagatgcggcggtcaaccgcgtgatgaaacagatggcgcctgcgattttgggcgtgagcgtggcgcagatttctttggtgatcaacacgattttcgcgtcttatctgcaatcgggcagcgtttcatggatgtattacgccgaccgcatgatggaactgcccggcggcgtgctgggggcggcactcggtacgattttgctgccgactttgtccaaacactcggcaaaccaagatacggaacagttttccgccctgctcgactggggtttgcgcctgtgcatgctgctgacgctgccggcggcggtcggaatggcggtgttgtcgttcccgctggtggcaaccttgtttatgtaccgagaattcacgctgtttgacgcgcagatgacgcaacacgcgctgattgcctattctttcggtttaatcggtttaatcatgattaaagtgttggcgcccggcttttatgcgcggcaaaacatcaaaacgcccgtcaaaatcgccatcttcacgctcatttgcacgcagttgatgaaccttgcctttatcggcccactgaaacacgtcggactttcgcttgccatcggtctgggcgcgtgtatcaatgccggattgttgttttacctgttgcgcagacacggtatttaccaacctggcaagggttgggcagcgttcttggcaaaaatgctgctctcgctcgccgtgatgggaggcggcctgtatgccgcccaaatctggctgccgttcgactgggcacacgccggcggaatgcaaaaggccgcccggctcttcatcctgattgccgtcggcggcggactgtatttcgcatcactggcggctttgggcttccgtccgcgccatttcaaacgcgtggaaagctga

SEQ ID NO: 29917 - DNA, 783 bp, Neisseria meningitidis
atgaccgacatcctcaataaaatccttaccgccaaggcacaggaagttgccgcccaaaaagccgccgtcaacgccgaacacatccgcgcacttgccgcagaagccgcgcccgtccgcagctttatcggttcgatacgcggcaaacaccgcctcaacctgcccgccgtcattgccgaaatcaaaaaggcaagcccgagcaaagggttaatccgtccggacttccgaccgcccgagattgcacgcgcctatgaaaacgccggggcggcgtgtttgtccgtactgaccgacgaaccctatttccaaggttcgcccgaatacctcaaacaggcgcgcgaagccgtatcgctgcccgtgctgcgcaaagacttcatcatcgacgaatatcaggtttatcaggcgcgcgcctggggggcggatgccgtcctgctgattgccgccgcactggaacgggaacaattggaacgctttgaagcggtggcgcacgaattgggcatgaccgtcctgctcgagctgcacgatgaaagcgaattggaaaaatgccgcaacctgaccacgccgttgtggggcgtaaacaaccgcaacctgaggacttttgaagtctccctcgaccaaaccctgtcgctgctgcccgcgctggaaggcaaaaccgtcgttaccgaaagcggcattacaggtaaggcggatgtggaatttatgcaatcgcgcggcgtgcataccttcctgatcggcgaaacgtttatgcgtgccgacgatattgaagcagaagtgggcaaactcttctaa

SEQ ID NO: 29918 - DNA, 2301 bp, Neisseria meningitidis
atgcaccgaccgaccgccaaacagattttgcacgaagtattcggttatcccgaatttcgcggcaggcaggagtctatcgtcaatgctttggcaggcggcaggagtttgatggtgctgatgccgacgggcgggggcaagtctttgtgttaccagattcccgcgctgatgcgcgaaggcgtggcggttgtcgtatcgccgctgattgcgctgatgaacgaccaagtggcaaacctgcatgtggccgggattgaagcggcggcagtcaacagcggcacatcggcagacgaggcgcgcgagattgccgacaagcttgcccaaggccgtctgaaactgctttatgttgcgccggaacgcttggttaccgaccgctttttgcgttttctcgaccaacaaaccgtcagtctgtttgccattgatgaggcgcattgcgtcagccaatggggacacgatttccgccctgaatatcaacagctcggcatgcttgccgaacgctatccgaacgtcccgcgcatcgctctgaccgctaccgccgatgccgccacgcgcgccgacatcaagcattatctgcacttggacgatgcgcccgaatttgtctccagctttgaccgtccgaatatttattatcaggttatcgaaaaaaacaacggcaaaaaacaattgctggatttcatccgcaaagaaatgacggggcaaagcggcattgtgtattgcctaagccgcaaaaaggtggaagatgtggcgcagtttttgcgtgaaaacggattaaacgcgattccgtatcatgctggtttgagcatggacgtacgcgaggaaaaccaacgccgctttacgcatgaagacaatattatcgtggtggcgaccgtggcgttcggcatgggcatagacaaacccgacgtgcgctttgtcgcccatctcgatatgccccagagtgtcgaacatttctatcaagaatcggggcgcgccggacgggacgggctgccggccgcaagctggctgtgttacggtttgaacgattgggtgttgctgcgcgaacggattgccgaaggcaacagcgacgaggtgcaaaagcaaatcgaaatgcaaaaactcgatgccatgcttgccgtctgcgaaaccgccgcctgccgccgcgtactgctgctcaaacatttcggcgaagcatccgaaccctgcggccattgcgacaactgcctgcatccgcccgtacggtttgacggcacggtgttggtgcaaaaattactcagctgcgtgtaccgcgccggacaacgttttgccgccggttacatcaccaacattttacgaggtaaaagcgacgattggatacgcggcaaccggcacgaacaactgtccacattcggcatcggtacggagttgtccgacaaagaatggcgcagcgtcatccgccagtgtatcagcctcggctacctcaccgtcaacattacccgatatcaggcattgcaactgaccgaagccgccaaaaaagtcctcaaaggcgaaaccgaagtgatgctgcgtccgctcaagcgcgacaagcccgccgcccgcaccctcaaagacaactggctgcgtaccgaacgcgaagaacgcctgtggcaggcattgcgcgtttggcgtatgaaacaggcagaagccgaaggcatccccgcctatatgattttcggcgacaaaaccctgcgcgaccttgtcgaaaaaatgccgcaagacctcaacggtctgcacgacatctacggtttgggcgaagccaaaatcgaccgtttcggacacggcatcctcgaagtctgccgcaacgccgccggcttcagccgcgacgcggtcatccgtccgcaaaccgaacgcgaacaacaactgcgtcaaaaactcgaagcctggcggtatgaacaggcaagggcggaaaactgcgccctgcatgccgtcctctccgacgaaagccttgccgatatgcttgccgatacgcccgaaaccgaaaccgacctcgaaggcgtgtacggcttgggcagcgtacgcgccgccaaatacggacgggacatcctcgccgtctgccgtccgttttcagacggcatcgatgaaaccgccaaacgcaaacgccgcctgatgcgcgccctgatccaatggtgcggcgaaacggcaaaacacgaacagtccgaaccctaccgcattctcagcaaagccgccctacgcgccattgccgccaaacagccggaaggtttggcggagcttgccgccgtatatggcgtaggcgaagaaaaagccgcacgttacggtgcggcggtgttggcggtattggaacgaaatgccgtctga

SEQ ID NO: 29919 - DNA, 939 bp, Neisseria meningitidis
atgcgccgccaacaagagagaaaatccatgcctgatgccgtcaaaaaagtttacctgatacacggttggggggcgaaccgccacgtgttcgacgatttgatgccgcgcctgcctgcaacgtggccggtgtccgccgtcgatttgcccggacacggcgacgcgcccttcgcgcaacccttcgatattgaggcagccgccgacgctgttgccgcacaaatcgatacgcccgccgacattctcggctggtcgctcggcggattggtcgcgctgtatctggcggcgcgccatcccgacaaagtccgttcgctctgcctgacggcgagtttcgcacggctgacggctgacgaagactatcccgaagggcttgccgcgcctgcattgggcaaaatggtcggcgcgttccgaacggattatgccaaacatatcaaacagtttctacaactccagcttttgcacacgcctgatgcggacggaatcataggcagaatcctgcccgatttggcgcgctgcggcacgccctccgccttacaggaagctttggacgcggcggaaagggcggatgcgcggcatttgttggacaagatagatgttccggtactgctggtgttcggcggcaaagacgcgattacgccgccgcgcatgggcgagtatctgcaccgccgtttgaagggcagcaggctggttgtgatggaaaaggcggcacacgcgccgtttttgagccacgcggaagcgtttgccgcgctgtaccgcgactttgttgaaggggttttagatgaaccatcaggacgcacgctggcaggtttaccgccatcttgccgaacatgccgaccaacgcctgacactcgtccgcaacgcgcccaaacatatcctgcttgccggggcggatgcggacatcagccgcagcctgctggcgaaacgctatccgcaggcggtatttga

SEQ ID NO: 29920 - DNA, 465 bp, Neisseria meningitidis
atgtttaccatcgttttataccagccggaaatcccgccgaacacgggcaacatcatccgcctgtgcgccaataccggcgcggatttgcaccttgtcaaaccgctcggcttcccattggattccgccaaaatgaaacgcgccgggctcgactaccacgaattcgccagcctgacggtgtacgaaaacttcgacgactgcctcaaggcactcgcaggcaggcgcattttcgccctgaccaccaaaggcacggcgcgccccgatgaaaccgcgtttcaaaaaggcgacgttttactgttcgggccggaaacgcgcggactgcctgccgacatcctcgacagcctgcccgccgcgcaaaaaatccgcctgcccatgcagcccggcagccggagtatgaacctttccaataccgttgccgtgattctctttgaagcgtggcggcaacacggttacgcaggcggcgtttga

SEQ ID NO: 29921 - DNA, 897 bp, Neisseria meningitidis
ttgaatccgacgaatgatttgaaagcgtggcaacagagggcgcaggcacagacagagctgctgctggaacgctttttgccgtctgaaaacgaaatcccgcacacgctgcacgaagcgatgcgttatgcggctttggacggcggcaaacgcctgcggccgatgctggttctggcggcttcggaattgggcgaagccgtgcatgaagcagtaggacaggcaatggcggcaatcgagatgattcacgcctattcgctggttcacgacgatatgccggcgatggacaacgacagcctgcgccggggcaaaccgacctgccatgtgaaatatggcgaagccaccgcgctactgaccggcgatgctttgcagacgcaggcgtttgacgtattgagccgtccgacagaactgcccgccgcacgccagttggcaatgttgtcggtgttggcaaaagcgggcggaagcatgggtatggcgggcggtcaggcaatcgatttggcgaatgtcggcaagcagatggcccaaaccgatttggaacagatgcacagcctgaaaacgggtgcgctaatccgtgccgcggttttattgggggcaatgtcttgcccgaatctgtctgaagacagtctggcggtattggacgattatgcggcaaaactggggctggcgttccaagtcattgacgatgtgttggattgtgaagcggacacggcgactttgggcaagacggcgggcaaagatgccgacaacgacaagccgacttatgtgaaactgatgggcttggaagcggcgcgctcatacgcacacaaactggttgccgaagcggtcgcgctgctcgaacccttcggcgacaaagccctgcgcctgcggcagttggcagaatttgcagtcgcccgcaaatattaa

SEQ ID NO: 29922 - DNA, 1056 bp, Neisseria meningitidis
atgaccattttatcggacgttaaagcattaggacaacaaatctggctggacaacctttcccgctcgctagtgcaaagcggcgaattggcgcaaatgttgaaacagggcgtgtgcggcgtaacttccaatcccgccatcttccaaaaagccttcgccggcgacgcgctttacgccgatgaaatcgccgccctcaagcagcaaaacctcagccccaaacaacgctacgaaacaatggcggttgccgatgtgcgtgccgcctgcgacgtttgccttgccgaacacgaatccaccggcggcaaaaccggcttcgtcagcctcgaagtttcgcccgaattgtccaaagacgcgcaaggcacggttgaagaagcgcgccgcctctacgccgccatcgggtgcaaaaacgcgatgattaaagtgcctgccaccgacgcaggcatcgatgcgctcgaaaccctcgtttcagacggcatcagcgtgaacctgaccctgctgttctcacgcgcccaaaccctcaaagcctacgccgcctacgcgcgcggcatcgccaaacgcttagcagccggacaaagcgttgcccatatccaagttgtcgccagcttcttcatctcccgtgtggacggcgcgctggacacaacactgcccgaccacctcaaaggcaaaatcgccatcgcccttgccaaagccgcctaccaagactgggcgcaatacttcggcagccccgaatttgccgcgctggaaaccaaaggcgcaaaccgcgtgcagcttttatgggcatctaccggcgtgaaaaacccggcctatcccgacacgctctacgttgacagcctgatcggcgcgcacaccgtcaacaccgttcccgatgccacgctcaaagcctttatcgaccacggcacagccaaagccacgctgaccgaaggcgtagaagaagcacaagcgcagctcgccgaaaccgccgcgctcggcatcgatgtcgaaaccttggcaacgcgtttgcaggaagacggtttgaaacagtttgaagaagcgtttgaaaaactgctcgcgcctttggcttag

SEQ ID NO: 29923 - DNA, 1404 bp, Neisseria meningitidis
gtgaaaccgctgcgcagactgacaaacctccttgccgcctgcgccgtagcggcggccgcactcatacagcccgccctcgcggcggacttggcgcaagacccgttcattaccgataacgcccaacggcagcactacgaacccggcggcaaataccacctcttcggcgacccgcgcggcagcgtttccgaccgcaccggcaaaatcaacgtcatccaagactatacccaccagatgggcaacctgctcatccaacaggcaaacatcaacggcacaatcggctaccacacccgcttttccggacacggacacgaagaacacgcccccttcgacaaccacgccgccgacagcgcgagcgaagaaaaaggcaacgttgacgaaggctttaccgtataccggctcaactgggaaggacacgaacatcatcccgccgatgcctacgacggcccgaagggcggcaattaccccaaacctacgggcgcacgagacgaatacacctatcacgtcaacggcacagcccgcagtatcaaactcaatccgaccgacacccgcagcatccggcaacgcatatccgacaattacagcaacctcggcagcaatttctccgaccgcgccgatgaagccaacagaaaaatgttcgagcacaatgccaagctcgaccgctggggcaacagcatggagtttatcaacggcgtcgccgccggcgcgctcaacccctttatcagcgcgggcgaagccttgggcataggcgacatactgtacggaacgcgctatgccatagacaaagccgcaatgcgcaacatcgcccccttgcccgccgagggcaaattcgccgtcatcggcggcttgggcagcgtggcgggctttgaaaagaatacgcgcgaagccgttgaccggtggatacaggaaaatcccaatgccgccgaaaccgtcgaagccgtcttcaacgttgccgcagcagccaaagtcgcgaagttggcaaaggcggcaaaaccagggaaggctgcggttagcggggattttgctgattcttataaaaagaaattggctttgtctgatagtgcgagacagttatatcaaaatgcaaagtatagagaagctctagatatacattatgaagatttaattagaagaaaaactgatggttcatcaaaatttattaacggcagagaaattgacgctgttacgaatgatgctttaatacaagccaaaagaacaatttcagcaatagataaacctaaaaatttcttaaatcaaaaaaatagaaagcaaattaaagcaaccatcgaagcagcaaaccaacagggaaaacgtgcagaattttggtttaaatacggtgttcattcacaagttaagtcatatattgaatcaaaaggcggcattgttaaaacaggtttaggagattaa

SEQ ID NO: 29924 - DNA, 8112 bp, Neisseria meningitidis
atgaaccgcaccctgtacaaagttgtatttaacaaacatcgaaactgcatgatagccgttgctgaaaatgccaaacgcgagggcaaaaacacagccgacacccaagctgtaggtattttgccaaatgatattgcgggctttgcgggttttatccattctatctctgttatctcattctccctttcattactgctcggttctgcccttatcctgacttcttcttctgctactgcccaaggtatcgttgccgacaaatccgcacctgcacagcaacagcctaccatcctgcaaacaggtaacggcataccgcaagtcaatattcaaacccctacttcggcaggggtttctgttaatcaatacgcccagtttgatgtgggtaatcgcggggcgattttaaacaacagtcgcagcaacacccaaacacagctaggcggttggattcaaggcaatccttggttggcaaggggcgaagcacgtgtggttgtaaaccaaatcaacagcagccattcttcacaactgaatggctatattgaagtgggcggacgacgtgcagaagtcgttattgccaatccggcagggattgcagtcaatggtggtggttttatcaatgcttcccgtgccactttgacgacagcccaaccgcaatatcaagcaggagaccttagcggctttaagataaggcaaggcaatgttgtaatcgccggacacggtttggatgcacgtgataccgattacacacgtattctcagttatcattccaaaattgatgcacccgtatggggacaagatgttcgtgtcgtcgcgggacaaaacgatgtggccgcaacaggtgatgcacattcgcctattctcaataatgctgctgccaatacgtcaaacaatacagccaacaacggcacacatatccctttatttgcgattgatacaggcaaattaggaggtatgtatgccaacaaaatcaccttgatcagtacggtcgagcaagcaggcattcgtaatcaagggcaatggtttgcctcagccggcaatgtggcagtgaatgctgagggtaaactggtcaacacgggcatgattgcagcgacgggagaaaatcatgcggtttcacttcatgcccgcaatgttcataatagcggtacggttgcctcacaggatgatgccaatattcacagccagacgctggacaattcaggtacggtcttatcctcaggtcgattgactgttcgtaatttaggccgtctgaaaaaccaaaacaacggtacgatccaggctgcccgcttagatatgtcaacaggtggtttggataacacaggtaatattactcaaacaggttcacaagcattggatttggtatctgccggcaaattcgataacagtggcaagattggtgtaagtgacgttccacagaccggtttgaatcccaatccatcagtcataccacagattccgagtactgcaacaggttcaggcagcagcactgtctcggtatctaagcctggttcaaacaatcccgtttcacctacagcacctgcaaaaaactacgccgtaggacgcattcaaacaacaggagcatttgacaatgcaggatcaattaatgcgggtgggcaaattgacattgccgcccaaaacggtttgggaaattcgggtagtctgaatgcggctaaactacgagtatcaggcgattcatttaacaatacggtaaaaggcaaactccaggcacacgatctggctgttaacactcaaactgctaaaaacagcggtcacttattaactcaaaccggcaagattgataaccgtgaactgcataatgccggagaaattgccgccaacaatctgacactcattcattcgggccgcttgagcaatgataaaaaaggcaatattcgagctgcacatttacagcttgataccgccggtttacataatgcaggtaacattcttgccgatagtggaaccgttaccaccaagaataatcttcgcaatacaggaaaagtttctgttgcacgactgaataccgaaggtcagactctagataatacgcgcggacgtatagaggctgaaacggttaacatccaaagtcagcaactgactaaccaaagcggccatattactgctaccgaacaactgactatcaatagtcgaaatgtagacaaccaaaacggcaaactcctatctgcaaaccaagcacaattagctgtttcagacggcctatacaaccaacatggtgaaattgccaccaaccggcagttgtctattcacgataaaaatcaaaacactttggcgttaaacaatgcggatggcacgattcaatctgccggtaatgtatcgctacaagccaaatcactcgccaacaatggcacattaacagccggtaacaaactggatattgctttgacggacgatttcgtcgtagagcgcgacctcactgcaggcaaacaattaaatctaagcataaaaggccgtctgaaaaatacccataccctacaagcaggccatacgctcaaactcaatgccggcaatatagataaccaagttacaggcaaaattattggtggagaacaaacggacatcacatccgaacagcatgttgacaacaggggcttgatcaacagcgacggtttgacccacatcggtgcaggtcaaaccctgaccaacaccgggacaggcaaaatctatggcaaccatattgccctggacgcgcaaatactgcttaaccgggaagaaacgacggaaggcagtaccaaagcgggggcaatagctgcaaggaaacgtttggatattggagcgaaagagattcataaccaagaaggtgccctactatccagcgaaggtatttttgccgtaggtaatcgactggatgaacaacatcatgcggcaggcatggccgatacctttgttaatggcagtgccggtttggaagtacaaggtgatgcattgatgtccgttcggaatatgcagaatatcaataatcactttaaaacagagacatacttagccaaagcggaaaagcaagtccgcgactacaccgtactggggcaaaatacctactatcaggcgggaaaagacggtttattcgacaactcgcaaggacaaaaagaccaaactactgctacgttccatttaaaaaatggttctcgtattgaggccaaccaatggcatgtccgagactaccacatcgagacttataaagaacgcatcatcgaaaaccggccggcacacattactgtgggcggtgatttgactgcctcaggtcaaaattggctgaacaaagacagccggattgtagtaggcgggcgtattatcactgatgatttaaaccagaaagaaattaccaatcaaagtacaacaggcaaaggtcgcacagatgctgtcggcacacagtgggattcagttacaaaaaaaggatggtacagcggtagaaaaagacaacgccgtactgaaagaaaccatactccttaccatgatacccaactatttacccacgacttcgacacgcctgtatccgtcatccaacagaatgccgcctccccttcctttcaacccgccgcatctgcaatcaaactgattgacggagtatccacggcagccgtcaatggtcagcgcatccataccggtaatgtggtctcgttaaataacgctactgttactctgcctaacagcagcctctataccacccatcctgacaataaaggctggttggttgaaaccgatcctcaatttgcagactaccgccgctggttgggcagcgactacatgttgcaacaactgcaattggacaccaatcatctacacaaacggcttggcgacggctactacgaacaaaaacttgttaatgaacaaatccatcagttaacaggctaccgccgactcgacggctacaggagtgatgaagaacaattcaaagctctgatggacaacggccttactgctgccaaaacattcggtctcaccccaggtatcgccttgagtgcagagcaagttgcccgcttaacttcagatatcgtttggatggaaaatcaaaccgtcaccctgtctgacggttcgactcaaaccgtactggttcctaaagtctatgccctggcgcgcaaaggtgatctcaatacctccggtggcctgattagtgccgaacaagtcttacttaaactgcaaaacggcaacctgactaacagcggtaccattgcggggcgacaggccgtactcatccaggcacggaatattaacagcaacggtaacattcaagccgaccaaatcggcttaaaagctgaaaaaagtatcaatatcgacggcgggcaggtacaagcaggcagactgctgactgcccaagcgcaaaatatcaaccttaacggtacaacccaaacttccggtaatgaacgtaacggcaataccgccatcgatcgtatggccggcattaacgtggtcggaagccatactgaacaagtagataacagaacttcagacggcatcctatccctgcatgccagcaacgatatcaacctcaatgcggccaccgtctctaaccaagttaaagacggcactacccaaattaccgccggcaataatctcaacctcggcaccatccgtaccgaacatcgcgaagcctatggtacattagatgacgagaaccatcgccatgtccgccaaagtaccgaagtcggcagcagtatccgcacgcaaaacggcgcactgcttagagccggtaacgacttaaaaatccgccaaggcgaactggaggccgaagaaggcaaaaccgtccttgccgcaggacgtgatgtcactatcagcgaaggacgccaaataaccgaactggatacctcggtaagcggaaaaagcaaaggcatcctttccagtaccaaaacacacgaccgctaccgcttcagtcatgatgaagcagtcggcagcaacatcggcggcggcaaaatgattgttgcagccgggcaggatatcaatgtacgcggcagcaaccttatttctgataagggcattgttttaaaagcaggacacgacatcgatatttctactgcccataatcgctataccggcaatgaataccacgagagcaaaaaatcaggcgtcatgggtactggcggattgggctttactatcggtaaccggaaaactaccgatgacactgatcgtaccaatattgtccatacaggcagcattataggcagcctgaatggagacaccgttacagttgcaggaaaccgctaccgacaaaccggcagtaccgtctccagccccgaggggcgcaataccgtcacagccaaaagcatagatgtagagttcgcaaacaaccggtatgccactgactacgcccatacccaggaacaaaaaggccttaccgtcgccctcaatgtcccggttgtccaagctgcacaaaacttcatacaagcagcccaaaatgtgggcaaaagtaaaaataaacgcgttaatgccatggctgcagccaatgctgcatggcagagttatcaagcaacccaacaaatgcaacaatttgctccaagcagcagtgcgggacaaggtcaaaacaacaatcaaagccccagtatcagtgtgtccattacctacggcgaacagaaaagtcgtaacgagcaaaaaagacattacaccgaagcggcagcaagtcaaattatcggcaaagggcaaaccacacttgcggcaacaggaagtggggagcagtccaatatcaatattacaggttccgatgtcatcggccatgcaggtactgccctcattgccgacaaccatatcagactccaatctgccaaacaggacggcagcgagcaaagcaaaaacaaaagcagtggttggaatgcaggcgtagccgtcaaaataggcaacggcatcaggtttggaattaccgccggaggaaatatcggtaaaggtaaagagcaagggggaagtactacccaccgccacacccatgtcggcagcacaaccggcaaaactaccatccgaagcggcggggataccaccctcaaaggtgtgcagctcatcggcaaaggcatacaggcagatacgcgcaacctgcatatagaaagtgttcaagatactgaaacctatcagagcaaacagcaaaacggcaatgtccaagttactgtcggttacggattcagtgcaagcggcagttaccgccaaagcaaagtcaaagcagaccatgcctccgtaaccgggcaaagcggtatttatgccggagaagacggctatcaaatcaaagtcagagacaacacagacctcaagggcggtatcatcacgtctagccaaagcgcagaagataagggcaaaaacctttttcagacggccacccttactgccagcgacattcaaaaccacagccgctacgaaggcagaagcttcggcataggcggcagtttcgacctgaacggcggctgggacggcacggttaccgacaaacaaggcaggcctaccgacaggataagcccggcagccggctacggcagcgacggagacagcaaaaacagcaccacccgcagcggcgtcaacacccacaacatacacatcaccgacgaagcgggacaacttgcccgaacaggcaggactgcaaaagaaaccgaagcgcgtatctacaccggcatcgacaccgaaactgcggatcaacactcaggccatctgaaaaacagcttcgacaaagacgcggtcgccaaagagatcaacctgcaaagggaagtaacgaaggagttcggcagaaacgccgcccaagccgtagcggccgttgccgacaaactcggcaatacccaaagttacgaacggtatcaggaagcccgaaccctgctggaggccgaactgcaaaacacggacagcgaagccgaaaaagccgccttccgcgcatccctcggccaagtaaacgcctatcttgccgaaaaccaaagccgctacgacacctggaaagaaggcggcataggcaggagcatactgcacggggcggcaggcggactgacgaccggcagcctcggcggcatactggccggcggcggcacttcccttgccgcaccgtatttggacaaagcggcggaaaacctcggtccggcgggcaaagcggcggtcaacgcactgggcggtgcggccatcggctatgcaactggtggtagtggtggtgctgtggtgggtgcgaatgtagattggaacaataggcagctgcatccgaaagaaatggcgttggccgacaaatatgccgaagccctcaagcgcgaagttgaaaaacgcgaaggcagaaaaatcagcagccaagaagcggcaatgagaatccgcaggcagatactgcgttgggtggacaaaggttcccaagacggctataccgaccaaagcgtcatatcccttatcggaatgaaaggcgaagacaaagccttgggttatacttgggactaccgcgactacggcgcaagaaatccgcaaacctacaacgatccgaagctgtttgaggaataccgccgacaggacaaacccgaataccgcaacctgacctggctgcacagcgggacgaaagacaccaaaatcaggcagggagagcggaaaaacgaagagtttgcactgaacgttgccgaaggactgacgagccttgtcaaccccaatccgaggataaaagtcccgattcttgcaggcatccgcaacctgaaaaacatcaagccgacagttaccggcagcgatcccttattggcgggtgcggggaatatccgtatccctgcaaacggcaatgttgcgaagggggacaggattccggatacggcattggctagcaagggaatcaaacataaaaatcgtaaagatcaactggaaaaaaataaaaaatctggtgaggattttgagatggaaatttatcagaagaaagttaaacaaggctttaaaccgcaaagacagattacagttaaaacaaaaagtggtgtaaaaactaggcttgatattatttcgaaagaaggtggtcttgatgtttgtacagagtgtaaggcttcaataactgcgccacttactaaaaatcagaaaaaagcttttcctgaaattgaaagaacgggagcaacagtggtcggtaagggaaaaccgggctatccaaaggggaccaaaattgaacctactaaagttataattgaaaggaaaagataa

SEQ ID NO: 29925 - DNA, 3909 bp, Neisseria meningitidis
atgaatgagggtgaagttgttttaacaccagaacaaatccaaaccttgcgtggttatgcttcccgtggcgatacctatggcggttggcgttatttggctaatttgggtgaccgttatgcggatgatgctgctgcaattgtcggtaaggatgcaaacttaaatggtttgaatttatggatgaaaaaaggtgtggaaaacctatgggatgatacggtcggtaaaaagacccgtttagagaaatttgatcgggttgcattgcaacatttcagccaatatgtagatctaattaatgaaaataatggtagattacctaacactagtgaaattgagagaagttactataaagccgttaccgaaaatggtgtttcttctagtgcagctattgatttagttattaatcgctcacttccggatatggcagatggttattgggcattaggtttggggatagaagccgaacgtatccacaatgagcaagcagtaaataatccgaacggtagcgaaagggataatagaaagcagttaatatctgctttagataaaggatttgatggatcttttaaagagaagcattttacttttttacaatctgtgataatggatgtaacaaagttaggtgttgaatatacaatagatggttggcaaaaaattggaggttggggtaatgggataatcaatgatttatataaaagtgttgtaaaaagagagtggactggaatatttgagatcgttaataataacatcaagcaatttagagatctgttcccaaatccggaaggctggatcgatgatggtcaccaatgtttcgctccttgggttaaagaaactaaaaaacgcaatggcaaatatcatgtctacgacccccttgccctagatttggacggagacggcatagaaactgtcgctgccaaaggcttttcaggcagcttatttgatcacaccaacaacggtatccgcaccgccaccggttgggtttctgccgatgacggtctgcttgtgcgcgatttgaacggcaacggcatcatcgacaacggtgcggaactcttcggcgacaataccaaactggcagacggttcttttgccaaacacggctacgcggctttggccgaattggattcaaacggcgacaacatcatcaacgcggcagacgccgcattccaatccctgcgtgtatggcaggatctcaaccaggacggcatttcccaagctaatgaattgcgtacccttgaagaattgggtatccaatctttggatctcgcctataaagatgtaaataaaaatctcggtaacggtaacactttggctcagcaaggcagctataccaaaacagacggtacaaccgcaaaaatgggggatttacttttagcagccgacaatctgcacagccgcttcaaagacaaagtggaactcactgccgaacaggcaaaagccgccaatcttgcgggcattggccgtctgcgcgatttgcgcgaagctgccgcattgtccggcgatttggccaatatgctgaaagcttattctgccgccgaaactaaagaagcacagttggcattgttagataatttgattcacaaatgggcggaaaccgattcgaactggggcaaaaaatcgccaatgcgactttcaaccgattggacgcaaacggctaatgaaggtattgcactgacaccatcccaagtagcacaactaaaaaagaacgctttagtttccctttctgataaagctaaagcagctattgacgccgcccgcgaccgcattgccgtgcttgatgcctacacggggcaggattccaacacactctattacatgagcgaggaagatgcgcttaatatcgtcaaagtaaccaacgatacatacgaccatctcgccaaaaacatctaccaaaacctgttgttccaaacccgtttgcagccatatttgaatcaaatcagtttcaaaatggaaaatgatacgttcactttggattttagtggtcttgttcaagcatttaaccatgtcaaagaaactaatccgcaaaaagcttttgtggatttggccgagatgcttgcatatggcgaacttcgttcttggtatgaaggccgaagactaatgaccgattatgtggaggaggcaaaaaaagcaggtaaatttgaagattaccagaaagtgttgggtcaggagaccgttgcattattagctaaaacatcgggtacgcaagcagatgatatcctgcaaaatgtaggctttggtcataataaaaatgtttctttatatggtaatgacggcaacgacactctaatcggcggcgccggtaatgactatttggagggcggcagcggttcggatacttatgtcttcggcgaaggcttcggtcaggatacggtctataattacgactacgctaccggacgcaaagacatcatccgctttaccgacggtattacagccgatatgctgacttttacccgagagggcaaccatcttcttatcaaggcaaaagacggcagtggacaagtgactgttcagtcctatttccagaacgatggctcaggtgcttaccgtatcgatgagattcatttcgataacggcaaagtactggatgttgccactgtcaaagaactggtacagcaatccaccgacggttcggacagattgtatgcctaccaatccggaaataccttaaatggcggattgggcgatgactatctgtacggtgccgacggggatgacctgctgaatggtgatgcaggcaacgacagtatctacagtggcaatggcaatgatacgctcgatggaggagaaggcaacgacgccctgtacggctataatggtaacgatgcactgaatggtggcgaaggcaatgatcatttgaacggcgaagacggtaacgacactctaatcggcggtgcaggcaatgattacttggagggcggcagcggttcggatacttatgtcttcggcaaaggcttcggtcaggatgcggtctataattacgactacgctaccggacgcaaagacatcatccgctttaccgacggtattacagccgatatgctgacttttacccgagagggcaaccatcttcttatcaaggcaaaagacggcagtggacaagtgactgttcagtcctatttccagaacgatggctcaggtgcttaccgtatcgatgagattcatttcgataacggcaaagtactggatgttgccactgtcaaagaactggtacagcaatccaccgacggttcggacagattgtatgcctaccaatccggaaataccttaaatggcggattgggcgatgactatctgtacggtgccgacggggatgacctgctgaatggtgatgcaggcaacgacagtatctacagtggcaatggcaatgatacgctcgatggaggagaaggcaacgacgccctgtacggctataatggtaacgatgcactgaatggtggcgaaggcaatgatcatttgaacggcgaagacggtaacgacactctgatcggcggtgcaggcaatgattacttggagggcggcagcggttcggatacttatgtcttcggcgaaggcttcggtcaggatacggtctataattaccatgtggataaaaactctgacactatgcactttaaaggatttaaagcagcagatgttcattttatccgttccggaagtgatttggtgcttagcgcttctgaacaagacaacgtacgtatttccggatttttctatggtgaaaaccatcgtgtagatacatttgtctttgatgatgcagctatcagtaatccagattttgccaagtatattaatgctggcaataatttggtacagtctatgtctgtgttcggttctaatactgctgcgacaggaggaaatgtggatgccaatatacaatccgtacagcagccgttattggtaacgccatctgcataa

SEQ ID NO: 29926 - DNA, 204 bp, Neisseria meningitidis
ttgagaactgagttcttcaaaaatcctacacttgctccttccacggcagcaccttggtcaaaacggcagacggctgaaaagcaaacaccgtccgtcgtgttgccgtttgcggatgagtacgggtcaaccccaatgccgccgaaaccgtcgaagccgccttcaacattgccgccgccaaagccgcaaagttggcaaaaacggtaa

SEQ ID NO: 29927 - DNA, 2766 bp, Neisseria meningitidis
atgcgaatccgccgtcgtctgaaaaacatttatctgctggacaagaaaaaccttgcccgcaaccatgtgcaggttatcaaccagtttgagcagacgggcacgcatgcaaaccgctatgacgttaccgtgttggtaaacggcctgccgctggtgcagattgaattgaaaaagcgcggtgtggcggtgcgcgaggcattcaatcaggtgcaccgttacagcaaagagagcttcaacagcgaaaattcgctgttcaaattcctgcaaatcttcgtgatttccaacggcacggacacgcgctatttcgccaacaccaccaagcgcgacaaaaacagcttcgatttcacgatgaattgggcgcggtcggacaatcatccgattaaggatttgaaagactttaccgccacgttcctgcagaaaagcgtattgctgggcgttttgctgcattacagcgtgttcgatgcgaatgatacgctgctgattatgcggccgtatcagattgccgccgccgaacgcattttgtggaaaatcaacagctcggcgcaggcgaagaattggagcaaaccggaaagcggcggctatgtctggcacaccacgggcagcggcaaaacgctgaccagctttaaggcggcgcgtctggcgacggaatcggcatttatcgacaaggttttcttcgtggtggacaggaaggatttggactatcagacgatgaaggaataccaacgtttttcgcccgacagcgtgaacggttcggaaagcacggcaggcttgaaacgcaatttggaaaaagacgacaacaaaatcatcgttaccaccatccaaaagctgaacaacctgatgaagggcgaagataatctgccggtttaccatcagcgagttgtctttattttcgacgaatgccaccgctcgcaattcggcgaagcgcaaaaaaacctgaaaaagaaatttaaaaaattctgccagttcggctttaccggcacgccgatttttcccgaaaacgctttgggcgcggaaaccacggcgggcgtgttcgggcgggagctgcattcttatgtgattaccgatgccatccgcgatgaaaaagtattgaaattcaaagtggattacaacgacgtgcgcccgcagttcaaagccgtggaagcggaacaggacgagaagaaactgagtgccgccgaaaaccacaaagccctgctgcaccctgaacgcatccgcgaaatcacgcaatatatcctgaatcagttcaggcagaaaacgcaccggctgaatgcgggtggcaaaggctttaacgcgatgtttgccgtcagcagcgtggatgcggcgaagtgctattacgaagcgttcaaaacacaacaggcaggcagcttgcacccgctgaaagtggccaccattttttcctttgcggccaacgaagagcaaaacgccgtcggtgaaattgtcgatgagacttttgaaccggaagcgatggacagcagcgcaaaagaatttttgcaggctgccatcaacgattacaacgcctgtttcaaaaccaatttcggcacggacagcaaagcctttcaaaactactaccgagatttggcaaaacgggtgaaaaatcaggaaatagatttgctgattgtggtcggcatgtttttgacgggttttgacgcgccgacgctgaacacgttgttcgtcgataaaaacctgcgctatcacggcctgatgcaggcgttttcgcgcaccaaccgcatttacgatgccaccaaaaccttcggcaatattgtctgcttccgcgatttggagcaggcaaccattgatgcgattaccttgtttggcgacaaaaacaccaaaaacgtggtgctggaaaaaagttacgaagaatacatgaacggctataccgacagccagaccggcgaagcacggcgcggttatctggatgtggcaaaagaattgcgcgagcgtttccccgatcccgacaaaatcgaaacggaaaaagacaaaaaagattttgccaaactcttcggcgaatacctgcgggcggaaaacgtattgcagaactacgatgaatttgccgcgctgcgcgagttgcagagtgtggacgcggcggacgaagatgcgatgaaggcgtttcaagaaaaatactacctgagcgatgaagacgtgcaggaaatgcggcaagtgccgatgccgtctgaaagggcggtgcaggactaccgttccgcctacaatgacatccgcgactggctgcgccgccaaaaagcaggcgaacagaaagagcaatcaaaaatcgactgggacgatgtggtttttgaggtggatttgctcaaatcacaggaaatcaatctggattacatcctgcaactggttttcgaacaccacaaaaaaatcaaaggcaaagcggagctggtggaagaaatccgccgcatcatccgcgccagcatcggccaccgcgccaaagagggtctgattgtggatttcatcaacgatacggatttggacaaagtacccgacgttcccgccatactggaaaccttctacacctacgcgcaagaggtgatgcggcacgaagcggcaggattgattgccgccgaaggcctgaacgaaaccgccgccaaacgctatttaatcagctcgctcaaacgcggctatgccagcgaaaacggcacggaactgaccgaaaccctgccgaaaatgagtccgctcaacccgcaatatctgacgaagaaacaaagtgtttttcaaaagattgcggcgtttgtggagaagtttgccggaatagggaccgatatttga

SEQ ID NO: 29928 - DNA, 933 bp, Neisseria meningitidis
atgtatgagataaaacagccttttcatagcggatacttgcaggtgtctgaaattcatcaaatttattgggaggaatcgggcaatcccgacggtgtgccggttatttttttacatggcgggccgggcgcgggggcttcgcctgaatgtcggggttttttcaatcccgatgtgttccgcatcgtcatcatcgaccagcgcggttgcggacgttcgcgcccgtatgcttgtgcggaagacaatacgacttgggatttggtggcggatattgaaaaagtccgtgaaatgctgggtatcgggaaatggctggtgttcggcggttcgtggggcagcactttgtcgctggcttatgcccaaacccatcctgaacgggtaaagggattggtgttgcgcgggatatttttgtgcaggccgtctgaaacggtgtggctgaacgaggcgggcggtgtgagccggatttatccggaacaatggcaaaaatttgtcgcgccgattgctgaaaatcggcggaaccggctgattgaggcgtatcacggattgctgtttcatcaagatgaagaagtgtgcctgtctgccgcgaaggcttgggcggattgggaaagctatctgatccgtttcgagccggaggaagtggatgaagatgcttatgcctcgctggcaatcgcgcgtttggaaaaccattattttgtcaacggcggttggttgcagggcgatagggcgattttgaacaatatcggcaaaatacggcatatcccgactattatcgtacaggggcggtatgatttgtgtacgccgatgcagagtgcgtgggcgctgtcgaaagcctttcccgaagcggaattgagggtggttcaggcagggcatcgtgcgttcgatccgcctttggtggatgcgttggttcaggcagttgaggatattttgccccatttgttgtaa

SEQ ID NO: 29929 - DNA, 1596 bp, Neisseria meningitidis
atgaaaccgttaaaaacattagaatttggatttgtggatgctgcaaactacagaagaagagaaaataaagatttatttaaccgaatatttgtaaaaggagaatatttggatgaattatgtgaaccaaatatttcgtttttaatcggagaaaagggaactggaaagacagcatatgctgtttatttaactaataacttctataaaaacatacatgccactactaagtttgttcgtgaaaccgattattcaaaatttattcagctaaagaaagcaagacacttaactgtttcagattttacaagtatttggaaagtcattttatatctgttgatatcaaatcaaatcaaatgtaaagaaaacggaatattatcttcaatatttaataaatttaaagccttagatgaggctataaatgaatattattatggcgcttttgatccggaaattgtacaagcaataactttaatagaaaattcaaaagaagctgcggaaatgatttttggaaaatttgttaaactaggtgaagaggaatcccaacaaataacttttacagaaagtaaattccaagcaaatttaggttttattgaaagaaaatttaaagatgctttatctcagttaaagctaaaagataatcatattttgtttattgatgggatagatattagaccatcacagattccatttgatgaatatcatgagtgtgtaaaaggtcttgctaacgccatatggatgttaaataatgatatcttcccttccattaaagatagtaagggaaggatgagagttgtgttattgattagacctgatatctttgattcattaggtttacaaaatcaaaataccaaacttcaagataattcagtatttttagactggaggacggattataaatcttatagaagttcaaagatttttggcgtttttgatcatcttttgagaacccagcaagaaaaacaagatagtttagaaaaaggcaactcatgggattattattttccatggaatgctcctaatttacatgatgagtataaaaatttaacttcatttattagcttcctaagaaaatcgtattatcgacctcgcgatattcttcagatgcttactttgctacaaaaaaataagaaaagtaaggaagattatgtcgtagcagaagattttgataatacttcttttcaaagagaatactcgatatatttacttggtgaaatcaaagatcatcttttgttttattatagtcaaagtgattatcaaaatttcctgaaattttttgaatttttaaacgggaaagatagatttaaatatagtgattttttaaaagcatttgaacgtttgaaaaagcacttacaaacaacatcagtggaaatacctaaatttatgagtactgctaatgagtttttgcaatttttatttgacttgaatgttattgcttatttagataacccagaagatgaaacgaaaccatatatccattggtgctttaaagatagaaattatgcaaatatttctcctaaaataaaaactgaaactgaatatttaatattttcaggattatcaaaagcccttgatgttggtactccatttaagaacaaacagtaa

SEQ ID NO: 29930 - DNA, 1410 bp, Neisseria meningitidis
atgccccatattgattttgacacgattccgggcagcatccgcgtgcccgggcagtatattgaatttaacacccgcaatgccgtacaaggtttgccgcaaaatccgcaaaaggtattgatggttgcacccatgctgaccgcgggcatacagcccgccttagagccggtgcaactatttagcgatgccgaggcggccgatttgttcggacaaggctcgctggcgcatttgatggtgcgccaagcatttgccaacaacccttatttggatttgaccgttatcggtattgccgaccacagcgcaggcgtgcaggcaaccgcaaccgttaccctttccggcacggccaccgcgccgggcgtggtggaaatcacgattggcggcaagcaggtaagcacggccgttaacaccggcgagaccgccgccacagtggcagaccgtctgaaaaccgccatcactgccgccgatgtaaccgttaccgcatccggcagcggcgcagccgttacgctgacggccaaacacaaaggcgagatcggcaacgagagcggcttaaccgtgagcaccggcaataccggcctaacttatcaagccaatgcctttaccggcggtgccaaaaatgcggacattgccacggccttgtccaaagtggcgggcaagcattatcacattatttgcagcccgtttagcgatgacgccaacgccaaagccttgagcaaccatattaccaacgtatccaacgccatcgagcagcgcggctgtatcggcgtattgggtatgagtgcggccttgagcacggccaccaccgctaccggcgaaatcaacgacggccgcatgacctgtgcttggtacaaaggtgcggtagagccaaacggcatcatcgccgcaggttatgcggcggtgttggcctttgaagaagaccctgccaagccgctgaacacgctggaaatcaaagggctggccgttacacctgatgcgcaatggccgctgtttgcagaatgcaacaatgcgctgtacaacggcttgaccccgctcacagtggtcaacaaccgcgtgcagattatgcgtgccgtatccacctataccaagtcggccaacaacaccgacgacccggcactactcgacattaccaccatccgcacgctggattatgtgcgccgcagcgttaaagagcgcattgccctgcgttttccgcgcgacaaattgagcgaccgcctgctgcccaaggttaagagcgagattttggacgtgctgattaagctcgaccaagccgaaatcatcgaaaacgccgaggccaacaaaggcaagctggtggtggcgcgtgcgcaaaacgaccccaaccgtgttaatgccattatccccgccgatgtggtcaacggcctgcacgtctttgccgggcgcattgatttgattttgtaa

SEQ ID NO: 29931 - DNA, 6822 bp, Neisseria meningitidis
atgaacaagcgatgctacaaggttatcttcaacaagaaacgcagttgtatgatggctgtagcagagaatgttcatcgtgacggcaagagtatgcaggatagtgaggcggcttcggttcgagtgaccggtgccgcttctgtttcttctgcccgggcagccttcggtttccgtatggctgccttttctgtcatgttggctttgggtgttgctgcgttttcccctgcccctgcttccggcatcattgccgacaaatccgcccctaaaaaccaacaagccgttattcttcagacagcaaacggtttgccgcaagtcaatattcaaactccgtcatcccaaggcgtttctgttaaccgattcaagcagttcgatgttgatgaaaaaggcgtaatactaaacaacagccgcagcaatacgcaaacgcaactcggtggatggattcaaggcaatccccatctggcacgcggcgaagcgcgggtaattgtgaaccagattgacagcagtaatccttcgttgttgaacggttatatcgaagtcggcggcaaacgcgccgaagtagtcgttgccaatccgtcgggcatccgtgtgaatggcggcggattgattaatgccgcttcggttacgctgacttcgggcgttcctgttttgaataacggcaatctgacgggctttgatgtttcttcgggtaaagtcgtgattgggggcaaaggtttggatacctctgatgccgattacacccgtatccttagtcgtgctgctgaaatcaatgcgggcgtttggggtaaagatgtcaaggtggtttcgggtaagaacaaattggattttgacggctctcttgccaaaacagcttctgcgccatcttcttcggattctgttactcctaccgttgccatcgacaccgccacactgggtgggatgtacgcagacaaaatcactttaatcagcaccgacaacggcgccgtaatccgcaacaagggtcggatttttgccgcaacaggcggcgttacgttaagcgcagacggcaaattgagcaacagcggttcgattgatgctgccgaaatcaccatttccgctcaaaccgttgataaccgccaaggctttatccgcagcggcaaaggcagtgtattgaaggtttcagacggcataaataatcaagcaggcttaatcggctcggccggtttgctggatattcgcgatacaggcaaaagcagcctgcatatcaataacacagacggcacgattattgcgggcaaagatgtttccttacaggcaaaatcactggacaacgacggcatattaaccgccgcacgcgatgtttccgtttctcttcatgatgattttgccggcaaacgcgatattgaagccggacgcacactcacgttctccacccaaggccgtctgaaaaacacccgcatcatacaggcaggcgataccgtatccctgaccgccgcccaaatcgacaacactgtctccggtaaaatccaatccggaaaccgcaccgggttaaacggcaaaaacggcatcaccaacaggggtttaatcaacagcaacggtataacgctgctgcaaaccgaagccaagtcggacaatgccggcacgggcagaatttacggcagccgtgtggcagttgaggcagataccttgttgaaccgggaagaaacggtcaacggcgaaaccaaagcggcggtaattgcagcgcgggagcggttggatattggagcgcgggaaattgagaaccgagaggcggcattattgtccagctccggcgatcttcatatcggttctgcattgaatggaagccgacaggtgcaaggagcaaatacatcactgcacaaccgcagtgcggcaatcgaatcatcaggcaatatccgtatcgctacaaaagatttgcagaataccaatgagcatctgcgtttccatacggaagaaacccatcgcgaacaccgtatcgaatatcaggcggaaggcagaacagaacgctatccggaaggttctcaaaaagagttgggctgggaaatatttgaagatgagtctttacatatgcggactccggacggcagcccccactctgtctggtacaaatacgattacgaacgaatcaccgccgagagcaaaattaccgaatccaagcccggtcaaatcatcagtggcggcaatttggttttagatgccgccaagctgaaaaatcataacagccggattattgccggcggcagattgatcgtcggtacgcccgaatccgcattggacaatgatgaaactttgggaacaaaaaccataaccgataaaggggacttgcaccgttaccaccgtcatcacaagaaagggcgggattctacgggatacagtcggtctccctacgaaccggcccccgaagtcagctccatccgtatgggtatttcagcctataaaggctatgcgccccaacaggcatctgatatacccggcactgttgtacccgttgttgctgaaaacggcatccatcctacatttactctgccgaacagcagcttgtttgccattgcgccaaacaacaaaggctatttgattgaaaccgaccctgcctttaccgactaccgcaaatggctgggcagcggctatatgcttgccgcactgcaacaagacccgaaccatatccacaagcgtttgggcgacggctattacgagcagaaactggtaaacgaacaaatcgccaagctgacaggctaccgccgcttggacggttataccaatgacgaagagcaattcaaggctttgatggataacggcattaccatagccaaagaattgcagcttactccgggtattgccctgtctgccgaacaggttgcccgtctgacttccgacattgtttggctggaaaacgagaccgttaccctgcccgacgggacaactcaaaccgtattgaaacccaaagtctatgtccgcgcacgccccaaagatatgaacggacaaggggcgttgctgtccggcagcgttgttgatatcggcagcggcgccattgaaaaccggggcggcttaattgccgggcgcgaagcactaattttaaacgcacagaatattaaaaatctgcaaggtgatttgcagggcaaaaacatcttcgccgcagcaggcagcgacattacgaataccggcagcatcggcgcagaaaacgccctgctgctcaaagcgagtaacaatatagaaagccgcagcgagacccgcagcaatcagaatgagcaaggctcggtacgcaatatcggccgggtggcaggcatttatctgaccggcaggcagaatggaagcgtcttgctggatgcaggcaacaatatcgtcctgacggcttccgaattgaccaatcaatctgaagacggtcaaaccgtactgaatgccggcggcgacatccgctcggatacgacgggcatttcccgcaatcagaacactatctttgattccgacaactatgtgattcgcaaagaacaaaacgaagtcggcagcaccatccgcacccggggcaatctcagtctgaatgcaaaaggagacatccgtatccgtgcagcagaggtcggcagcgaacaaggccgtctgaaactggcagccggacgggatatcaaagtcgaagccggcaaagcccataccgaaaccgaagatgccctgaaatacaccggtagaagcgggggcggcatcaaacagaagatgacccgccatctcaagaaccaaaacggacaagccgtatccggcacgctggacggcaaagaaatcattctggtttcaggacgcgatattaccgttactggcagcaatatcattgcagacaaccataccattctctcggcaaaaaacaatatcgtccttaaagcagccgaaacacgcagccgcagtgccgaaatgaacaaaaaagaaaaatccggactgatgggcagcggcggcatcggctttacggcgggcagcaaaaaagacacgcaaaccaaccgatccgagaccgtcagccacacagaaagcgtcgtcggcagcctgaacggcaataccctgatttcggcaggaaaacattacacccaaaccggttcgaccatatcctcgccccaaggcgatgtcggcatttcctccggaaaaatcagcatcgatgccgcacaaaaccgttacagccaagagagtaagcaggtttacgaacaaaaaggcgtaaccgtcgccattagcgttccggttgtgaataccgtaatgggcgcggttgacgccgtaaaagcagtccaaaccgtcggcaaaagcaaaaacagccgggtcaatgccatggctgctgccaacgccttgaataaaggagtagattccggcgtggcactctataatgccgcccgaaatcccaaaaaagcagccggtcagggcatcagtgtctccgttacctacggcgaacagaagaacacctccgaaagccgcatcaaaggcacgcaggtgcaagagggcaaaatcaccggcggcggcaaagtttccctgactgcttcaggcgcaggcaaagactcccgcatcacgattaccggctccgatgtgtacggcggcaaaggaacacgcctcaaagcagaaaatgccgttcagattgaagccgcccgccaaacgcatcaggaacgcagcgaaaacaaatccgcaggctttaatgccggagtcgccatcgccatcaacaaaggcatcagtttcggcttcacagccggagcaaactacggcaaaggttacggcaacggcgacgaaaccgcctaccgcaacagccatatcggcagcaaagacagccaaaccgctattgaaagcggtggcgataccgtcatcaaaggcgggcagcttaaaggcaaaggcgttggcgtaacggcagagagtctgcatatcgaaagtttgcaggataccgccgtgtttaaaggcaaacaggaaaatgtttccgcccaagttacggtaggctacggctttagtgtcggtggcagctataaccgctcgaaaagcagctcggattatgcatccgtcaacgagcaaagcggtatctttgcaggaggagacggctatcggattcgcgtaaacggcaaaaccggattggtcggcgccgctgttgtttcagatgccgacaaatcaaaaaacctgctgaaaacaagcgaaatctggcataaagatattcaaaaccatgcttcggcggctgcttccgccttgggcttgagcggcggtttttcatacagcccgaagcctaccagcggacagtattccaccaaaaaagaagcagaaatcggtaaaatcggcggcaaaccggtcagcctgatgcgttttgaccaggtttcggcgaaagacgacgagttgaacgaaaaatatcgaagtgagcgtattgaaaaaggggaaacctttaaagaggcaaatttaaatcaaaacaacgccggcggcttgaaattcggtttgaagcaaaacgatatacacagcaacgacaaatacgccttggcaaaaatgggtttgggcaatctgttgggcaatgccaaagaatcagaaagccgccaatccattacccgctccgtcatcagtgagggagattggcaaattgcttccgcgcagggcaggaaaaatattgccggtattgaaaaaggcacttcatccgcacataaggcattggcaaaagcagaccgcgaaggcttgctgaaagaagtcgaactcaatagggatgttgccaaagagtttatcaatgagacgctgatcggcggcattgcagacgaagcctaccgcagccagtttattgcagaacaccgcctgatgacctttaaaatggatgaaaacggcgagccgattgaagataagcagcttgaagaggatataaataaacagtttgacaactcagtaaagttgaaaaaagaatttgcctcatttaaagattattgggaagcctataaagccattgggggaaatatctacgaattgcgcgaagtatccgaccaggaacggaaaaatctgaaaactgcccgttacaccgacccggagaccggcaaaaccgttgaaaaaatcgttgtcggcgtcaacggcattttcaataatatacaagcagccgccaaatttgccgcccaacaatatgtggggcgtttcaatcccgagaaaaaccgatatgaacgcacctatgaaaatgtttatttcctgcacaatccggaaaccaatgggcggggcttttcaaaattgcccgaaatcgccgttgcggcctttcataaaatgctcgaaggggcaaaaataggcaataagaccgttatcggcttgagcaattcaggcttggctttaggcaatatcatggaagactacgggaaggataaaaacggcctgtttgtcggctcgcacagccgtggaaccctggtggtcgacaatgtactcaataccttgaatacccaagccaatcgggataagaaaattttatccaataccgaactgaaaatggtcggccctgccgccaacgttgtccgggcagataaaaggctgtttcaactgcagcagggggtaacgacacccagaacggcagatttcgcccgtcagtccatccaaatagaaaaccacgaattagaccttatcggcatgctgattggcagaaatccggcaacagtcggaaccaatacccggcaaaaaagccaatggcaggctataagggatattataggggattacacctcgccgcataattgctacggtatggctaataaacaatgtgtaacagatggttatcgagaccctgaaaataaacaaacccaaagtccgacaggtgtatttgaaagaggagtgtccaacgaaatcgaaattatgtaccgtcctgtacgcatttatgatctgcaacatccgaaaggaaaaacaaaatga

SEQ ID NO: 29932 - DNA, 1542 bp, Neisseria meningitidis
atgaagtttttagaccgtgaggcaagcattgccaagccgggtttcaaccgttggctcgtaccgcccgcagcattggcggtacaccttgccatcgggcagatttacgcctattccgtattcaacgcgccgctgaccaaacttatcggcataaccgaatcggcggccggagattggaagctgacgaccgtaggttggattttcagtatcgcactcgcgatgctgggcgcgtcggccgccctgttcggtacgtggatggaacgggtagggccgcgcaaagccatatttgccgccgcctgctgcttcagcctgggcttcttcgtatccgcattcggcgtgcgtacgcacaacctcttcctgctctatttgggcaacggcgtcatcggcggcgtaggcttgggtttgggctacatcgggccggtttccacactgatgaaatggtttcccgacaagccgggtatggcgaccggtttggcgattatgggtttcggtggcggcgcaatgctggcctcgccgctttccgtatcactgatgaacaccttttcaaacgctgcttcggtcggggttgccgaaaccttcgccgtattgggtctgctttacctcgcactgatgatgttcggcgcgtttaccatccgcgtacctgccgacggctggaaacctgaaggctataccgcgccgaaaacgcaaaacaagctggtcagcagcaatcatgtcaacgtgtcccaagccatgaaaacgccgcagttttggctgttgttctgggtattgtgcctgaacgtaactgccggcatcggcgtattgggtcaggcatccgtgatgattcaggaactcttttccgaaacctccataggcaggcaggcagcagtcggcgcaggtgcggcggcaggcttcgtcagcctcctgagcctgtttaacatgggcggacgctttttgtggtcgagcgtttccgacaaaatcggacgcaaaaacacctacaccatcttcttcgtactcggttcgctgctgtatttcgccgttccctccatcggcgagggcggcagcaaagccctgttcatcatcggcttttgcgtgattatttccatgtacggcggcggatttgccgccattcccgcctacctgaaagacctgttcggcacctatcaggtcggcgcgattcacggacgcatcctgctggcctggtcaaccgccgccgtcatcggcccggtactggtcaattacatacgccaaagccaaatcgacagcggcataccggcggcacaggcatacagcgtaaccatgtacatcatggcgtgcctgctgattatcggtttgttgtgcaacctcgccgtcaaatccgtacacgaaaaacaccacgaaaaagacatcaaaaccgccgcacacagcggcaaccccgatgacgaaaccgccatatccgacgcttaccttgtgggcgaaaaagtttccggcggcggcatatcggtctggtggcgttgggcattggccgtcataccgctcgcctacggcgtggtgatggtctttgtcaaagcactcgaccttttctcctga

SEQ ID NO: 29933 - DNA, 1041 bp, Neisseria meningitidis
atgaaagcaatggtttatcacggcgcaaacgacatccgttttgaagaaaaaccccgtccgcagattatcgatccgaccgatgcggtggtgaaaatcgtcaaaaccacgatttgcggtaccgatttgggtatttggaaaggcaaaaaccccgaagttgccgacggccgtattctcggtcatgagggcatcggtattgtagaagaagtcggcgaggctgtaaaaaacatcaaagtcggcgataaagtcattatttcatgcgtcagcaaatgttgcacttgcgacaactgcaaaacccaactctattcacactgccgtaacggcggttggattttgggttacatgattgacggtactcaggccgaatacgtccgtacgccttatgccgacaacagcctcgttccgctgcccgataatgtcaacgaagaaatcgccctgttgttgagcgacgctttgccgaccgcccacgaaatcggcgtgcaatacggcgatgtcaaacccggcgacaccgtattcatcgctggggcaggccctgtcggtatgtccgccctgttgaccgcccaactgtacagtcccgccgccatcatcgtttgcgatatggacgaaaaccgtttgaaactggcgaaagaattgggtgcgacccataccattaaccctgcttccggcgaagtatccaaacaagtctttgccatcgtcggcgaagacggcgtggattgcgccatcgaagccgtcggtatccctgctacatggaatatgtgccaagacattgtgaaacccggcggccatatcgctgtggttggtgtacatggtcaatccgttgatttcaaactggaaaaactctggattaaaaagcttgccatcactaccggtctggtaaacgccaataccaccgaaatgctgatgaaggcgatttccagcagctccgtcgattacaccaaaatgctgacccatcatttcaaattcagtgaattggaaaaagcctacgacgtgttcaaacacgccgccgaaaaccaagtgatgaaagtggttttggaagcggattaa

SEQ ID NO: 29934 - DNA, 5490 bp, Neisseria meningitidis
atgaatgagggtgaagttgttttaacaccagaacaaatccaaaccttgcgtggttatgcttcccgtggcgatacctatggcggttggcgttatttggctaatttgggtgaccgttatgcggatgatgctgctgcaattgtcggtaaggatgcaaacttaaatggtttgaatttatggatgaaaaaaggtgtggaaaacctatgggatgatacggtcggtaaaaagacccgtttagagaaatttgatcgggttgcactgcaacatttcaggcaatatgcgcgtctaattaatcaaaataatggtagattacccaatactagtgaaattgagagaagttactataaagccgttaccgataatggcgtttcttccagtgcagctattgatttagttattaatcgttcacttccggatatggcggatggttattgggcattaggtttggggatagaagccgaacgtatccacaatgagcaagcagtaaataatccgaacggtagcgaaagggataatagaaagcagttaatatctgctttagataaaggatttgatggatcttttaaagagaagcattttacttttttacaatctgtgatgatggatgtaacaaagttaggtgttgaatatacaatagatggttggcaaaaaattggaggttggggtaatgggataatcaatgatttatataaaagtgttgtaaaaagagagtggactggaatatttgagatcgttaataataacatcaagcaaggaaatgaagcttttaaaaatgaaatcaatagcttggttcatgatatgaaagctgctggcaaggaatttggagatgacttaaatacacagtggaataatctcactcaggctgccgaaataatctataatgacatagtagacaatactagtcaaggaatagaaaaaggtgtcaaagccattaaagaattgtctgaaaaaatgaaaaatgctgcttccgatttggctgacggttcagcagagaaagctaaacaagtagtggaagatttggctcaagccgccaaagaagcatacgaaaatgccaaatccacagccgagaaggctgctcaagcagctcgagaattttttaagggcttgcccagttttaaagatctggccgaaaaatttagagatctgttcccaaatccggaaggctggatcgatgatggtcaccaatgtttagctccttgggttaaagaaactaaaaaacgcaatggcaaatatcatgtctacgacccccttgccctagacctagatggcgacggtatagaaaccgttgccaccaaaggctttgcaggcagcttatttgatcacaccaacaacggtatccgcaccgccaccggttgggtttctgccgatgacggtttactcgtccgcgatttgaacggcaacggcatcatcgacaacggtgcggaactcttcggcgacaacaccaaactggcagacggttcttttgccaaacacggctacgcggctttggccgaattggattcaaacggcgacaacatcatcaacgcggcagacgccgcattccaaaccctgcgtgtatggcaggatctcaatcaggacggcatttcccaagctaatgaattgcgtacccttgaagaattgggtatccaatctttggatctcgcctataaagatgtaaataaaaatctcggtaacggtaacactttggctcagcaaggcagctataccaaaacagacggtacaaccgcaaaaatgggggatttacttttagcagccgacaatctgcacagccgcttcaaagacaaagtggaactcactgccgaacaggcaaaagccgccaatcttgcgggcattggccgtctgcgcgatttgcgcgaagctgccgcattgtccggcgatttggccaatatgctgaaagcttattctgccgccgaaactaaagaagcacagttggcattgttagataatttgattcacaaatgggcggaaaccgattcgaactggggcaaaaaatcgccaatgcgactttcaaccgattggacgcaaacggctaatgaaggtattgcactgacaccatcccaagtagcacaactaaaaaagaacgctttagtttccctttctgataaagctaaagcagctattgacgccgcccgcgaccgcattgccgtgcttgatgcctacacggggcaggattccaacacactctattacatgagcgaggaagatgcgcttaatatcgtcaaagtaaccaacgatacatacgaccatctcgccaaaaacatctaccaaaacctgttgttccaaacccgtttgcagccatatttgaatcaaatcagtttcaaaatggaaaatgatacgttcactttggattttagtggtcttgttcaagcatttaaccatgtcaaagaaactaatccgcaaaaagcttttgtggatttggccgagatgcttgcatatggcgaacttcgttcttggtatgaaggccgaagactaatgaccgattatgtggaggaggcaaaaaaagcaggtaaatttgaagattaccagaaagtgttgggtcaggagaccgttgcattattagctaaaacatcgggtacgcaagcagatgatatcctgcaaaatgtaggctttggtcataataaaaatgtttctttatatggtaatgacggcaacgacactctaatcggcggcgccggtaatgactatttggagggcggcagcggttcggatacttatgtcttcggcgaaggcttcggtcaggatacggtctataattacgactacgctaccggacgcaaagacatcatccgctttaccgacggtattacagccgatatgctgacttttacccgagagggcaaccatcttcttatcaaggcaaaagacggcagtggacaagtgactgttcagtcctatttccagaacgatggctcaggtgcttaccgtatcgatgagattcatttcgataacggcaaagtactggatgttgccactgtcaaagaactggtacagcaatccaccgacggttcggacagattgtatgcctaccaatccggaaataccttaaatggcggattgggcgatgactatctgtacggtgccgacggggatgacctgctgaatggtgatgcaggcaacgacagtatctacagtggcaatggcaatgatacgctcgatggaggagaaggcaacgacgccctgtacggctataatggtaacgatgcactgaatggtggcgaaggcaatgatcatttgaacggcgaagacggtaacgacactctgatcggcggtgccggtaatgattacttggagggcggcagcggttcggatacttatgtcttcggcaaaggcttcggtcaggatacggtctataattacgactacgctaccggacgcaaagacatcatccgctttaccgacggtattacagccgatatgctgacttttacccgagagggcaaccatcttcttatcaaggcaaaagacggcagtggacaagtgactgttcagtactatttccagaacgatggctcaggagcttaccgtatcgacgagattcatttcgataacggcaaagtactggatgttgccactgtcaaagaactggtacagcaatccaccgacggttcggacagattgtatgcctaccaatccggaaataccttaaatggcggattgggcgatgactatctgtacggtgccgacggggatgacctgctgaatggtgatgcaggcaacgacagtatctacagtggcaatggcaatgatacgctcgatggaggagaaggcaacgacgccctgtacggctataatggtaacgatgcactgaatggtggcgaaggcaatgatcatttgaacggcgaagacggtaacgacactctaatcggcggtgcaggcaatgattacttggagggcggcagcggttcggatacttatgtcttcggcaaaggcttcggtcaggatgcggtctataattacgactacgctaccggacgcaaagacatcatccgctttaccgacggtattacagccgatatgctgacttttacccgagagggcaaccatcttcttatcaaggcaaaagacggcagtggacaagtgactgttcagtcctatttccagaacgatggctcaggtgcttaccgtatcgatgagattcatttcgataacggcaaagtactggatgttgccactgtcaaagaactggtacagcaatccaccgacggttcggacagattgtatgcctaccaatccggaaataccttaaatggcggattgggcgatgactatctgtacggtgccgacggggatgacctgctgaatggtgatgcaggcaacgacagtatctacagtggcaatggcaatgatacgctcaatggaggagaaggcaacgacgccctgtacggctataatggtaacgatgcactgaatggtggcgaaggcaatgatcatttgaacggcgaagatggcaacgacactctaatcggcggtgcaggcaatgattacttggagggcggcagcggttcggatacttatgtcttcggcaaaggcttcggtcaggatgcggtctataattacgactacgctaccggacgcaaagacatcatccgctttaccgacggtattacagccgatatgctgacttttacccgagagggcaaccatcttcttatcaaggcaaaagacggcagtggacaagtgactgttcagtcctatttccagaacgatggctcaggtgcttaccgtatcgatgagattcatttcgataacggcaaagtactggatgttgccactgtcaaagaactggtacagcaatccaccgacggttcggacagattgtatgcctaccaatccggaagtaccttaaatggcggattgggcgatgactatctgtacggtgccgacggggatgacctgctgaatggtgatgcaggcaacgacagtatctacagtggcaatggcaatgatacgctcgatggaggagaaggcaacgacgccctgtacggctataatggtaacgatgcactgaatggtggcgaaggcaatgatcatttgaacggcgaagacggtaacgacactctgatcggcggtgcaggcaatgattacttggagggcggcagcggttcggatacttatgtcttcggcgaaggcttcggtcaggatacggtctataattaccatgtggataaaaactctgacactatgcactttaaaggatttaaagcagcagatgttcattttatccgttccggaagtgatttggtgcttagcgcttctgaacaagacaacgtacgtatttccggatttttctatggtgaaaaccatcgtgtagatacatttgtctttgatgatgcagctatcagtaatccagattttgccaagtatattaatgctggcaataatttggtacagtctatgtctgtgttcggttctaatactgctgcgacaggaggaaatgtggatgccaatatacaatccgtacagcagccgttattggtaacgccatctgcataa

SEQ ID NO: 29935 - DNA, 945 bp, Neisseria meningitidis
atgtctgcatctaagaaatttccgattcctttgagctatttcagcatcgcgctgggcttgtttgccttggggctgtcgtggcgttacggcgcgtctgtcgggctgctgcccgccttggccgccgaatcgctgcttgcggcggcttcggtcgtctggctcttgctggtggcggcatacctgatcaaaatgtttgcgtaccgaaacgattttttgtctgatttacgcgacttggtgcaatgctgcttcatcagcgcgattccgattaccgctatgctggagggactcgcgctgaagccctatcaggcaggcgcggcggcagtcctgatttatgtcggcgttgccggacagttggctttttcgatgtatcgggcggccggtctgtggcgcggcctgcattccttggaggcgacgacgccgattatttatctgcctacggttgcgacaaactttgtcagcgcgtcatctctggcggcgttggggcatcatgattatgcagctttgtttttcggcgcgggtatgttttcctggctgagcttggaagcctccatcttgggcaggctgcgcacggcggcaccggtcggcacggcggcgcgcggcgtggtcggcatccagcttgcgcccgcctttgtcggctgcggcgcgtattttgccgtcggcggtaaagtcgacggttttgcgttggcattaatcggctacggctgcctgcagcttttgttcttgctgcgcctgacccgctggttttgggaaggtggttttacgatgagcttttggggattttcattcggtttcgcggcaatggcaggatgcggtctgcatctggcggcttccggcgtattgtcgggcttggggctgacgcttgccaccgccggatcggcaggcgtggcgctgctgcttgtcggtacgctgcaccggatagcgacggggcgtttcttggtacgcagctga

SEQ ID NO: 29936 - DNA, 411 bp, Neisseria meningitidis
atggggaataccgctatgtggatgtcctgcaacccaaccattccgatattattcggtattcaggtaaagatttttccgctaaatcaaatatttaatcatatacaccccgcccgttatgcggtaacgttcgaaaacaatgtcgattccaagctgcgcaggcactgggtggcaggtgcgaccatacggattatcgaccgccaaactgacgaagtgattgccaagaaaaccatctatgtctttgaaaaaggcttggacggcacgggtggggcgagaatgccgtggaagtttgctatcttgtgcaataaagaaagacttacttcttcagagccgttatcggattttgttcttagcgttttaaaaccttatatattgcgtcccttatatattgcgtccctaagaagggacgattaa

SEQ ID NO: 29937 - DNA, 7545 bp, Neisseria meningitidis
atgaataaaactctctatcgtgtaattttcaaccgcaaacgtggggctgtggtagccgttgctgaaactaccaagcgcgaaggtaaaagctgtgccgatagtgattcaggcagcgctcatgtgaaatctgttccttttggtactactcatgcacctgtttgtcgttcaaatatcttttctttttctttattgggcttttctttatgtttggctgtaggtacggccaatattgcttttgctgatggcattattgctgataaagctgctcctaaaactcaacaagccacgattctgcaaacaggtaacggcataccgcaagtcaatattcaaacccctacttcggcaggggtttctgttaatcaatacgcccagtttgatgtgggtaatcgcggggcgattttaaacaacagccgcagcaacacccaaacacagctaggcggttggattcaaggtaatccttggttggcaaggggcgaagcacgtgtggttgtaaaccaaatcaacagcagccattcttcacaaatgaatggctatattgaagtgggcggacgacgtgcagaagtcgttattgccaatccggcagggattgcagtcaatggtggtggttttatcaatgcttcccgtgccactttgacgacaggccaaccgcaatatcaagcaggagaccttagcggctttaagataaggcaaggcaatgttgtaatcgccggacacggtttggatgcccgtgataccgatttcacacgtattctcagttatcattccaaaattgatgcacccgtatggggacaagatgttcgtgtcgtcgcgggacaaaacgatgtggtcgcaacaggtaatgcacattcgcctattctcaataatgctgctgccaatacgtcaaacaatacagccaacaacggcacacatatccctttatttgcgattgatacaggcaaattaggaggtatgtatgccaacaaaatcaccttgatcagtacggccgagcaagcaggcattcgtaatcaagggcagttgtttgcttcttccggtaatgtggcgattgatgcaaatggccgtttagtcaatagtggcacgatggctgccgccaatgcgaaagatacggataatacagcggaacacaaagtcaatatccgcagtcagggcgttgaaaacagcggtacggcggtatcgcaacaaggcactcaaattcacagtcagtcgattcaaaacactggcacattattgtcctcaggcgaaatattgattcacaattcgggcagcctgaaaaatgaaacatcaggcaccattgaagccgctcgtttggctattgataccgacacacttaataatcaaggcaaactctctcaaacaggttcacaaaaactccatattgatgcacaaggcaaaatggataaccgtggccgcatgggtttacaagataccgcaccaaccgcgtcaaatggttcaagcaatcaaaccggcaatagttacaatgcatctttccattcatccactaccacaccaacaacggcaacaggtacgggtactgcaaccgtttctatatcaaacataactgcgcctacctttgctgatgggacaattcgcactcatggtgcactggataattcaggcagtattattgccaatggtcaaacagatgttagtgcgcaacaaggtttaaataatgcaggacaaatagacattcatcagttaaatgcaaaaggttcggcgtttgacaatcacaatggaacaattatcagtgatgcggtccacattcaagccggcagcctgaataatcaaaatggcaacatcacaacacgccaacagttagagattgaaaccgatcaactggataacgctcatggcaagttattatcagcagaaatagcggatttagccgtttcaggcagcctgaacaatcaaaatggcgaaatagcgaccaatcaacaactgattattcacgatggtcagcaatctaccgctgtcattgataatacgaatggcacgatacaatcaggccgtgatgttgctattcaggcaaaatcgttatccaacaacggcacacttgccgctgataataaactggatattgcgttacaagatgatttttatgtagaacgcaatatcgtggcgggcaatgaattgtcgctcagtacacgaggcagcctgaaaaattcacatactttgcaagcaggaaaacgcattcggattaaagcaaataaccttgataatgcagcacaaggcaacattcaatccggcggtacgacagacattggcacgcagcacaatttaaccaatagaggcttgattgacggacaacaaaccaaaatccaagccgggcaaatgaataatatcggtacaggtcggatttatggcgacaatatcgctattgcggctacccgcttagacaatcaagatgaaaacggtacaggtgccgccattgcggcacgtgaaaacctgaatttaggcatcggacaattaaacaaccgtgaaaacagtctgatttacagcggtaacgatatggcggttggcggcgcattagataccaatggccaagccacaggcaaagcccaaaggatacacaatgccggcgcaaccattgaagctgcaggcaaaatgcgtttaggtgtagaaaagctgcacaataccaatgagcatttgaaaacgcagttggtagaaacagggcgcgagcatattgttgattacgaagcatttggacgacacgaattattgcgagaaggcacgcaacatgaattaggctggtctgtctataacgatgaatcagaccacttacgcacccctgatggagcggcgcatgaaaattggcataaatacgattatgaaaaagtcacccaaaaaacccaagttacccaaactgcgccagccaaaatcatttcaggtaatgatttaaccattgatggtaaagaagtatttaataccgatagccaaatcattgctggtggcaatctcattgtacaaacagaaaaagacggtttgcataacgagcaaacctttggcgaaaagaaagtattcagtgaaaatggcaaattacacagctattggcgtgagaaacataaaggacgagactcaacgggacatagcgaacaaaattacactttgccggaggaaatcacacgcaacatttcactgggttcatttgcctatgaatcgcatcgcaaagcattaagccatcatgcgcccagccaaggcactgagttgccgcaaagcaacggtatttcgctaccctatacgtccaattcttttaccccattacccagcagcagcttatacattatcaatcctgtcaataaaggctatcttgttgaaaccgatccacgctttgccaactaccgtcaatggttgggtagtgactatatgctggacagcctcaaactagacccaaacaatttacataaacgtttgggtgatggttattacgagcaacgtttaatcaatgaacaaatcgcagagctgacagggcatcgtcgtttagacggttatcaaaacgacgaagaacaatttaaagccttaatggataatggcgcgactgcggcacgttcgatgaatctcagcgttggcattgcattaagtgccgagcaagtagcgcaactgaccagcgatattgtttggttggtacaaaaagaagttaagcttcctgatggcggcacacaaaccgtattggtgccacaggtttatgtacgcgttaaaaatggcgacatagacggtaaaggtgcattgttgtcaggcagcaatacacaaatcaatgtttcaggcagcctgaaaaactcaggcacgattgcagggcgcaatgcgcttattatcaataccgatacgctagacaatatcggtgggcgtattcatgcgcaaaaatcagcggttacggccacacaagacatcaataatattggcggcatgctttctgccgaacagacattattgctcaacgcaggcaacaacatcaacagccaaagcaccaccgccagcagtcaaaatacacaaggcagcagcacctacctagaccgaatggcaggtatttatatcacaggcaaagaaaaaggtgttttagcagcgcaggcaggaaaagacatcaacatcattgccggtcaaatcagcaatcaatcagagcaagggcaaacccggctgcaagcagggcgcgacattaacctagatacggtacaaaccagcaaacatcaagcaacccattttgatgccgataaccatgttattcgcggttcaacgaacgaagtcggcagcagcattcaaacaaaaggcgatgttaccctattgtcagggaataacctcaatgccaaagctgccgaagtcagcagcgcaaacggtacactcgctgtgtctgccaaaaatgacatcaacatcagcgcaggcatcaacacgacccatgttgatgatgcgtccaaacacacaggcagaagcggtggtggcaataaattagtcattaccgataaagcccaaagtcatcacgaaaccgcccaaagcagcacctttgaaggcaagcaagttgtattgcaggcaggaaacgatgccaacatccttggcagcaatgttatttccgataatggcacccagattcaagcaggcaatcatgttcgcattggtacaacccaaactcaaagccaaagcgaaacctatcatcaaacccagaaatcaggattgatgagtgcaggtatcggcttcactattggcagcaagacaaacacacaagaaaaccaatcccaaagcaacgaacatacaggcagtaccgtaggcagcttgaaaggcgataccaccattgttgcaggcaaacactacgaacaaatcggcagtaccgtttccagcccggaaggcaacaataccatctatgcccaaagcatagacattcaagcggcacacaacaaattaaacagtaataccacccaaacctatgaacaaaaaggcctaacggtggcattcagttcgcccgttaccgatttggcacaacaagcgattgccgtagcacaaagcagcaaacaagtcggacaaagcaaaaacgaccgcgttaatgccatggcggctgccaatgcaggctggcaagcctatcaaacaggtaagagtgcacaaaacttagccaatggtacaaccaatgccaaacaagtcagcatctccataacctacggcgaacagcaaaaccgacaaaccacccaagttcaagccaatcaagcccaagcgagtcaaattcaagcaggtggtaaaaccacattaatcgccacaggcgcagcagaacaatccaatatcaacatcgcaggctcagatgttgccggcaaagcaggcacaatcctgattgccgataacgacatcacactccaatcagccgagcaaagcaataccgaacgcggccaaaacaaatcggcaggctggaacgcaggtgctgccgtatcattcggacaaggaggctggtcattaggcgttaccgcaggcggcaatgtcggcaaaggctacggcaatggcgacagcatcacccaccgccatagccatatcggcgacaaaggcagccaaacccttatccaaagcggtggcgacactaccatcaaaggcgcgcaagtacgcggcaaaggcgtacaagtcaatgccaaaaacctaagtattcaaagcgtacaagatagagaaacctatcaaagcaaacaacaaaacgccagtgcacaagttaccgtaggttatggcttcagtgccggtggcgattacagccaaagcaaaatccgagccgaccatgtttcagtaaccgagcaaagcggtatttatgccggagaagacggctatcaaatcaaggtcggaaaccatacagacctcaaaggcggcatcatcaccagtacccaaagcgcagaagacaagggtaaaaaccgctttcagacggccaccctcacccatagcgacatcaaaaaccacagccaatacaaaggcgaaagttttggattgggcgcaagtgcgtccataagcggcaaaacactgggacagggcgcacaaaataaacctcaaaacaaacacctgacaagcgtagccgataaaaacagcgcaagttcatcagtgggttatggcagcgacagcgacagtcaaagcagcatcacaaaaagcggcatcaacacccgcaacattcaaatcaccgacgaagccgcacaaatccggctgacaggcaaaacagcggcacaaaccaaagccgatattgatacaaacgtaaccacagacaccgccgaacgacattcgggcagcttgaagaacaccttcaacaaagaagcggtgcaaagtgaactggatttacaaagaaccgtcagccaagattttagtaaaaatgttcaacaagccaataccgagattaaccaacatttagacaaactcaaagcagacaaagaagcagccgaaacagcagcagccgaggcattagccaatggcgatatggaaactgccaaacgcaaagcccatgaagctcaagatgcggcagcaaaagcagataattggcaacaaggcaaagtcattctcaacatgttagcctcaggtttagctgcgccgacccaaagcggagcgggcatcgctgcggctaccgcatcgccagccgtatcgtatgcgattggacagcactttaaagatttagccggtcaaaacgcgaatggtaaactaaccgccagtcaagaaaccgcacacgttcttgcccacgcggtattaggagcagcggttgccgcagtaggagacaacaatgctctagcaggagcattgagtgcgggcgggtcggaagcggctgcgccttacatcagcaaatggttatacggcaaagaaaaaggaagcgacttaacggcggaagagaaagagactgtaacagcgattacaaatgtattgggtacggctacgggtgcggcagtcggcaacagcgcaacagatgcagcgcaaggcagcctgaatgcgcaaagtgcggtggagaataatgatactgtagagcaagtgaaatttgctcttaggcaccctagaattgctattgcaattggatctgtacataaagatcctggctctacattagagcctaatatttcaacaattgcttcaacttttcaattaaatttatttcctaatagtgaatttggtggtgaaggtggagttggcaatgcattcaggcacgttttatggcaagcaaccatcacacgagaatttggcaaagatattgctgttaaagtaggaaatagtcatgaaagtggggaaaaaattaattattctataagacgtaatctttcattagataaagcagatgaaatgattgatcaactaaataacgaaataggaagagaaatagcattaaataccaataggttaaacacaaaagagttagttggattaattctggaaacttataaaaataatggtttttatcaagcagaaagaaacagtaatggaaattatgatgttgtaagaaaaagattatctgaaaaagattaccagaatacaagcaatatattgattcacttagataatactggtgccggatttaaaattcagcagaggagaaaacaaatcagagcacaaatttcagccagacaatggagaagataa

SEQ ID NO: 29938 - DNA, 384 bp, Neisseria meningitidis
ttgtactgtcttcggcttcgtcgccttgtcctgatttttgttaatccactatacatcatcgctactaccgttccggcgcaacaggcattcctcgatgccgccgaactgatgcaatggagtatagaaaccgaagggctgggcttgaacgtcatctcgcacaagatactcggcaaagaccacgcccaagtcgaatttgaagcctacttccgagacggacaacaccgatccgcgcatcacgaactgtccggcttcgtcaacatcggcggacaatggtattttatcgatcccaccgttccgcatcctgcgatgaaacaaccctgcatttgcggatcaggcaaaaaattcaaagcctgctgcggcaaatatctgaaacctgtcgcataa

SEQ ID NO: 29939 - DNA, 996 bp, Neisseria meningitidis
atgaaaaaatccctgattgccctgactttggcagcccttcctgttgcagcaatggctgacgttaccctgtacggcaccatcaaagccggcgtagaaacttcccgctctgtatttcaccagaacggccaagttactgaagttacaaccgctaccggcatcgttgatttgggttcgaaaatcggcttcaaaggccaagaagacctcggtaacggcctgaaagccatttggcaggttgagcaaaaagcatctatcgccggtactgactccggttggggcaaccgccaatccttcatcggcttgaaaggcggcttcggtaaattgcgcgtcggtcgtttgaacagcgtcctgaaagacaccggcgacatcaatccttgggatagcaaaagcgactatttgggtgtaaacaaaattgccgaacccgaggcacgcctcatttccgtacgctacgattctcccgaatttgccggcctcagcggcagcgtacaatacgcgcttaacgacaatgcaggcagacataacagcgaatcttaccacgccggcttcaactacaaaaacggtggcttcttcgtgcaatatggcggtgcctataaaagacatcatcaagtgcaagagggcttgaatattgagaaataccagattcaccgtttggtcagcggttacgacaatgatgccctgtacgcttccgtagccgtacagcaacaagacgcgaaactgactgatgcttccaattcgcacaactctcaaaccgaagttgccgctaccttggcataccgcttcggcaacgtaacgccccgagtttcttacgcccacggcttcaaaggtttggttgatgatgcagacataggcaacgaatacgaccaagtggttgtcggtgcggaatacgacttctccaaacgcacttctgccttggtttctgccggttggttgcaagaaggcaaaggcgaaaacaaattcgtagcgactgccggcggtgtcggtctgcgccacaaattctaa

SEQ ID NO: 29940 - DNA, 1119 bp, Pseudomonas aeruginosa
atgctcgaactcgatacccggcagatccgcatggggccagcgcgccgcggacaaggccgaagccctgcgcctgctcggcgcggcgctggtcgccgacggtctggccgcgcccggctatgccgagggcctgaaggcgcgcgaggcacaaggctccacctacctcggccagggcatcgccataccccatgggaccccggatacccgcgagctggtcttcagcaccggtgtgcgcctgctgcaattccccgagggagtggactggggcgatggccagcaggtctacctggccatcggcatcgcggcgaagtccgacgaacacctgcagctcctgcaattgctcacccgcgccctcggcgaggccgacctgggaccggcgctgagcgcggccgccagcgccgaggaagtcctcggcctgttgcagggcgcgccgcaggaactggcgctggacgcacaactggtcggcctcggccagaacgccgaggacctcgacgaactggcctggctcggcgcgcgcctgttgaagaaggccggctgcgtggagaacggcttcgccgccgtgctccagcagaccgaaccgttgccgctgggcgacgggctgtgctggttgcacagcgaacaattggtgaagcgccccgggctggccttcgtcactccggcgcaaccgttgcagcaccaggggcaactggtcaccgggctgttctgcctggccagcctgggcgaagcgcaccaggcgctgctcgaacgcctgtgcgacctgttgctggaagggcgtggcgccgagctggtgcgcgccaccagcagccgcagcgtactcgcggcgctcggtggcgagctgccgccggactggcccagcgcgcgagcggtcctggccaacccgcatggcctgcatgcccgcccggcgcaggcgtggcgcagctggccaagggtttcgccggcgagatccgggtacgcctggccgacagtgaggcggcccccgtctcggcgaagagcctgagcaagctgctcgccctcggcgcgcgacgcggccagacgctggagttcagcgccgagccggcgatcgccgaggacgcgctgccagccttgctggccgcggtgcgcgaggggctcggcgaggaggtc

SEQ ID NO: 29941 - DNA, 1093 bp, Pseudomonas aeruginosa
gaaatcaacccgatcctcaacagcatcaaggacctctccgagcgcacccagaccattcgggggtatctttgactacgatcagaagcatgatcgcctggtcgaagtaaaccgcgagctcgaagaccccaacgtctggaacaaccccgaatacgcccagaacctcggccgcgagcgcgcccagctggcgcaggtggtggaaaccctggacgacctgaccagcggcctggccgactcccgcgacctgctggacatggcggtcgaggaagacgacgagggcgccgtcgacgacgttgccaacgaagtcgagcgtctgcgcgagatcctcgagaagctggagttccgccgcatgttcagcggcgagatggacccgaacaacgcctacctggacatccaggccggctccggcggcaccgaggcccaggactgggccaacatgctgctgcgcatgtacctgcgctgggccgacaagcacggcttcgacgccactatcatcgagctgtccgagggcgaggtcgccggcatcaagggcgccaccgtgcacatcaagggcgagtacgccttcggctggctgcgcaccgagatcggcgtgcaccgcctggtgcgcaagagtccgttcgactccggcaaccgtcgccacacctcgttcaccgcggtgttcgtatcgccggaaatcgacgacaacatcgagatcgagatcaacccggccgacctgcgcatcgatacctaccgctcctccggcgcgggcggtcagcacgtgaacaccaccgattcggcggtgcggatcacccacgtgccgaccaataccgtggtggcgtgccagaacgaacgctcccagcacgccaacaaggacaccgcgatgaagatgctgcgggccaagttgtacgagctggaaatgcagaagcgtaccgccgcgtcccaggccctggaggactccaagtccgacatcggctggggccaccagatccgctcctacgtgctcgaccagtcgcggatcaaggacctgcgtaccggtatcgagcgcagcgactgcgacaaggtgctcgacggcgatctagacgaatacctcgaagccagcctcaaacaggggctgtaa

SEQ ID NO: 29942 - DNA, 832 bp, Pseudomonas aeruginosa
atgagcgaccaacaactcgaccagcacgaactgcaacaggaagaaaacaagctgatcgcccagcgcaaggaaaaacttgccgccgtgcgcgaagcccgggccatcgccttccccaacgacttccgccgcgacgcctacttcgcggacctgcagaaacagtacgccgacaagaccaaggaagagctggaagccgcagcgatcccggtcaaggtggccggtcggatcatgctcaaccgcggttccttcatcgtcctccaggacagcagcgagcgcctgcaggtctacgtcaaccgcaagaccctgccggaagaaaccctggccgagatcaagacctgggacctgggcgacatcatcggcgccgaaggcgtgctggcccgctcgggcaagggcgacctgtacgtcgacatgaccagcgtgcgcctgctgaccaagtcgctgcgtccgctgccggacaagcaccatggcctgaccgacaccgagcagcgctaccgccagcgctacgtcgacctgatggtcaacgaggaaacccgccacaccttccgcgtgcgttcccaggtcatcgcccacatccgccgtttcctcagcgagcgcggtttcctcgaagtggagaccccgatgctgcagaccatccccggcggcgccgcggccaagccgttcgagacccatcacaacgcgctggacatggccatgttcctgcgcatcgccccggagctgtacctcaagcgcctggtggtcggcggtttcgagaaggtcttcgagatcaaccgcaacttccgtaacgaaggcgtctcgacccgggaacaaccccgagttcaccatgctcgagttctac

SEQ ID NO: 29943 - DNA, 1480 bp, Pseudomonas aeruginosa
atgaagattctcgccatccgcctgaagaacctcgcctccctcgctggcgagcaggaaatcgacttcacccgcgaaccgctgtccagcgccggcctgttcgccatcaccggtccgaccggcgccggcaagagcaccgtgctggacgccctgtgcctggccctgttcggcagcacgccgcggctggaaagcacttcggccagcagcaaggttcccgatggccggaacgagctgtccagcaacgacgaacgcaacctgctgcgccgcggttgcgcctaccgtacgccgaagtggatttcgtcggcatcgacggccaccgctatcgcgcccgctgggaaacccggcgctcccgggacaaggcggacggcgccttgcaaaagagccagcagagcctccaggacctggagacccagcaaatgctggcagcgaacaagaaaagcgagttccgcgaacagctggagcagaagctcggcctcaatttcgcccagttcactcgcgccgtgctgctggcccagagcgaattcagcgccttcctcaaggccagcgacaacgaccgcggcgcattgctggagaaactcaccgacaccggcctgtacagccaattgagcaaagccgcctatcagcgcgccagccaggccgacgagcagcgcaagcaactcgagcaacgcctggaaggcagcctgcccctggccgagcaggcccgggccgggctcgaggcggcgctggaatcccacgcccaggcgcgtctccaggagcaacaggcactgcaacgtctggaaggccagcaacaatggttcaccgaggagcagcggctgctgcaatcctgcgagcacgcacaaggccaactggccgaggccaggcaggcctgggacgccctggcgacggagcgggaaaccctgcaatggctggagcgcctggctccggttcgcggactgatcgaacgcctgaagcaactcgagcaggaactccggcactccgagcagcagcagcggcagcgcaccgagcagcaagccgcgggcaccgagcgcttgcaaggattgcaggcccgcttgcaggaggcgcgcgagcgccaggcccaggccgacaaccatctgcgtcaggcccaggcgccgttgcgcgaggctttccagctggagagcgaggccaggcgcctggagcgaacgctggccgagcgacaggaactccatcggcaatcgaaccagcgccacgcccagcaaagcgacgccgctcggcaactggatatggagcagcagcgccatgtcgcggaacaggcgcaactgcaggcggcattgcgcgacagccaggctctcgccgcgctcggcgacgcctgggtgacccaccagggccagctcgccaccttcgtgcaacgtcgccagcgcgcgctcgaaagccaggcgcagctccccgagctggaaaaatccctggcccacgccggggaaccgctcgaacgcttgcaggcgcaatggaccgccctccatggcag

SEQ ID NO: 29944 - DNA, 759 bp, Pseudomonas aeruginosa
atgaccgacttcacccaagccatccccgttctcccggagcccgactggcacgccgtggccggcatccccatcgtcgatgccggcacgccgctggaggcgctcgggctgagccgcgagttcagcgtctggccggcctaccacaagctcggcattcctcacgcgatcccggagtgccacgctcgcggcgaggtcttcgagcgtctcctgcgggtcgccgccgccctccccggcggcgtgcgcctggtggtgctggacgcctggcggccgttcgccgtgcagcagtatctctacgacagcctgtccagcgccctggccgcgcactacccacgggccggcgaggccgagctggaacggctcacccgccagttcgtctcgccgccgagcagcagccgcgaggcgcccagcccgcatctcaccggcggcgcggtggacgtcaccctgtgcgacgcccagggccgctggctggacatgggcagcgccttcgacgaagctgtgccggcctcctacaccgcctacttcgaacgcctggcggagcccgacacgcgccagcgacgcgtccgcgatcaccgtcgtctgctctatcacgcgatgctcgacgccggtttcagcaacctgcccagcgaatggtggcactacgatttcggcgaccagctctgggcctggcacaccggcgcgacgcaggcgctgttcggcccggtgcagttgcaggcgatggacgcgctctggcgccagcagttgcagaagcgccctccggcggac

SEQ ID NO: 29945 - DNA, 670 bp, Pseudomonas aeruginosa
atttcactgagtctcgggtggagacagcgccgccatcgttacgccattcgtgcaggtcggaacttacccgacaaggaatttcgctaccttaggaccgttatagttacggccgccgtttaccggggcttcgatcaagagcttcgcttgcgctaaccccatcaattaaccttccggcaccgggcaggcgtcacaccctatacgtccactttcgtgtttgcagagtgctgtgtttttaataaacagtcgcagcggcctggtatcttcgaccagccagagcttacggagtaaatccttcaccctagccggcgcaccttctcccgaagttacggtgccattttgcctagttccttcacccgagttctctcaagcgccttggtattctctacccgaccacctgtgtcggtttggggtacggttcctggttacctgaagcttagaagcttttcttggaagcatggcatcaaccacttcgtcatctaaaagacgactcgtcatcagctctcggccttgaaaccccggatttacctaagatttcagcctaccaccttaaacttggacaaccaacgccaagctggcctagccttctccgtccctccatcgcagtaaccagaagtacaggaatattaacctgtttcccatcgactacgcttttcagcctcgccttaggaac

SEQ ID NO: 29946 - DNA, 308 bp, Pseudomonas aeruginosa
atgacgcaagtcacggtgaaagaactggcccaggtggtcgacacaccggtggagcgcctgctgctgcagatgcgtgacgcaggtctgccgcacaccagtgccgaacaagttgtaacggatagcgagaagcaagccctgctgacccacctgaaatgcagccatggcgatcgcgccacgagccgcgcaagatcaccctgcaacgcaagaccactaccacgctgaaagtgggtggcagcaagacggtgagcgtcgaagttcgcaagaagaaaacctatgtcaagcgcagccacgacgagatcgaagccgag

SEQ ID NO: 29947 - DNA, 366 bp, Pseudomonas aeruginosa
atgctttcagcggttatcttttccgaacatagctacccggcaatgccactggcgtgacaaccggaacaccagaggttcgtccactccggtcctctcgtactaggagcagcccctctcaaatctcaaacgtccacggcagatagggaccgaactgtctcacgacgttctaaacccagctcgcgtaccactttaaatggcgaacagccatacccttgggaccggcttcagccccaggatgtgatgagccgacatcgaggtgccaaacaccgccgtcgatatgaactcttgggcggtatcagcctgttatccccggagtaccttttatccgttgagcgatggcccttccatacagaaccaccggatcac

SEQ ID NO: 29948 - DNA, 876 bp, Pseudomonas aeruginosa
gtgcagggccttggccagcttctgcatggcgtcgctgtccttgttgtccggccgcgcgacgaggatgttcacgtagggcgagtcgctgccttcgatggccagcgcatccttggttgggttcagcttggcttccagggcgtagttggtattgatcagcgccatgtcgacctgggtcagcacgcgcggcagggtcgcggcttccagttcgcggatcttgatgttcttcggattgtcgacgatgtccttcggcgtggcggtgatgctcttgttgtccttgagcttgatcaccccggccttgtccagcaggagcagggcgcggccgccgttggtggcgtcgttgggaatcaccacggtagcgccggaaggcagttcgtcgagcttcttgtacttgctcgagtaggcgcccagcggctcgatgtgtacgccggtcacggcgaccaggtcggtgcccttggccttgttgaactcatcgaggtacggctggtgctggaagaagttggcgtccaggcgcttttccgagacctgcacgttcggctgcacgtagtcggtgaactccttgatcttcaggtccacgccttccttggccagcagcggcttgaccacgttgaggatctccgcgtgcggcaccggggtggccgcgacggtgagggactcggcggcctgggcggcggtgaggccgagcgccgcgacagcggagaaagcagcaagcagttttttcatcttcaactcctttcgaggtgttcctggcggctgtggataaccgcggcgctcagggttttgggcttggccggcaagcttacttgcgcgagaagtgcaccaccagcttgtcgcccacggtttgcagaatctggacgaggatcagcagcatcaccaccg

SEQ ID NO: 29949 - DNA, 2197 bp, Pseudomonas aeruginosa
agcgacccgtcccaggaggccgccgtgttgcaggcccggcagagcccggggctgctggtggaaggcccgcccggtaccggcaagagccagaccatcgtcaacatggtcgccgacgccatcggccgccagcgcagcctgctgatcgtctgccagaagcacgccgccctggaagtggtacacaagcgcctggtggccgagggcctgggccagcgcatcgtcatgctcaacgacgtcaaccgcgaccgcgaaccggtgatccgcaacatccgcgagcagctcgaagcgctgttcgccgacgccggcggcgcccagggctgggagcgccacgcgagcgcctggcggcgcgtatcgaggcgctggaaggcgaactggaccgctaccaccagagcctgcaccgcgtggacgaggccaccgggctgagctaccggcgcctgctcggcgaactgatcgagctggagaaaggctcgccgccgctggacttcccggccctgcgccagcgcctggcggcgctggacatcggcagcctggcgcgcctggaggaaaactgcgcgccgctggtccgcctctggctaccggcccgctacgaaggcagcccgctggcgcaactgcgcgccttcgccaccgaccaggccaccctgcaagccttcgccgacagcctgcgcgccttcggcgaagcggagaacgcccggcagaaagccctcgacgaacacccggcgagcttcgaggtcgacgacccgacgccctaccgcgcctggctggcaagccaggtcggtaccctgctgaatttgcgcgaggagcagcgccagcgcctggcccactggctgccgctgttccgtgacgccgcaccaggacagccgagccgtggcgacggcctgttggcggaggccgagcagatcgaacggcaactgcgccagctcgacctcgaacggcatgcgccgctgctgtcgccggccctcgccatgctcgaagagaacaacctcgaacgcttccaggcccacacccgccaggtgctcgaggcacgcacctggctggcccggctcaacccgctgcacctgctgcggcgcggccgcctgcggcgcttcctgcgcgagcacggcgaggccgacgacgacagccgcctggccgccctcctcggcgcctgcgacctggagcgccagtggcggccgctgcgccggcaactggcggcgctgcaacagagcctggggctggcgacagtcgccaccgatgccggtccggaactgaccggcctggccggccacgccagccagcaactgcgcgagatccagaccctggctcgtggcctggcccaagcgccgcgcgccgagcagctcgacgcggtgatcctcaccggcgagaaacagcgcttcgaagcgctgctcggcgacctcgacgccgcgctgatccgccaggccgcacgccagctcagcctggacaaactgaaggtgctcgccgactggctcggcgacgaactgctggaacagctgcaccgcgccatcgccggcaaccagagcaacctgccggccctcggccgcctgcgcgaggcgctaccgcaactggtcgcctaccagcgcttccgtggccgcgccggccagctcgaagccaccgacctggaattcctggccctgctgcgccagcgccaggaacgactcgacgcgattcccgtcgaagaactcgaagccacggtgcgccgcatgctcaaccgcgaagcgcggctgggctggaagcagcgcctggaacaagacaatccggaactgctgttcagcaggacgaagccagggccagggtcgccagcctcgccgaagccgatgtgcagatgcgcgcgctgaaccgcgaactgctcggcaagggcatcgacgccgcgcgcctgggcagccgcaagcaatgggaagacgtcacccgcctgaccggcaagcgctcgcggcgcctgcgcgagttcatcgagctgggcgccgaactcggcctgatgagcctgcgcccggtctggctgatgaaccccgacctggccagccgcgtgctgccgctcaaggccgggctgttcgacatggtgatctacgacgaagcctcgcagatgccggtggagttcgccctgccgaccctctatcgcgggcgggtcacggtggtcagcggcgacgagaagcagatgccgccgaccgcgttcttctccagccgcgtggaaagcgacgaggccgaactgttc

SEQ ID NO: 29950 - DNA, 822 bp, Pseudomonas aeruginosa
gtgcattcaataatggggaggaggcgcttcgtcttcccccgcctcgcccaccagcccctggacgtcttccagacgcttgatcaatgccgcgacctgaagctgcagtcgctcgatgctgcgctgctgctcgaccaccacatcgttgagagcctgcaaagtgtcatcctggaaagcctggcggcattccaggtcatccatgcgcgcgtccagctccatctaggcctccccggcaaaacggaagccgtcggtcagcaccatccgcaacttgccgcggatcgcctcgacctgctcggaagaataaggccgagccggatggcgcccccagacagggccgggccaggcgtcgtcaccacgtcgccggacgatcacgtgcatgtgaagctggctgaccacattgcccaggttagcgacattcatcttgtccgcacggaaggtgtccttgaggacctctgccagcagcgtggcctcgcgccacagcgcctgccggtcatcgacatcgagctggaacagctcggtgacatcctcccgcctcggcaccaggatgaaccacggatagcgggcatcgttcatcagcagcaggcggctgaggggaaagtcgccgagcaacagggtgtcctgctccagccggggatccaaagcgaacatactgacctctcctgttcgaccgtcgttcatggacagcttagcccctccctccgggaagggccccgccgtaactgccgcgcaggatacttcgccgcccggccaaagcaagcccacacatccgcccgccccagcttggcgcgcctctccagccgaacgccccataagatgccggccaaa

SEQ ID NO: 29951 - DNA, 678 bp, Pseudomonas aeruginosa
ttggcatcgctcatgacgcgctcctcacttgacctcgggcggggtgctgaaggtgtggtagggcgccggcgaggggatgctccactccaggccctcggcgccgtcccagggcttggcaggggccggcttgccgccgcggatgcacttgatgacgatgaacaggaacagcagctgggtggtgccgaacatgaaggcgccgatcgacgagaccatgttgaagtcggcgaactgcaggttgtagtcggggatccgtcgcggcatgccggcgaggccgacgaagtgcatcgggaagaacgccaggttcatgccgatgaagctcatccagaagtgcagcttgccgagggtctcgtcgtacatgtggccggtccacttcggcagccagtagtaagccgaggcgaagatgccgaagatcgcgccgggcaccagcacgtagtggaagtgggcgaccacgaagtaggtgtcgtggtactggaagtctgccggggcgatcgccagcatcagtccggagaagccgccgatggtgaacaggatgacgaaggccacggcgaacagcatcggcgtctcgaaggtcagcgaaccctcccacatggtggtcacccagttgaacaccttcaccccggtgggcaccgcgatcagcatggtggcgtacatgaagaacagctcgccggtgatatacaa

SEQ ID NO: 29952 - DNA, 603 bp, Pseudomonas aeruginosa
atgttcctactccaatcagttacggaacgggaatttgaaagcacgcagcagggcgcgaccttcgtcatccgtacgagcggtggtggtcagggtgatgtccaggccacgcagcgcatcgatcttgtcgtaatcgatttccgggaagatgatctgctctttcacgcccatgctgtagttgccgcgaccatcgaaggacttggcattcaggccgcggaagtcacgcacgcgcggcagggagatggacagcagacgatccaggaactcgtacatccggtcgctacgcagggtgaccttgacgccgatcggccagccttcacggatcttgaagcctgcgatggacttacgagcgtaagtcacgaccggcttctgaccagtgatcttttccagatcggctacggcgttctcgatgatcttcttgtcaccgaccgcctcgccaagacccatgttcagggtgattttggtaacgcgcggaacttccatcacgttcgccagctgaagctcttctttcagcttgggcgcgatttccttccgataaatttctttcaatcgtgccatggtgatctacctagcagcctcaagcctgaaccggtttctgggtcgact

SEQ ID NO: 29953 - DNA, 354 bp, Pseudomonas aeruginosa
atgtacctctggctgaagaccctgcacatcaccttcgccctcagcagcgccgccctgttcgtctggcgcctggcctggaactggtcggggcgcaaggccagcggcatccgccgctggggaccgcacctggtggacaccctgctgctgctcagcgcgctcggcctggtgcacctggcgatgccctggccgctgccgctctggctgctggcgaagctggggctgttgctgggctacatcgtctgcgcggcgttcgccctgcggatggcgcggggccccggcaagggcctgctcagcgtcctcagcctcaccctgctgggcgggatcttctacctggcgctgaacaagccctggtgg

SEQ ID NO: 29954 - DNA, 1776 bp, Pseudomonas aeruginosa
atgtcagcaataagcgatacatgtgggattactccggggtcagcgtcagaagctcgcctgcacgctgaaatgcaggcgcgagtcgtgtttgtcggtgttcgtcccttccagcagcgggaaggcccagtcgaggctgccggacagccagtcggcgagttgcgcgcgggtgccgatgccgacgctggccaggctgaagtcgtcgtcctgttcgggcagcgcatcctgcaggcgcagttgcgcgccctcggcgaacacgtagaagcgccagtcgttgacgtagccgccggcgcgcttgccgaggaagcgtccgagggacggcgtacgccattcctgggagagcaggtagccgtcgtcggcggtgttctccgccgccaggtagccacgcacgctggtggcaccgccggcggcgaactgttcgttggaaatcagcggcccggaggcgagctggaaggccgccttggtcgccacctgccagtcgccgccgaaggtcagggtgtggttgagatcgcccttgagcacgccgaagccggacttggcgcgataacgcttgcggtcgaattcctcgtcgtcgtcgccgtagccgaggagactgccggtaccggccaccaggctcaggccaagggccaactgggaacgttcggtgtagcggaagccgttgtagccgagggtcagcggggcgtacttgatcggcaccctgtcgttgttgccgccgatccgggtctgttcctcgaagtccttgaagtcgacgccgaaggagaacgagtgcgaccagaggccggtgaccggcaggctgtagatcgccgcgacgccataggagtggccctggccgaccacattcatgctgcccaccgtggccacgtcgctgtcggactggtagccggacaactgcacgctccagcgctggctcagcggcgcggtataggagccggaccagaccttggcgttgtcctggtcctgcggcgcggtgaaataggtcagcgagatggcgtggccgagttgccagaggttgtcgtagcccagcgaaaccaccgagcgcaagtgacgggtgtcggcgctgtagtcgttgttcaggccgatgctggcgtgccagggattcttgtcttccacctgcaggtcgacgtccatggtgccgggccgctggccctcgcgcaccatcggcagcacctggcggccgggggtgcggttgacctgcgccagctcgcgctggacctgggcgaagtcgggcaccttgccctcctccagggccggcacttcctcgcgcaactccaccggcgaatagtgcttggcgccgaccacccggacgcgaccgatagtggtctcggtgacctgcaggtagaccaccccgccgctcacctgctgctccggcagctcgacgtagaccgactggtagcccttctcctggtaggcggcctgcagcgcatcgcgcgccccctcgatgtcgcccaggctgcgctgcggtccgaggaagggatacaccgccgcctcgatggcgcggttgtccagcacggtgttgccgcgtaccacgtactcgttgatgtccaccagacgctggggctcggctcccgccgcggcgggaggggcctcgtcggccagcgaagcgcacgacaatgcgacagccaggcaaccgatcgaccagcgctggcgaaacgggtgcgcacaattgaacagcgaacgcttcacacggtcccccgaagttccatcgggacttattgttctaatgcaacaagtccgttcatcgaacagttctgtgaaagacaacaaactagcggcgacgca

SEQ ID NO: 29955 - DNA, 1311 bp, Pseudomonas aeruginosa
atgaacgctttgaaaggccgggacatcctggcgcttggttttatgacctttgccctgttcgtcggggccggcaacatcatcttcccgcccatcgtcggcttgcagtccggcccccatgtgtggctggcggcgctgggcttcctgatcaccgcggtggggctgccggtgatcaccgtgatcgccctggccaaggtcggcggttcggtcgacgccctcagccatccgatcggtaggtatgccggcggcctgctggcggcggtctgctacctggcggtcggcccgctgttcgccattccgcgcaccgccacggtgtccttcgaggtcggcgtggtgccgctgctcggcgagagcggcacggcgctgttcgtctacagcctggcgtacttccttctggccctggccatctccctctaccccggtcgcctgctggacaccgtcggacgcttcctcgccccgctgaagatcctcgccctggcgattctcggcgtcgccgccttcctctggcctgccggcccgatcggcacggcccagccggagtacacccaggccgcgttctcccagggtttcgtcaacggctacctgaccatggacaccctcgccgcgctggtcttcggcatcgtcatcgtcaacgccatccgttcccgcggcgtgcagtcgccgcgtctgatcacccgctatgccatcgtcgccgggctgatcgccggtgtcggcctggtgctggtctacgtcagcctgttccggctcggcgccggcagccatgccatcgccgccgacgccagcaacggcgcggcggtcctgcatgcctacgtgcaacataccttcggcagcctcggcagctcgttcctggcgggacttatcgcgctggcctgcctggtcaccgcggtcggcctgacctgcgcctgcgccgagtacttctgccagcgcctgccgctgtcctaccgcagcctggtgatcatactggcagggttctccttcatcgtttccaacctcggcctgaccaagctgatccaggtctcgatcccggtgctcaccgcgatctatccgccgtgcatcgtgctggtggcgctgagcttctgcatcggcctctggcattcggcgacgcgcatcctcgccccggtgatgctggtttccctggcgttcggcgtgctcgatgccctgaaggcggcgggcctgggccaggacttcccgcaatggctgctgcacctgccgctggccgaacagggcctggcctggttgatcccctcggtcgccactctcgccgcctgcagcctggtcgaccgcctgctgggcaagcctgcgcaagtcgccgcc

SEQ ID NO: 29956 - DNA, 90 bp, Pseudomonas aeruginosa
ttgcgggcagttttgcagcgcaggcacgtcgctcttgtcgaccatgcgcttgcgcggcttacgcaccagctggttgatagttgccatcta

SEQ ID NO: 29957 - DNA, 2376 bp, Pseudomonas aeruginosa
ttgaaggctcgcttgctcacatccactctcgctataggtagggcggatagccgtgagttatccgccgaggtcatcggccgggcgggcgcaggcgcccgcggccgagccttactcttcgttgccttccgcttccgccgcgggctcggactcggactcggccgactcgcccagagattcggcagcttcctcgccctcgggcaggtcctcgtcatctccgcccgacggctcctggacacgctccagaccgaccagtacctcgtcgctggcgagcttgatcagggttacgccctgggtattgcggccggacagggagacttcgtcgacacgcgtccgcaccagggtgccctggtcggaaatcagcatgatctcctcgccttcctggacctgtaccgcggcgatcagcgcgccgttgcgctcgttggtgaccatggcgatcaccccctggccgccgcggccgcgacgcgggaacttgctcagcggggtacgcttgccgaagccgcgctcggaggcggtgaggatctgcgccccggactccggaatcagcatggagatcagctgctgccccttgcccaggcgcatgccacgtacgccgcgggcgttgcggcccatgatgcgcaccacgctctcggcgaagcggatcaccttgccggcgctggagaacagcatgacttccttggcgccatcggtgatcgcggcggcgatcagggtgtcgccctcttccagcttgagcgcgatcaggccgctgctgcgcggacggctgaactgcaccagcggggtcttcttcacggtaccgaaggcggtggccatgaagatgtaggcgccggtcggctcggccaccagctcggcggtctcgccctcgacttcctcgacctcggcggcctcgaccacctcgccctcgagcaccgcgccttcggcttcgtcgaggtcgtcatcggcgccaccgttctgctgcagcgcctccaggtcgatctgcaacatcgcggtgatccgctcgccctcatccagcggcagcaggttcaccagcggccggccacgcgcggtacgcgaggcttccggaatctcgaaggtacgcagccagtagaccttgcccttgctggagaacagcaggagggtcgcatggctgttggccaccagcaggtgttcgatgtagtcctcgtccttcatcccggtggcggacttgcctttgccgccgcgacgctgcgcctggtaggcggccagcggctgggacttggcgtagccgccgtgcgagatggtcaccacgcggtcttcctcggtgatcaggtcggcgatggtcaggtcgacctgggaagccacgatctcggtgcggcgagcatcgccgaattcggccttgaccgcttccagttcctcacggatcacctccatcaggcgcgccgggttggtcaggatgcggatcagctcgccgatcaggttgaggatttcctggtattcggagagcagcttctcgtgctccaggccggtcaggcgatgcaggcgcagctcgaggatcgcctgggcctgctccggcgacaggtagtacttgccgtcgcgcaggccgtactgcggatccaggtcttccggacgacaggcgtcggcgccggcacgctcgaccatcgcttccaccgcgctggactcccaggcagtggcgatcaggcgttccttggcctcggccggggtcggcgaactcttgatcagctcgatcaccgggtcgatgttcgacagggcgaccgcctggccttccaggatgtgcccgcgctcgcgggccttgcgcagctcgtagacggtacgccgggtcaccacttcgcggcggtggcggacgaacacctcgagcatgtccttcaggttcagcgtgcgcggctggccgtcgaccagggccaccacgttgatgccgaacacgctctgcagctgggtctgggcatagaggttgttgaggaccacctcgcccacctcgccgcgacgcagctcgatgaccacgcgcatgccgtccttgtcagactcgtcgcgcagctcggaaataccctcgatcttcttctctttcaccagctcggcgatcttctcgatcaaccgcgccttgttcaactggtacggcagctcggtgatgataatctgctcgcgaccgccgcccttctccatctcctcgacgacggcgcgggcacggatgtagatgcgcccgcgaccggtgcggtaggcctcgatgatcccggcgcggccgttgatgatgccggcggtggggaagtccggaccggggatgtactgcatcagctcatcgacggtcaggtcggggttgtccatcagcgccagggcagccgtcgatcacttcgccgaggttgtgcggcgggatgttggtcgccatgcccacggcgataccgctggaaccgt

SEQ ID NO: 29958 - DNA, 414 bp, Pseudomonas aeruginosa
gtggacgatcatcagttgcacgctttcctggccgcggaattcgttgacgtcgagcttgtaggccagctcggcccagcgcacggtagggttgggccactgctcgcggtcgatgttgaaggcaatgccatccagttgcagcgagccgcattcgcttttcagcaccagcttcaggtgacgctcgccgacgatccgctgctgcaccagctggaacaccccgtggaacatcggctcgggaaagtgctggccccagggaccggcctggcgcaacgcgcgcgccagctccaggtggaactcctggatgctcaactggccatcggagagcaggcgcccggccaggtcctcctcggccagttggcggcgtacttcggcatcgaaggcggcggagaaagcgccgaagttttcctgcggcaacga

SEQ ID NO: 29959 - DNA, 411 bp, Pseudomonas aeruginosa
gtgctccttgacgatacccaggcgaatgccattgggatgtactttctgacccatctgtcgactccgttacttgtccgcaaccttgaccgtgatatggcaagaccgcttcacgatgcgatcagcacggcctttggcacgcggcatgatgcgcttgagcgaacgaccttcgttgacgaagacggtggagaccttcaggtcatccacatcggcgccttcgttgtgctcagcgttggcaacggccgactccagcactttcttcatgatctcggcggctttcttactgctgaaagccaggaggttgagcgttcgcccaccttcttcccgcggatctggtcggcgaccaagcgggctttctgggcggagatacgagcgcccgacagcttagcggctacttccatcttccttacccct

SEQ ID NO: 29960 - DNA, 1545 bp, Pseudomonas aeruginosa
gtgtccgtggaactttggcagcagtgcgtggatcttctccgcgatgagctgccgtcccaacaattcaacacctggatccgtcccttgcaggtcgaagccgaaggcgacgaattgcgtgtgtatgcacccaaccgtttcgtcctcgattgggtgaacgagaaatacctcggtcggcttctggaactgctcggtgaacgcggcgagggtcagttgcccgcgctttccttattaataggcagcaagcgtagccgtacgccgcgcgccgccatcgtcccatcgcagacccacgtggctcccccgcctccggttgctccgccgccggcgccagtgcagccggtatcggccgcgcccgtggtagtgccacgtgaagagctgccgccagtgacgacggctcccagcgtgtcgagcgatccctacgagccggaagaacccagcatcgatccgctggccgccgccatgccggctggagcagcgcctgcggtgcgcaccgagcgcaacgtccaggtcgaaggtgcgctgaagcacaccagctatctcaaccgtaccttcaccttcgagaacttcgtcgagggcaagtccaaccagttggcccgcgccgccgcctggcaggtggcggacaacctcaagcacggctacaacccgctgttcctctacggtggcgtcggtctgggcaagacccacctgatgcatgcggtgggcaaccacctgctgaagaagaacccgaacgccaaggtggtctacctgcattcggaacgtttcgtcgcggacatggtgaaggccttgcagctcaacgccatcaacgaattcaagcgcttctaccgctcggtggacgcactgttgatcgacgacatccagttcttcgcccgtaaggagcgctcccaggaggagttcttccacaccttcaatgcccttctcgaaggcggccagcaggtgatcctcaccagcgaccgctatccgaaggaaatcgaaggcctggaagagcggctgaaatcccgcttcggctggggcctgacggtggccgtcgagccgccggaactggaaacccgggtggcgatcctgatgaagaaggccgagcaggcgaagatcgagctgccgcacgatgcggccttcttcatcgcccagcgcatccgttccaacgtgcgtgaactggaaggtgcgctgaagcgggtgatcgcccactcgcacttcatgggccggccgatcaccatcgagctgattcgcgagtcgctgaaggacctgttggcccttcaggacaagctggtcagcatcgacaacatccagcgcaccgtcgccgagtactacaagatcaagatatccgatctgttgtccaagcggcgttcgcgctcggtggcgcgcccgcgccaggtggccatggcgctctccaaggagctgaccaaccacagcctgccggagatcggcgtggccttcggcggtcgggatcacaccacggtgttgcacgcctgtcgtaagatcgctcaacttagggaatccgacgcggatatccgcgaggactacaagaacctgctgcgtaccctgacaacctga

SEQ ID NO: 29961 - DNA, 1104 bp, Pseudomonas aeruginosa
atgcatttcaccattcaacgcgaagccctgttgaaaccgctgcaactggtcgccggcgtcgtggaacgccgccagacattgccggttctctccaacgtcctgctggtggtcgaaggccagcaactgtcgctgaccggcaccgacctcgaagtcgagctggttggtcgcgtggtactggaagatgccgccgaacccggcgagatcaccgtaccggcgcgcaagctgatggacatctgcaagagcctgccgaacgacgtgctgatcgacatccgtgtcgaagagcagaaacttctggtgaaggccgggcgtagccgcttcaccctgtccaccctgccggccaacgatttccccaccgtagaggaaggtcccggctcgctgaacttcagcattgcccagagcaagctgcgtcgcctgatcgaccgcaccagcttcgccatggcccagcaggacgtgcgttactacctcaacggcatgctgctggaagtgaacggcggcaccctgcgctccgtcgccaccgacggccaccgactggccatgtgctcgctggatgcgcagatcccgtcgcaggaccgccaccaggtgatcgtgccgcgcaaaggcatcctcgaactggctcgtctgctcaccgagcaggacggcgaagtcggcatcgtcctgggccagcaccatatccgtgccaccactggcgaattcaccttcacttcgaagctggtggacggcaagttcccggactacgagcgtgtactgccgcgcggtggcgacaagctggtggtcggtgaccgccagcaactgcgcgaagccttcagccgtaccgcgatcctctccaacgagaagtaccgcggcattcgcctgcagctttccaacggtttgctgaaaatccaggcgaacaacccggagcaggaagaggccgaggaagaagtgcaggtcgagtacaacggcggcaacctggagataggcttcaacgtcagttacctgctcgacgtgctgggtgtgatcggtaccgagcaggtccgcttcatcctttccgattccaacagcagcgccctggtccacgaggccgacaatgacgattctgcctatgtcgtcatgccgatgcgcctctaa

SEQ ID NO: 29962 - DNA, 2421 bp, Pseudomonas aeruginosa
atgagcgagaacaacacgtacgactcttccagcatcaaggtgctgaaggggctggatgccgtacgcaagcgccccggcatgtacatcggcgacaccgacgatggcaccggtctgcaccacatggtgttcgaggtggtggataactccatcgacgaagcgctggccggttactgcagcgaaatcagcatcaccatccatacggatgagtcgatcactgtccgcgacaatggacgcggtattccggtggatatccacaaggaagaaggggtttctgcggcggaagtgatcatgaccgtcctccacgccggcggcaagttcgacgacaacacctacaaggtgtccggcggcttgcacggtgtgggcgtctcggtggtgaacgcgctgtcccatgaactacgcctgaccatccgtcgccacaacaaggtctgggaacaggtctaccaccacggcgttccgcagttcccactgcgcgaagtgggcgagaccgatggctccggcaccgaagttcacttcaagccgtccccggagaccttcagcaacatccacttcagttgggacatcctggccaagcgcatccgcgagctgtccttcctcaactccggcgtcggcatcctgctgcgcgacgagcgtaccggcaaggaggagctgttcaagtacgaaggcggtctgaaggccttcgtcgagtacctgaacaccaacaagaccgcggtgaacgaggtattccacttcaacgtccagcgtgaagaggacggcgtgggtgtggaagtcgccttgcagtggaacgacagcttcaacgagaacctgctctgcttcaccaacaacatcccgcagcgtgacggcggcacccacctggccggtttccgttcggcgctgacgcgtaacctgaacaactacatcgaggccgaaggcctggcgaagaagttcaagatcgccaccaccggcgacgatgcccgcgaaggcctcaccgcgatcatctcggtgaaggtaccggacccgaagttcagctcgcagaccaaggacaagctggtctcctccgaggtgaagactgcggtggaacaggagatgggcaagtacttcgccgacttcctgctggagaatcccaacgaagccaaggccgtggtcggcaagatgatcgacgccgcccgtgcccgcgaggccgcgcgcaaggcgcgcgagatgacccgccgcaagggcgcgctggacatcgccggcctgcccggcaaactggccgattgccaggaaaaggacccggcgctctccgaactgtacatcgtggagggtgactccgcgggcggttccgccaagcagggccgcaatcgccggacccaggcgatcctgccgctcaagggcaagatcctcaacgtcgaaaaggcgcgcttcgacaagatgctctcctcccaggaggtcggtacgctgatcaccgccctgggctgtggcatcggccgcgaggaatacaacatcgacaagctgcgctaccacaacatcatcatcatgaccgatgctgacgtcgacggttcgcacatccgcaccctgctgttgaccttcttcttccgccagatgcccgagctgatcgagcgtggctacatctacatcgcccagcccccgttgtacaaggtcaagcgcggcaagcaggagcagtacatcaaggacgaccaggccatggaagagtacatgacccagtcggccctggaagacgccagcctgcacgtcaacgagcacgctccgggcctgtccggggcggcgctggagaaactggtcaacgagtatcgcggggtgatcgccaccctcaagcgcctgtcgcgcctgtacccccaggagctgaccgagcacttcatctacctgcctaccgtgtcggtggacgacctggctaacgagtcggccatgcagggctggttggagaagttccaggcgcgcctgaccgccgccgagaagtccggcctgacctacaaggccagcctgcgcgaagaccgcgagcgccacctgtggctgcccgaggtggaactggtggcccacggcctgtccagctacgtcaccttcaaccgtgacttcttcgccagcaatgactaccgctcggtgtcgctgctcggcgaccagctgaacagcctgctggaagacggcgcctacgtgcagaagggtgagcgcaagcgcccgatcagcgccttcaaggacggcctggactggctgatggccgaaggtaccaagcgccacagcatccagcgatacaaggggctgggcgagatgaaccctgagcagctgtgggaaaccaccatggatccgaacgtccggcgcatgctcaaggtgaccatcgaggatgccatcgccgccgaccagatcttcaacaccctgatgggcgatgccgtggagccgcgccgcgacttcatcgaaagcaacgcgctggcggtgtcgaacctggacgtgtga

SEQ ID NO: 29963 - DNA, 774 bp, Pseudomonas aeruginosa
atgtcgacagtgcaggccatcagaaccgtcctcttttacctgctgctgtccgccagcgcgttcgtctggggcaccctcagcttcttcatcgcgccgatcctgccgttccgcgcccgctaccgcttcgtggtacagaactggtgccgcttcgcgatctggctgacccgcgtggtcgccggcatccgctacgaggtgcgcggactggagaacatcccggaaaagccctgcgtgatcctctccaagcaccagagcacctgggaaaccttcttcctctccggcttcttcgagccactcagccaggtactcaagcgcgagctgctctacgtgccgttcttcggctgggccctggccctgctcaagcccatcgccatcgaccgcagccagcccaagctggccctcaagcaactggccaagcagggcgacgagtgcctgaagaaaggcgcctgggtgctgatcttcccggaaggcacgcgtattccggtggggcagatgggcaagttctcccgcggcggcaccgccctggcggtcaacgccgggctaccggtactgccgatcgcccacaacgccgggcagtattggcccaaggccggctgggccaagtacccgggcaccatccaggtggtgatcggcccggccatgcacgccgaaggcgaaggcccgcgcgccatcgccgagctaaaccagcgcgccgaagcctgggtcagcgagaccatggccgagatcagccccatccagcagcgggtcagccatccggagccgtcggtggtctcgtga

SEQ ID NO: 29964 - DNA, 948 bp, Pseudomonas aeruginosa
gtgagccagactacgcccgccgtgcgcaccttccaagacctgattctcgccctgcagaactactgggcagagcagggctgcgtggtgctgcagccctacgacatggaagtgggcgccggcaccttccacaccgccaccttcctccgcgccatcggcccggagacctggaacgccgcctacgtccagccgagccgccgccccaccgacggtcgctacggcgagaaccccaaccgcctgcagcactactaccagtttcaggtggtcctgaagccgaacccggagaacttccaggagctgtacctcggctcgctgaaagccatcggcatcgacccgctggtccacgacatccgcttcgtcgaggacaactgggagtcgccgaccctcggcgcctggggcctgggttgggaaatctggctgaacggcatggaagtcacccagttcacctacttccagcaggtcggcggcatcgagtgctatccggtcaccggcgagatcacctacggcctggagcgcctggccatgtacctgcagggcgtggactcggtctacgacctggtctggaccgacggcccgttcggcaaggtcacctatggcgacgtgttccaccagaacgaggtggagcaatccactttcaacttcgagcacgccaacgtgccgaagctgttcgaactgttcgacttctacgaaagcgaagccaaccgcctgatcgcgctggagctgccgttgccgacctacgagatggtcctcaaggcttcgcataccttcaacctgctggatgcgcggcgcgccatctcggtcaccgagcgccagcgctacatccttcgcgtgcgtaccctggcccgcgccgtggcgcagagctacctgcaggcccgcgcgcgcctcggcttccccatggccacccccgaattgcgtgacgaagtactggccaagctgaaggaggccgaatga

SEQ ID NO: 29965 - DNA, 654 bp, Pseudomonas aeruginosa
atgtcagcctcttctccggcggcctggcgcggcaccctggccggcctgatcgccttccacatcttcatcatcatcgccagcaactacctggtgcagttgccgatcaccctgtttggctggcacaccacctggggcgccttcagctttccgttcatcttcctggctaccgacctcaccgtgcgcttgctgggcaagggccctgcccggctggtcatcgcccgggtcatgatcccggcgttgatcgcctcctacgtggtctcggtgttgttccaggaagcggcgttccgtggtttctccgcgctgctggagttcaacaccttcgtcgcacggatatccctggcaagcttcctcgcctatgtgctcgggcagatcctcgacatccaggtattcgaccgcctccgtcgttcccggcactggtggaccgcgccagtcgcctcgaccatcctcggcaacctgctggacaccttcaccttcttcttcgtggcgttctggcgtagcgacaatccgttcatggcgcagcactgggtggaaatcgccacggtggactacggagtgaagctgagtatcagccttctgctgttcgtgccgctctacggcatgctactcaacggcatcctgaagatgctgccggggcggccgcagagcaacgcttga

SEQ ID NO: 29966 - DNA, 1305 bp, Pseudomonas aeruginosa
atgaacccgcgtctcgccgcctgccaggcgctggccgcggtgctcgccggacgcgcctcgctgtctggcgcgttgccgccgcaactggacaaggtcgccccgcgcgatcgcggcctgacccaggagctggccttcggcgctgcgcgctggcaaccgcgcctgcaggccctggccgcgcgcctgttgcagaagccgttcaaggccgccgacaccgatatccacgccctgctgctgatcggcctctaccagttgctctacacgcggattccgccgcacgccgcgatcggcgagaccgtcggctgcgccgacaagctgaagaagggctgggccaagggcgtgctcaacgccgtgctgcgccgcgcgcagcgcgaaggcgagacgctgctggccgaggtcgaccgcgatccctcagcgcgcctgggccatccgcgctggctgctgaaagcgctcaagcaggcctggccggagcagctcgacgcgctctgcgcagcgaacaacgcacacccgccgatgaccttgcgggtcaatcggcgccacggcgagcgcgatgcctacctggccgaactcgccgaagccggaatcaaggcccgcgcctgcgactacagccgcgacggcatccagctcgccgcgccgcgcgacgtgcgcgaactaccgggcttcgcggagggtcgcgtcagcgtccaggacgaagccgcgcaactggccgccgagcagctcgaaagcgcgcccggccagcgtgtcctcgacgcctgctgtgcgcctggcggcaagacctgccacctgctggaaacccagccggaactggccgaagtggtcgccgtcgacctcgaggagagccgcctggtaagggtccgggaaaacctccagcggctcggcctgcaagccagcctggtcgccgccgacgccagggccaccggggagtggtgggacggcaagccgttccagcgcatcctcctcgacgcgccgtgctcggccaccggggtgatccgccgccacccggacatcaagctggcgcgcaagccggaagacatcgccgccctggcgcacctgcagggtgaattgctcgacgcgctgtggcctaccctggaagtcggtggcgtactgctctacgccacctgttcggtgatgccggcggaaaacagcgacagcatcgccgccttcctcgcccgcacgcccggcgcccgcgaactggaccttcccggcccctggggcatgaaacagccccacggccgccagttgctgccgcaggtggagggccacgatggcttctactatgccaagctgatcaagatatccgcccgttga

SEQ ID NO: 29967 - DNA, 1209 bp, Pseudomonas aeruginosa
atgacttcctatcgcaacggccccgacgccaagggcctgttcggccgcttcggcggccagtacgtcgccgagaccctgatgccgctgatcctcgacctcgcccgcgagtacgagaaggccaaggacgacccggcgttccaggaggaactggcctacttccagcgcgactacgtcggtcgaccgagcccgctgtacttcgccgagcgcctgaccgagcactgcggcggggcgaagatctacctcaagcgcgaggagctgaaccataccggcgcgcacaagatcaacaactgcatcggccagatcctcctggcccggcgcatgggcaagaaacgcatcatcgccgagaccggcgccggcatgcacggcgtggccactgccaccgtcgccgcgcgcttcggcctgcagtgcgtgatctacatgggcaccaccgacatcgaccggcagcaggccaacgtcttccgcatgaagctgctgggcgccgaggtgatcccggtgaccgccggcaccggtaccctgaaggacgccatgaacgaggcgctgcgcgactgggtgaccaacgtcgacagcaccttctacctgatcggcacggtcgccggcccgcatccgtacccggcgatggtccgcgacttccaggcggtgatcggcaaggaaacccgcgagcaactggccgagaaggaagggcgcctgcccgattcgctggtcgcctgcatcggcggcggctccaacgccatgggcctgttccacccgttcctcgacgacgccggggtgcagatcgtcggcgtggaagccgccggccacggcatcgacaccggcaagcacgcggccagcctgaacggcggggttcccggcgtgctgcacggcaaccgcaccttcctgctgcaggacgcggatggccagatcatcgacgcacactccatctccgccggcctcgactatcccggcatcggcccggaacacgcctggctgcacgacaccggccgcgtcgagtacacctcgatcaccgacgacgaagccctggaggccttccacacctgctgccgcctcgaaggcatcatcccggcactggaaagctcccatgccctggccgaggtcttcaagcgtgcgcccagcctgcccaaggagcacatcatggtggtgaacctgtccggtcgcggcgacaaggacatgcagaccgtcatgcaccacatgcaacaggagtcgaaagcatga

SEQ ID NO: 29968 - DNA, 3099 bp, Pseudomonas aeruginosa
atggacatagaacttccgggattcgacatcgaacgcgagctgggcgaaggcgccatggccacggtctacctggccacccagcgctcgctgcagcgcaaggtggcgctgaaggtgatggccgcggcgctggccgccgacccgagcttcgccgaacgcttcctgcgcgaaggtcggaccctggcgcggctgtcgcacccgaacacggtgaccatccacgacatcggcaacgtcggcagttgctactacatggccatggaatacctgcccaacggcacgctcaaggagcgcatccagcagggcctcgatcccgagcagggcctggcctacgtacggcaggtggccgccgcgctcggctacgcgcactcccagggcctggtgcatcgcgacgtgaagccggccaacatcctgttccgcgccgacggcaccgcggtgctctcggacttcggcatcgccaagtcgatcgaggacaatacccagttcacccaggtcggcttcgccgtcggcacccccagctacatgagcccggagcaggcccgcgggcaggagatcgacggccgcgccgacctctacgcgctgggcgtggtgctctacgagatcctcaccggcaagctgccctacaacggcaaggactcgctctccaccgccctggcccacctcaccgagccgctgccggaactgccgatcgagcagggccgctaccaggacatcctgcgccagttgctggccaaggacccggccgagcgcttccccaccgccggcgcgttgatcgccgccctcgaccgcctggcgccgagcgccctggaagccacccagatccgtccgctggcgacgccgcagggctcgccgcgagcgagcaacccgccgccggccgaacccgcgcccctgccgcccgccgacctcggcggcctgcaaccggtgtcgatccagttgccgccggtcacgcccagcgccggcggcgccacgccgcctccgcctccgccgtcgcaagcggcgaaaccgccatcgcccccgccgcctccgttgccgccggcgaagccacgtgccggcggcagccgcacgccgttgatcgccgccgccgcggccgccgtgctcctggcgatcggcggcggcgcctggtggctgctgggctcgggcgacgcgccgagcgctgccgatccagcgccgctgggacagacgccggcggacaagccgcagcagcagaccccggtggccgatgccgaacaggacggcggcgagcgtccgctgctgatgccaggcaagaagacgctgttccagcgcgtcctgaccaaacccggcgcggccatctccgccgaggctggcggcccgccccgggccggcgcggtgccggccttctcggtgctctacgtgtacgcccgcaagcaggtcggcggcagcccctggctgcgcgtcggcgcctccagcaacggcgagggcgacggctggctgccggctagcgcggtgagcgactggaagcagagcctggtgctgaagttcaccgaacgctccggccgcgcgccggtgatgttcctcaacagcgccgagcaggtcgagcgcctgctcggcgatacccgcgcagcgcgcgacaccctgacccaggcggtggatcacaagggcgatccgcaggtggtcgcggtcgagcccaacgaccgggcgatcccccaggaccagttctacctgctgccgatcttcgactcgaaggaaagcttcgacgccgacggccagccggcgcagttgctggaggtcgcctcgatcgaccccggcggcagcgccgcggcaccccaggcgccgggccaggccgggcagggcggcgccagcggcgcggcgagcgacaccttccgcaccggcatcgtcctggtggtggacacctcggtgtcgatgcagccctacatcgaccgcgtgcgcgaggtgatcgacggcctgcagcggcagatcggcgagcgcggcgacctggacaaggtcagcttcggcctggtcggtttccgcaacaacaccgacaagacccccggcctggaatacgtcagcaagaccctggtgccgctgcaaccgggcaacgacgcgcagcgcttcgccgagttgagcagccaggtgcgcgccaccgacgtctccagccactcgttcaacgaagacgccttcgccgggatcatgcaggcggtcgacgaaatggactggtcgccctacgccgggcgcgtggtgctgctggtcaccgacgccggcgcgctgcgcaagaacgacccgctcgggcgcacccagatgaacgaggccgaggtccgccaggcggcgctgcgcaagggcgtgaagatctatgccctgcacctgcgcaccccggccgggaagaacaaccacggctacgccgagcagcagtaccgcagcctcaccgccgacgccaacccgaagatcgccgacctctacatcccggtggccggcggcgaggtgaacgccttcggcaacacggtgaaggagatcggcacggtgttcgccgacctggtccacgacgccggcaaccgcaagccgcaggcgccgcgcttcgacgccgcgccaagcgtggcgagcaagtcggcggccatcggctacgccatgcagatggaattcctcggtcgccgcgacccggtgcgcgcgccgcaggtcgtcaccgcctggaccgccgaccgtgacctgaccaacccggcgctgccggcgttccaggtctgcgtgctgctgagcaagctgcaactcaacgaactgcaacagtcgctgaaactgatcgtcgacgcggccaagcgcacccagacctcgcccaaggacttcttccaggaaatcgccagcgccagcgcctacatgagccgcgacccggcgcaactggtgaagggcagcaacctggcgcagagcggcgtactcggcgaatacctggaaggcctgccgtaccgcagcaagtcgctgaacatgacccaggacctctggctgtcgctgagcgtcgccgaacagcaggacttcatcgacgaactggagtcgaagatccgcctctacgaaaccttccacaacgacgtcgccaactgggtccggttcggcgacgccgacgccggcgacgcgctgtaccgcgtgccgctgtcgacgctgccatga

SEQ ID NO: 29969 - DNA, 435 bp, Pseudomonas aeruginosa
gtgacgctctatcgcctccacgaagccgatctcgagattcccgatgcctggcaggaccagagcatcaacatcttcaagctccccgccagcggccccgcccgcgaagccagtttcgtcatcagccgtgacgccagccagggcgacgcgccgttcgccgactatgtcgcccgccaactggaaaacgccgagaagcaattgcccggcttcaagctgcacaagcgctgggacatcaacatccacggccacgccgccgtgctcctcgactaccagtggcagcgcgagggccgcgacctgatgctgcgccaggtattcatcgagcgccgcccggcggtgctgatcaccaccctgaccaccaccccggctgacctgccgcaccacgagccggcctggaagcaggcgatgcagaccctggtcccgcgcccgacccctagctga

SEQ ID NO: 29970 - DNA, 564 bp, Pseudomonas aeruginosa
atgtccctgatcaacactcaagtccaaccgttcaaggtcaacgctttccacaacggcaagttcatcgaggtgaccgaggaatccctgaagggcaagtggtcggtcctgatcttcatgccggctgccttcaccttcaactgcccgaccgagatcgaagacgccgccaacaactacggcgagttccagaaagccggtgccgaggtctacatcgtgaccaccgacacccacttctcgcacaaggtctggcacgaaacctccccggcagtcggcaaggcccagttcccgctgatcggcgacccgacccaccagctgaccaacgccttcggcgtgcacatcccggaagaaggcctggccctgcgcggtaccttcgtgatcaacccggaaggcgtgatcaagaccgtcgagatccactccaacgagatcgcccgtgacgtcggcgagaccgtgcgcaagctgaaggccgcccagtacaccgccgcccacccgggcgaagtctgcccggccaagtggaaggaaggcgagaagaccctcgctccgtccctggacctggtcggcaagatctaa

SEQ ID NO: 29971 - DNA, 828 bp, Pseudomonas aeruginosa
gtggcggtgtcgcagccggcgatctccaagaccctcaaggaactggaggaaatcctcggcgcgcgcctgttcgaacggagcaaggccggcgccgagctgaccgaggcgggcgtgaccttcctgcgctatgccggcccctgcgtgcaggccctgcgcgacggggtgaacaccctgcgcggccacgaggcgcaggtcgagacggtgcgggtcggcgtgctgtcgacggtggagagcctggtggtgcccgaggtgatccggcgcctgcaccggcgccacggtgcgctggtggtcagcgtcgccaccggacccagcgcctacctgctggcgcaactgaaggtcggcgagctggacctggtggtcgggcggatgaccgatagcccggacatccagggcctgaccttcgagcacctgtacagcgagtcgatgatgctggtggtgcgtcccggccaccccttgctcgccgcgcccctcggcgacctgcagcggctggccgaattcccactggtgctgccgctggccggcaccaccatccgccgccacgccgacagcctgttcgtgcagtggggcatcgcgctcgccggacagcgcctggaaaccctctcgccgaccctcagccgcagctatgtgttgcgcagcgaggcgatctgggtggcgccgcgcgatgccgtgcgcctggacgtcggcaacggcgagctggccgagctggacctgggtatccgcgaaccgggcggttcggtcgggctgtgccacaacgcggccttgccgttgccgctgggggcgcaatggttcagcgcggtgttgcgcgaggtggccgccgagttgcactga

SEQ ID NO: 29972 - DNA, 486 bp, Pseudomonas aeruginosa
atgaacggcactgaggcaagccaggcgaacggcccggcgcaggaatacctgaccttcaccctgggccgcgaggagtacgccatcgacatcctccgcgtgcaggagatccgcggctacgaccaggtcaccgcgatcgccaacgcgccgcccttcatcaagggcgtgatcaacctgcgcggggcgatcgtgccgatcgtcgacctgcgcatcaagttccacctcgccgaggtcacctacgacccgttcaccgtggtgatcatcctcaacatcggccggcgcatcgtcggcgtggtggtggactcggtatccgacgtgatcgcactgggcggcgacgcgatcaggccgccgccggagttcggcgccagcttcgacaccgaatacctgctcggcctggccaccgcgggcgagcgcatgttgatcctggtggacatcgagagactgatgaccagccgcgaaatggcgctggtcgacgaagccgcggcctga

SEQ ID NO: 29973 - DNA, 813 bp, Pseudomonas aeruginosa
atggcaacaccccagcccgtcgatgcccgcacgcagccctggcgcgagacgcccggcggcgacctggtggcgctcggtcggccggttcgccaggcgttgcacctggttcgccacaacccggcacagggtcgggtgctcagccggcgcgagacgatcctgctggtcctgttcgccctgaccctgcacggagcggtgatccattggctgagccagcagagaaccccggcgctgcccgaggtgccgccacaggtgccgccgatgaccatcgagttcaccgccccggcgccgccggtggtggaaccgccgccgcccgagccgttgccgccggtggtcgaggaaccgccaccaccggtggtcgacgagaacgcggtgaagccgccgccgccgaagccggtgccaaagccgaaacccaagcccaagccgcaaccccggcccaagccggcgccgaaggccgtcgagccggctccgcccgcgccgccgcaacccgccgcgccacccgccccgccggcgccggccgccgccccggcgccgctgacgccgccgtcggcgaacgccggctacctgcacaacccggcgccggaataccccgccctggccatgcgccgcggctgggagggcaccgtgctgttgcgggtgcatgtcctcgccagcggcagcccgagcgagatccaggtgcagaagtcgagcggacgcgaagccctcgaccaggccgcggtgaaagcggtcaagcgctggtccttcgttcccgccaagcgcggcgacaaggccgaggacggctgggtcagcgtaccgatcgatttcaagttgaactga

SEQ ID NO: 29974 - DNA, 780 bp, Pseudomonas aeruginosa
atggccggtagcctcatcgaacgcgccctcggcttgctcgaactcctcgccagcgatgcccgtggcctgcccctgcaacaactggcggaccgcctggatatccccaagagcgccgcgcaccgcatgctcgccgagctgatccggctcggctacgtgcgccaggacgacgacaccagccgctaccgcctcagcacccgcctggccgcgctgggcttccgcttcctcgcttccagcggggtggtcgacctggtccagccggtgctcgacgggctcgcccgggagaccggcgaactggtgcgcctgggggtgatcgaaggcgatcgccagacctggatcgccaagtcccagggcgccacctccgggctacgctacgaccccgacatggggcgcgaggcgccgctgttctacaccgcatccgggcacgcctggctggccagcctgagcgacaaggcggcgctggcgctggtggagcgccagggcgtaggggcggcgcgggacttcggtcccaacgcgccgcgctccaggagcgagctgctgcgctacctgaagcgcgcccgcgagcacggctatgcctggcagatcgaatgctcggcgccgggcatggcggcgatggccgcactggtgcgccaccccgaggacggacgggctctcggcgtgctcagcgtggccgggccgagcgcacgcttcggcgaggcgcgcatgcacgaactggcgcccctgctcctggccgcggcgcaggacctgtcccacgccagccaggcgtccgagctgttccgctga

SEQ ID NO: 29975 - DNA, 855 bp, Pseudomonas aeruginosa
atgagcgcgccgcgatcggttctcgccggcctgatcggtgccggcatccaggcgtcgcggacccctgccctgcacgagcgcgagggcgacgcccagggcatccgctatctgtaccggctgatcgatctcgacccgctgggcaagtcggcggacgacctggagttcctgctcgccgccgccagcgacctcggcttcaccgggctgaacgtcaccttcccctgcaagcaggcgatcatccccctgctcgacgacctctccgccgaggcacgcggcatcggcgcggtgaacaccgtggtgctgcgcgatggccggcgcatcggccacaacaccgactgcctgggcttcgccgagggctttcggcgcggcctggccgacgcgccgcgccagcgcgtggtgcagatgggcgcgggcggcgccggcgcggcagtggcccatgcgctgctcgccgagggcgtcgagcggctggtcctgttcgacgtcgacccggcgcgggcccaggccctcgcggacaacctcaaccagcacttcggcgcgccacgagcgctcgccggcagcgacctggccggcgccctgggcgacgcccagggattggtcaacaccaccccggtgggcatggccaagctacccggcatgccggtgccggcggaactgttgcgcgccgacctgtgggtcgccgaggtgatctactttccgctggaaaccgagctgctgcgccaggcccgcgccctcggctgccgcacactggacggcggcaccatggcggtgttccaggcggtgaaggcattcgaactgttcagcggggtgacggccgacgccgcgcgcatgcaggcgcacttcgccagcctgggcgactga

SEQ ID NO: 29976 - DNA, 1506 bp, Pseudomonas aeruginosa
ttgtccgatctcgcccagaacccgcccgccgtccgtaccgtcctcgccggcctgatgctgtcgatcttcctcagcgccctcgaccagaccatcgtcgccgtctccctgccggcgatctcggccgactacgccgacctcgacctgctggcctgggtgatctcggcctacatggtggcgatgaccgtatcgatgccgatctacggcaagctcggcgacctctacggccgccgccgtctgatgctcttcgccatcgtcgtgttcaccgccgcctcgctgctttgcgggctcgcgcagagcatgggccaacttgtgctggcgcgagtgctgcaggggatcggcgcgggcgggctgatggcggtgagccaggcgatcatcggcgacatcgtcccgccgcgcgagcgcggccgctaccagggttacttcagcagcatgtacgccatcgccagcgtcgccggcccggtgctcgggggcctgctcaccgagtacctgtcgtggcactgggtattctggatcaacctgccgatcggccttctcgcgctggccatctcgcggcgaaccctggtcggcctgccggtgccgcgccggcaaccggtgatcgactacctgggcatcgtgctgatggtggtgggcctcaccgcgctgctcctggccatcacccagatcggccagggcgcagcctggagcgaccctgcgctgctcggcctgttcgccctggcggcgctcgccctgctgctgttcgtcgcccaggagcggcgcttccgcgaaccgctggtgccgatgcaactgttcgccgtccgcgccgccaccctcagttggctggttgcgttcttcgccagcttccaggccatctcgctgaccgtgctggtaccgctgcgctaccagagcgttaccggcgccggcgccgacagcgccgcgctgcatctgctgccgctggtcatgggcctgccgctgggcgcgtactgctgcgggcggctgaccgccagcctgggacgctacaagccgctgatcctgctcggcgccgtcctgttgccctgcggcatcgccggcctggccctggtcccggtcggcgaccactggctgtccgggctgtgcatgctgctcaccgggatcgccatcggtacccagttcccgaccagcctggtggccgcgcagaacgccgtggagcaacgccacatcggcgtcgccaccagcaacgcgacgttgttccgctccctcggcggggcagtcggggtggcgctgatgtcggcgatcctgctggccctgctcaagcacctgcggatcggcggcgggctcgaccagggcttttccgagagcgccctgctgagcagcctggacgccgccagcgggccggcccgggtgatcctccagcatgtcctcgcggatgccttcaaggtgctcttcctggtcaacgcggcggtggcgctgctcggcctggcggtggcctcggcactgcccgacatgaccctgcgcggccgcggcgcgacgcaaccgacggcaggcgagtga

SEQ ID NO: 29977 - DNA, 666 bp, Pseudomonas aeruginosa
atgagttaccagcatcaatatatcgacggcaccccgatccacttccccctgggcaagctggtctgcgtcgggcgcaactacgccgaacacgccaaggaactgaacaacccggttcccaccgagccgctgctgttcatcaagcccggctcctgcgtggtgccggtgagcggcgggctgagcctgccgcaggagcgcggctcggtacactacgaggcggaaatcgccgtgctgatcggcaagccgctgtcgcgcaagccgaaccgcgaggaggtcctcgacgcgatctccggctatgcgccggcgctggacctgaccttgcgcgaggtccaggcgaaactgaaggaaaagggcctgccctgggagctggcaaagagcttcgatggcgccggcgtgctgtcgccgttcgtgaacgccgaccagtttcccgacccgaccgacatcggcatccgcctgaccatcaacggcgaggtgcgccaggacggcaacagccgcgacatgctcaatccgatcgtgccgctgatccagcacatcgccgggcatttctcgctacaggccggcgatgtggtgctgaccggcacgccgtccggggtcgggccgctgaacagcggcgacgagttgctgctcgaattgccgggcgccagccgtttcgagacccgcgtgctctga

SEQ ID NO: 29978 - DNA, 966 bp, Pseudomonas aeruginosa
atgactatccacgcccaaactcccgagccgttttccatgtcccgagctttcacgcctcgccgtctgctgctggccgtcctgctggtcgcgctgtccgcgctggtccttctcggccagagcttccgggtcttcgaccgggcctggttcgccgtccaggagtggcgtcacgccgatgcctggaaagagcgctcgatatggctgccggactaccgcgtgcggatcgaggcgcagcccatcgaggggttgaacgacgacgtttccgcgctgaccttcgatcccgaccggcgcaccctgttcaccgtgaccaaccagccggcgcagatcatcgagctgtccttgcagggcaaggtactgcggaccatcccgctgaccggcttcggcgacgccgaggccatcgagtacatcagccgcggcgtctacgtgatcaccgacgagcgccagcaacgcctggtcaaggtgcgcctggaggacgacacgcgcttcatcgacgctgccgatgcccagcagctttcgctgggtatcggcctcaacggcaacaagggtttcgaagggctagcttacgacgccgagggcaagcgcctgttcgtcgccaaggagcgtgacccggtgcgcatctacgagatccacggtttcccccacacccaggcggacaaaccgttcgccgtgcacgtggtggacgaccccgggcgcgacaagcgcctgttcgtccgcgacctgtccagtctgcagttcgacgagggcaccgggcacctgctggcgttgtccgacgagtcgcgtctggtagtcgagctggacaccgacggcgagccggtcagcaccctgtcgctgctgcgcggcatgcacggcctgaagcgcagcgtgccgcaggccgagggcgtggcgatggacgaccgtggcgtgctctacctggtcagcgagccgaacctgttctacgtcttcagcaaggacgagccggcgcagccctga

SEQ ID NO: 29979 - DNA, 795 bp, Pseudomonas aeruginosa
atgaaacagtacctcgacctgatgcgccacgtgcgcgagcacggcaccttcaagagcgaccgcaccggcaccggcacctatagcgtgttcggccaccagatgcgcttcgacctggccgcgggcttccccctggtgaccaccaagaagtgccacctcaagtcgatcgtccacgagctgctgtggttcctcaagggctccaccaatatcgcctacctcaaggagcacggcgtctcgatctgggacgaatgggccgacgagaacggcgacctcggcccggtgtatggctaccagtggcgctcctggccggcgccggacggccgccacatcgaccagatcgccaacctgatggcgatgctgaagaagaatccggactcgcgccggctgatcgtctccgcctggaacccggcgctgatcgacgagatggccctgccgccctgccacgcgctgttccagttctacgtcgccgacggcaagctcagctgccagctctaccaacgttcggcggacatcttcctcggcgtacccttcaatatcgccagctatgccctgctgaccctgatggtggcgcaggtcgccggcctgcagccgggcgagttcatctggaccggcggcgattgccacctgtacgccaaccacctggagcaggccgacctgcagctgacccgcgagccgctgccgttgccgagcatgaagctgaatcccgaggtgaaggatctgttcgactttcgcttcgaggacttcgagctggtcggctacgaggcccatccgcacatcaaggcaccggtcgcggtctga

SEQ ID NO: 29980 - DNA, 507 bp, Pseudomonas aeruginosa
atggcacgaccgctggcgatgatcgccgcccttggcgagaaccgcgcgatcggcatcgacaaccgcctgccctggcgcctgccggccgacctcaagcatttcaaggcgatgaccctcggcaagccggtgatcatggggcgcaagacctgggactcgctgggtcggccgctgccgggccggctaaacctggtggtcagccgccaggccggcctggcactggagggtgcggaagtgttcgccagcctggacgccgcgctggcgcgcgccgaggcgtgggcgcaggcggaggacgccgacgaactgatgctgatcggcggcgcccagctctatgccgaggccttgccgcgcgccgcgcgtctctacctgacccgggttggcctggcgccggagggcgacgcctttttccccgagatcgatggtgcggcctggcgcctggcgtcgagcatcgaacacgccgcggctgacgatgcgcctgcctacgccttcgaggtatgggagcgccgctga

SEQ ID NO: 29981 - DNA, 1197 bp, Pseudomonas aeruginosa
atgaccctgcccagcttgcgtctcaaagccaacgccgagcgccgcctgcgcgccggccacctgtgggtctacagcaacgaggtggatgtcgccgcgacgccgctgaatgccttcgccgccggcgaccaggcggtgctggaaatggccaacggcaagccgctgggcatcgtcgcgctgagcccgaacaatctcatctgcggccgcctcatttcccgtgataccaagcacgttctcgacaaatcgctgctggttcatcgcatcaacatcgccctcagcctgcgcgagcggcttttcgacaagccgttctaccggctggtctacggcgattccgacctgctgcccggcctggtggtcgatcgctttggcgacgtgctggtggtgcaactggcgtccgcagccatggaactgcgcaaggacgaggtgctcgccgccctgctgcaggtgctcaagcccgccgccgtgctctggaagaacgactccagcgcgcgcgacgccgagggcctggagcgctacgtggccaatgcctacggcgaagtgccggagtgggtcgccctggaagagaacggcgtgaagttcgaggcgccggtgctggccgggcagaagaccggctggttctacgaccaccgcatgaaccgcgcgcgcctggcgccctacgtgcagggcaagcgggtcctcgacctgttcagctatatcggtggctggggcatccaggccgccgccttcggcgccagcgaagtgatgtgcgtggacgcgtccgccttcgccctcgacggcgtcgagcgcaacgcggcgctgaacggcgtggcggagaaggtcgcctgcgtcgagggcgacgtgttcgaggccctgcgcgagctgaaggccgccgacgaacgcttcgacgtagtgatcgccgacccgccggccttcatcaagcgcaagaaggacctgaagaacggcgaggccgcctaccgccgtctcaacgaacaggccatgcgcctgctgagcaaggacggcatcctggtcagcgcctcctgctcgatgcacctgcccgaggacgacctgcagaacatcctgatcggcagcgcccgccatctcgaccgcaacatccagctgctcgagcgcggcggccagggccccgaccatccggtgcacctggcgatcgcggaaacccgctacatcaagagcctgacctgccggctgctgcccaacggctga

SEQ ID NO: 29982 - DNA, 813 bp, Pseudomonas aeruginosa
atgcccgaactacccgaagtcgaaaccacccgccggggcatcgccccctacctcgaaggccagcgcgtcgagcgcgtgatcgtgcgcgagcggcgcctgcgctggccgattcccgaagacctggacgtgcgcctgtccggacaacgcatcgtcagcgtcgagcgccgcgccaagtacctgctgctgggcgccgaggccggtacgctgatcagccacctgggcatgtccggcagcctgaggctggtggagagcggcaccccggccagtcgccacgagcacgtcgacatcgagctggcctcgggcatggccctgcgctacaccgatccgcggcgcttcggcgccatgctctggagcctggcgccactggaacacgagttgctgcgcaacctcggcccggaaccgctgaccgacgctttcgccggccagcgtctgttcgagctgtcgcgcgggcggagcatggcggtcaagccgttcatcatggacaacgcggtggtggtcggggtcggcaacatctacgccagcgaagcgctgttcgccgccggcatcgatccgcgcaagcccgccgggagcatctccaaggcgcgctacctgcgcctggcggaggagatcaagcggatcctggcgatcgccatcgagcgcggcggcaccaccctgcgcgatttcgtcggcggcgacggccagcccggttacttccagcaggaattgttcgtctatggccgtggcggggagttctgcaaggtctgcggcagcaccctgcgcgagatccgcctaggccagcgcgccagcgtgtactgcccgcgctgccaacgctga

SEQ ID NO: 29983 - DNA, 252 bp, Pseudomonas aeruginosa
atgtccctgaaaatcactgacgattgcatcaattgcgacgtctgcgaacccgaatgcccgaacggcgcgatctcgcaaggcgaagaaatctatgtgatcgatcccaatctctgcaccgagtgcgtcggccactacgacgagccgcagtgccagcaggtctgtccggtggactgcattccccttgacgacgccaatgtcgagagcaaggaccagttgatggagaaataccggaagatcaccggcaaggcctga

SEQ ID NO: 29984 - DNA, 1398 bp, Pseudomonas aeruginosa
gtggcggcacgaaaggtccagatcaccatgaaaaccccagctcgccgccgcgtcggcctgctcctagccagcctttgtctcccgcttttcgcccaggcggcggaaacccagcccacccacgagttcagcctcgacaacggcctgaaggtcatagtgcgtgaagaccaccgcgccccggtggtggtttcccagctctggtacaggatcggctccagctacgagacacccgggctcaccggcctgtcccacgccctcgaacacatgatgttcaagggcagccgcaagctcggcccgggcgaagcctcgcgggtgctgcgcgacctgggtgcggaagagaacgccttcaccaccgacgactacaccgcctattaccaggtcctggcccgcgaccgcctgccggtagcgctggagatggaagccgaccgcatggcccacctgagcctgccggtcgaccagttcaagagcgagatcgaggtgatcaaggaggagcgccgcctgcgcaccgacgacaatcccaacgccctcgccttcgagcgcttcaaggccgccgcctacccggccagcggctaccacaccccgaccatcggctggatggccgacctgcagcgcatgaccatcgacgacctgcgccactggtacgaatcctggtacgcgccgaacaacgccaccctggtagtggtcggcgacgtcaccgccgacgaggtcaagaccctcgccaagcgctacttcggcgagatcccctggcgccagctgccgccggcgcgcaagccgctggaactggccgagcccggcgagcgccggctcaagctgtacgtacgcacccagctgccgaacctgatcatgggcttcaacgtgcccagcctgggcagcagcgagaaccctcgcgaagtcaacgccctgcgcctgatcggcgcgctgctcgatggcggctacagcgcccgcctggcctcgcgcctggagcgcggcgaggagctggtcgccggcgcctccacctactatgacgcgttcaaccgcggcgacagcctgttcgtcctctcggccacgccgaacgtgcagaagggcaagaccctcgagcaggtcgaggccggtctgtggaagcagctcgatgacctcaagcagaacccgcccagcgccgcggagatcgagcgcgtgcgcgcgcagatgatcgccgggatggtctacgagaaggactccatcgccgcccaggccagcagcatcggccagttggaaagcgtcggcctgtcctggaagctgatcgaccaggacctggaggccctcaaggcagtgactccggacgatatccagaaagccgcccgcacctatttcaccccgtcgcgcctgaccctggcgcaagtgctgcctgtgaaggccgaggaaaaggaggcccgtcatgagtga

SEQ ID NO: 29985 - DNA, 798 bp, Pseudomonas aeruginosa
atgagccaagcatccagtaccgatacccccttcgtcatcgccggccgtacctatggctcgcgcctgctggtggggaccggcaagtacaaggacctcgacgagacccgccgggccatcgaggcctccggagcggagatcgtcacggtggcggtgcggcgcaccaacatcgggcagaatcccgacgagccgaacctgctggatgtgatcccgccggatcgctacaccatcctgccgaacaccgccggctgctatgacgcggtcgaggccgtgcgcacctgccgcctggcccgcgagctgctggacgggcacaacctggtcaagctggaagtcctcgccgaccagaagaccctgttccccaacgtcgtcgagaccctcaaggccgccgagcaactggtgaaggacggcttcgacgtgatggtgtacaccagcgacgacccgatcatcgcccgccaactggccgagatcggctgcatcgcggtgatgccgctggccggcctgatcggctccggcctgggcatctgcaacccctacaacctgcgcatcatcctcgaggaagccaaggtcccggtgctggtagacgccggcgtgggcaccgcttccgatgcagcgatcgccatggagctgggttgcgaggcggtgctgatgaacaccgccatcgcccatgccaaggacccggtgatgatggccgaggccatgaagcacgcgatcgtcgccggtcgtctcgcctacctggccggacgcatgccgcgcaagctgtatgccagcgcctcgtcgccgctggacggcctgatcgactga

SEQ ID NO: 29986 - DNA, 594 bp, Pseudomonas aeruginosa
atgatcaagctcgaacagctggtgctggccagccacaatgccggcaaactcaaggaactccaggccatgctcggcgccagcgtgaaggtgcgctcgatcggcgagttcagccaggtggaaccggaggaaaccggtctttccttcgtcgagaacgccatcctcaaggcacgcaacgccgcacgcctctccggcctgccggcgctggccgacgactccgggctggcggtggacttcctcggcggcgcgccgggcatctactcggcgcgctatgccgacggccggggcgacgcggcgaacaacgccaagctgctggaggccatgaaggatgtcccggacgccgagcgcggcgcacagttcgtcagcgtgctggcgctggtgcgccacgccgacgacccgctgccgatcctctgcgagggcatctgggaaggccgcatcctccgcgaagcccgcggcgcccacggcttcggctacgacccgctgttctgggtgccggaacgcgactgctccagcgccgagctggcgcccgaggagaagaaccgcctcagccaccgagcccgcgccatggccctgctcaagcagcgcctgggtctctga

SEQ ID NO: 29987 - DNA, 693 bp, Pseudomonas aeruginosa
atgtccacgatagcagagaatattgcaaaggttgccgcgcgcatccgtgaggcagcgcaagctgcggggcgcgatccggccacggtcggcctgctcgccgtgagcaagaccaagcccgccgccgcggtgcgcgaggcgcacgccgccggccttcgcgacttcggcgaaaactacctgcaggaggccctcggcaagcaggccgaactggccgacctgcccttgaactggcacttcatcggccccatccagtcgaacaagacgcggcccatcgccgagcatttccagtgggtgcactcggtggaccggttgaagatcgcgcagcgcctgtcggagcaacgcccggccgggctgccgcccctgaatgtctgcctgcaggtcaacgtcagcggcgaagccagcaagtccggctgcgcccccgaggacctgccggccctggccgaggccgtgaagcaactgcccaacctccgattgcgtggcctgatggccatccccgaacccaccgccgaacgcgccgcgcaacacgccgcgttcgcccgcctgcgcgaactgctgctggacctgaaccttggcctggacaccctgtccatgggcatgagcgacgacctcgaggcagccatcggcgaaggtgcgacctgggtccgcatcggtaccgccctgttcggcgcccgcgactacggcgcgccggcttcttga

SEQ ID NO: 29988 - DNA, 1035 bp, Pseudomonas aeruginosa
atggatattaccgagctgctcgccttcagtgccaaacagggcgcttcggacctgcacctctccgccggcctgccacccatgatccgggtggatggcgatgtacgccggatcaacctgccaccgctggaacacaagcaggtgcatgcgctgatctacgacatcatgaacgacaagcagcgcaaggacttcgaggaattcctcgagaccgacttctccttcgaggtgccgggcgtcgcgcgtttccgggtcaacgccttcaaccagaaccgtggcgccggcgcggtattccggaccattccctccaaggtactgaccatggaggagcttggcatgggagaagtgttcaaacgtgtttcagacgtcccgcgcgggttggtactggtcaccgggccgaccggttcgggcaagtccaccaccctggcggcgatgctcgattacctgaacaacaccaagtaccaccacatcctcaccatcgaggacccgatcgaattcgtccacgaatcgaagaagtgcctggtcaaccagcgcgaggtgcatcgcgacaccctcggcttcagcgaagcgctgcgctcggcgctgcgggaggacccggacatcatcctggtcggcgagatgcgcgacctggaaaccatccgcctggccctgaccgcggcggagaccggccacctggtattcggcaccctgcacaccacctcggcggcgaagaccatcgaccgggtggtcgacgtgttcccggccgaggaaaaggccatggttcgctcgatgctctccgagtcgctgcaatcggtgatctcgcagaccctgatcaagaagatcggcggcggccgggtggcggcccacgagatcatgatcggcaccccggcgatccgcaacctgatccgcgaggacaaggtcgcgcagatgtattcggcgatccagaccggcggctcgctgggcatgcagaccctcgacatgtgcctcaagggcctggtcgccaagggcctgatcagccgcgagaacgcccgcgagaaggcgaagatcccggaaaacttctga

SEQ ID NO: 29989 - DNA, 435 bp, Pseudomonas aeruginosa
atggccagcgacaagccgctgcgcctgctgctgggcttcgactacggcacccggcagatcggcgtcgccgtcggccaggcggtgaccggccaggcccgcgagctgtgcgtattgaaggcgcagaacggcgtgccggactggaaccgggtggaagcgctgatcaaggaatggcagccggacgccatcgtcgtcggcctgccgctgaacatggacggcagcccaagcgagatgagcgagcgcgcggaaaagttcggccgccgcctcaacggccgtttcaacctgccggtctttacccacgacgaacgcctcacgacctacgccgccaagggcgagcgcctggcccagggccagcgcgacggctaccgcgagcgaccggtggacgccctggccgccgccctgctgctggaaggctggctggccgaacacccggattga

SEQ ID NO: 29990 - DNA, 2049 bp, Pseudomonas aeruginosa
atgaagaaaatcaacgcaggcaatcttttcgcgggcatgcgcagcagctcggtgatcgcggggctgttcatcgtcctcatcgtctcgatcgtgttgctgttcgccaactttgcctacctcaacacccagtcgaaccatgacaagcagtacatcggccatgccggcgaactgcgcgtcctgtcgcagcggatcgcgaagaacgccaccgaagcggcggcgggcaagggcgaggcgttcaagctcctgaaggatgcgcgcaacgacttcgagaaacgctggaacatcctggtcaacggcgacgagagcacatccctgccgcccagccccgaagcggtgaagccgcagatggacgtggtgcagcaggactgggatggcctgcgcaagaacgccgactccatcctcgccagcgaacagaccgtactgtccctgcaccaggtggcctcgaccctcgccgaaaccatcccgcagctgcaggtggaatacgaagaggtggtcgacatcctgctggagaacggtgccccggccgaccaggtcgcggtcgcccagcgccagtcgctgctcgccgaacgtatcctcggctcggtgaacaaggtgctggccggcgacgagaactcggtgcaggccgccgacagcttcggccgcgacgccagcctgttcggccgcgtactgaagggcatgcaggaaggcaacgcggcgatgagcatctccaaggtgaccaacgccgaggcggtggatcgcctgaacgagatcgccgaactcttcgagttcgtctccggttcggtggacgagatcctcgagacctcgcccgacctgttccaggtccgggaagcggcgaacaacatcttcagcgtttcgcagaccctgctggacaaggcctcgcaactggccgacggcttcgagaacctggccggcgggcgcagcatcaacctgttcgccggttacgccctcggcgccctggccctggcctcgatcatcctgatcggcctggtgatggtgcgcgagaccaaccgccggctggccgagaccgccgagaagaacgaccgcaaccaggccgcgatcctgcgtctgctcgacgagatcgccgacctcgcggacggcgacctgaccgtggccgcgaccgtgaccgaggacttcaccggcgccatcgccgactcgatcaactactccatcgaccagctccgcgaactggtggagaccatcaaccagaccgccgtgcaggtggccgcagcggcccaggaaacccagtccaccgcgatgcacctggccgaagcctccgagcaccaggcgcaggaaatcgccggcgcctcggcggcgatcaacgaaatggcggtgtcgatcgaccaggtatcggcgaacgcctcggaatcctcggcggtagcggaacgttcggtagccattgccaacaagggcaacgaggtggtgcacaacaccatcaccggcatggacaacatccgcgagcagatccaggacacctcgaagcgaatcaagcgcctcggcgaatcgtcccaggagatcggcgacatcgtcagcctgatcaacgacatcgccgaccagaccaacatcctcgccctgaacgccgcgatccaggcgtcgatggccggggacgcgggccgcggcttcgccgtggtagcggacgaggtacagcgactggcggaacgttcctcggcggcgaccaagcagatcgaggcgctggtgaagaccatccagaccgacaccaacgaagcggtgatctcgatggagcagaccacctccgaggtggtccgcggcgcgcgcctggcccaggacgccggtgtggccctggaggagatcgagaaggtatccaagaccctcgcggcgctgatccagaacatctccaacgccgcccgtcagcaggcatcgtcggccggccacatttccaacaccatgaacgtcattcaggagatcacctcgcagacctccgccggaaccaccgccaccgcacggagcatcggcaacctggcgaagatggcgagcgagatgcgcaactcggtatccggcttcaaactgccggagggcgtggagcaggcctga

SEQ ID NO: 29991 - DNA, 1404 bp, Pseudomonas aeruginosa
atgggccttaacgccgactggatgcagcgcgacctgaacgtactctggcatccctgtacccagatgaaagaccacgaacgcctgccggtgatcccgatccgccgcggcgaaggcgtctggctggaggatttcgaaggcaagcgctacatcgacgcggtcagttcctggtgggtcaatgtgttcggtcacgccaacccgcgcatcaaccagcgcatcaaggaccaggtcgaccagttggagcacgtgatcctcgccggattcagccaccagccggtgatcgagctgtcggagcgactggtgaaaatcaccccgccggggctcgaccgggtgttctacgccgacagcggctcggcgggcatcgaggtcgcgctgaagatgagctaccacttctggctcaatagcggcaggccgcgcaagaagcgcttcgtcaccctgaccaacagctaccacggcgaaaccatcgcggcgatgtcggtgggcgacgtggcgctgttcaccgaaacctacaagtcgctgctgctggacaccatcaaggtgcccagcccggactgctttctgcgtccggacggcatgtgctgggaagaacattcgcggaacatgttcgcccacatggagcgcaccctggccgaagggcacgacgagatcgccgcggtcatcgtcgaaccgctgatccagggcgccggcggcatgcgcatgtaccatccggtctacctcaagctgctgcgcgaagcctgcgaccgctatggcgtgcacctgatccacgacgagatcgcggtgggcttcggccgcaccgggacgatgttcgcctgcgagcaggccggcatcgccccggatttcctctgcctgtccaaggccctcaccggcggctacctgccgatgtccgcggtgctgaccagcgagaccatctaccggggcttctacgacgactaccagaccctgcgcgccttcctccactcgcacacctataccggcaacccgctggcctgcgccgccgccctggcgaccctggacatcttcgaggaagacaaggtgatcgaggccaaccgcgcgctgtccacccacatggccagggccaccgcgcacctggccgaccacccgcatgtcgccgaggtgcgccagaccgggatggtcctggccatcgaaatggtccaggacaaggcgtccaggacgccctacccctggcaggagcgccgcggcctgaaggtcttccagcatggcctggagcgcggcgcgctgctgcgcccgctgggcagcgtggtgtatttcctgccgccctacgtgattaccccggagcagatcgacttcctcgccgaggtggccagcgaaggcatcgacatcgccacccgcgacgcggtcagcgtggcggtcagcgacttccacccggaccaccgcgatccgggctga

SEQ ID NO: 29992 - DNA, 1491 bp, Pseudomonas aeruginosa
atgtcgttaaggtggctgcgcgccgcggcgtttctcatgttgggggtgttcagcgcggtggcgctgggcaaggataaacagcctacggcgatcgtcgtcggcgcgggcctggcaggcctgagcgcggcctacgaattgcagaaggacggctggcaggtcacggtgctcgaagcgcggccgcaggtgggcgggcgttccggcctggccaccagcgaatgggtcggcaaccagaaggtccagcccacgctcaatgcctacctggacaccttcaagctgaagccggtgccggcgccggacttcgtccgcacccccagctacctgatcgacggcctgtactacagcagcagcgatctcgcgctcaagcagccgaacgtcgccgccgacctcaagcgcttcgagtcgaccctggacgatctctcggcatcgatctccgacccgctcaaccctgcctcgagcaataccctgttcgccctcgaccagatgaacgccgcgcgctggctggacaagctgaacctgtcgccgaccgcgcgcctgctggtcaaccagcgtatccgttcgcgctacgacgaaccgtcgcgcctgtcgctgctctacctcgcccagcagggccgcgcctaccgtggcgtcgacgaccgcgacctgcgcgcggcgcgcctgcccggcggcagccaggtgctggcggaagccttcgtcaagcagatcaagacgatcaagaccaaatccaaggtgtcgagcatcgtccaggccaaggacggcgtcgccgtcaaggccggcagcgagacctacaaggccgactacgtggttctcgccgtgccgctgaaggcgctcggccagatccagatgaccccgtccctgagcggtacccagatgtccgcgctgaagggcaccaactatggctggcgcgaccagatcctgctgaagttcaagcgtccggtgtgggacgacaagtcgcgcctctccggcgagatcttcagcgaccagggcctgggcatgatctgggtcgagccggcgctgaaaggcggcgccaacgtgctgatcaacctgtccggcgacaacgcccgcgtgctgcaggctttcggcgaccggcagatggtcgaccaggtgctgatccgcatgaacaagttctatccgaagatgcgcggtgccttcgccggctacgaaattcgtcgctacagcgccgacccgggcaccggcggttcctacctggcctacggtccgggccaggtgacgcgcttctggcggatctgggaacagccgctgtcgcgggtcgccttcgccggcgagcacaccgatgcgctgtaccccggcaccatcgagggcgcgctgcgtagcggcaagcgcgcggccagccaggtgcgcgacctgtatgccggcaagacgccggtgatcgagggcgcgccgatggtggcgaaggccgagaaggtggccgcaccgacgaccggcggcgagaagaagaacccgttcgcctggttcacccgcctgttcgattga

SEQ ID NO: 29993 - DNA, 1377 bp, Pseudomonas aeruginosa
gtgacctccaccgctttctcctcgctgccgctttccgcggacctcctggccaatctcgactccctcggttaccgggagatgacgccgatccaggcgcagagcctgccgctgatcctccagggccacgacctgatcgcccaggccaagaccggcagcggcaagaccgcggccttcggcctcgccctgctcagcccgctgaacccgcgctacttcggctgccaggcgctggtgctgtgcccgacccgcgaactggccgaccaggtcgccaaggagatccgccggctggcccgcgccgccgacaacatcaaggtcctgaccctctgcggcggcgtcccctacggcccgcaggtggcttcgctggagcacggcgcgcacgtggtggtcggcaccccggggcgcatccaggagcacctgcgcaagggcaccctggtcctcgacgggctcaataccctggtcctcgacgaagccgaccggatgctcgacatgggcttctacgacagcatcgccgagatcatcggccagctccccgagcgccggcagaccctgctgttctccgccacctacccggacggcatcgagaagctggcgaagaccttcatgcgcgatccgcgacaggtgagggtcgagtcgctgcacgccgacagccagatcgagcagcgcttcttcgagatcgatccgaaacagcgcatggacgccgtggtacgcctgctccagcatttccggccacagtcctgcgtggccttctgccagacccgccagcagtgccaggagctggccgacgcactgaaggcgcagcggatttccgccctggccctgcacggcgacctggagcagcgcgagcgcgaccaggtcctgacggtgttcgccaaccgcagttgcaacgtactggtggccaccgacgtggccgcccgcgggctggacatcgccgccctggaaacggtgatcaacgtcgagctggcgcgtgacccggaggtccacatccatcgcatcggacgcagcggtcgcgccggcgagaaaggcctggccctgtcgctggtggcgccggccgaggccagccgcgcgcaggccatcgaggacctgcagaagcagccgctggcctggtacgccctcggccagttgaaggccagcccggagccattgctgccgccgatgagcaccctgtgcatcgccggcggacgcaaggacaaggtgcgccccggcgacctgctcggtgccctcaccggcgacgccgggctgcccggcagcgcggtgggcaagatcgccatcttcgacttccaggccttcgtcgccatcgagcgcggcctcgcccaccaggccctcaagcgcctgagcgaaggcaagatcaaggggcgctcgttcaaggtccgcctgctgtag

SEQ ID NO: 29994 - DNA, 2553 bp, Pseudomonas aeruginosa
gtggacatcgccgaatacttcagcaagcagaccaccgagtacctgcaacgcgccgcgcaggtcgccgccgaattcggcaagcgcgaagtggacaccgagcacctgctctacgccctggccgacgccgacgtggtgcaggcggtgctcaagcagttcggcctgtcgccggccgacctcaagcagtacatcgaggccaacgccgtgcgcggcgccagcaagggcgaggcgagcgaggacatgaccatctcgccgcgggtgaagagcgccttgcagcatgccttcgccctgtcccgcgaactcggccacagctatgtcggccccgagcacctgttgctcggcctggcggcggtgccggacagcttcgccgggacgctcctgaagaagtacggcctgaccgagcaggcgctacggcagaaagcggtcaaggtggtcggcaagggcgccgaggacggccgcgtggacggcccgagcaacactccgcaactggacaagttcagccgcgacctgacccggctggcccgcgaaggcaagctcgatccggtgatcggccgctcgaaggaagtcgagaccaccatcgaggttctcgcccggcgcaagaagaacaacccggtgctgatcggcgagcccggcgtcggcaagaccgccatcgtcgaaggcctggcccagcgcatggtccagggcgaggtgccggaggtgctgcgcgacaagcgcctggtcgaactgaacatcaacgccatggtcgccggcgccaagtaccgcggcgagttcgaggaacgcctcaagcaggtgatggacgaactgcaggcggcgcagagcgagatcatcctgttcatcgacgaggtgcacaccatcgtcggtgccggccagggcggcggcgaaggcgggctggacgtggccaacgtgctgaagccggcgatggcgcgtggcgagatgaacctgatcggcgccaccaccctcaacgagtaccagaagtacatcgagaaggacgccgcgctggagcggcgcttccagccggtgttcgtccccgagccgacggtggagcagaccatctccatcctccgtggcctgcgcgacaagctcgaaggccaccacaaggtgaccatccgcgacgaggccttcgtcgccgccgccgagctgtccgaccgctacatcggcaaccgtttcctgccggacaaggccatcgacctgatcgaccaggccgccgcccgcgtgcgcatcgccagcacctcgcggccggccgagatccaggaactggaggccgagctggcgcagctcaagcgcgagcaggactacgccgccagccgcaagtggtacgacgaggcgaaggtcttcgagaaacgcatccaggaacgcaaggaacacctcgagcagatcaccgagcgctggcagcagacccaggggtcgaagaccgaggaggtgcgggtcgaggacatcgccgagatcatctccaagctcaccggcatcccggtcaccgaactgaccgccgaggagcgcgagaagctcctgcagatggaagagcgcctgcaccagcgggtgatcggccagcaggaagcgatcaccgcggtcagcgacgccgtgcgcctggcccgcgccgggctgcgccagggcagccggccgatcgccaccttcctgttcctcggcccgaccggggtgggcaagaccgagctggccaaggccttggccgaggtggtgttcggcgacgaagacgcgatgatccgcatcgacatgagcgaatacatggagcgccacgcggtgtcccggctgatcggtgcgccgccgggctacgtcggctacgacgagggcggccagctcaccgagcgggtgcgccggcggccgtacagcgtgatcctgctcgacgagatcgagaaggcccacgccgacgtcaacaacatcctcctgcaggtgttcgacgacggccgcctgaccgacggcaaggggcgcgtggtggacttcaccaacaccatcatcatcgccaccagcaacctcggctccgagctgatcatgaagaacgcccaggccggcgagttcgcccagccgccggagaagctcaagcgcgaactgatgactaccctgcgcgggcatttccgcccggaattcctcaaccgcctcgacgaggtgatcgtcttcgaatcgttgagcaaggcgcagatcgaggacatcgtgcgcctgcaactggagcgggtgaagcgcgccgcgcacgcccaggacatctacctgcacatcgacgacagcctggtcggccacctcgccgaagaggcctaccagccggagttcggcgcccgcgaactgaagcggcagatccgccagcaactggagacgcgcctggccacggcgatgctcaagggcgaggtgaaggagggcgagacggtcaccttcttctacgacgccaaggacggcgtcggctaccgcaagggcgccgcgccgaatccggcggcacgcaagaagtccggtgccggcgagacgcccaggggccgcgcgacggcggcgaggaagccggcggcgaagaaaggcgccgccgccaagggcaaggccgacaagccgaaggccaagtga

SEQ ID NO: 29995 - DNA, 1359 bp, Pseudomonas aeruginosa
atgaaccgcacgctggcctacaagctcggcgccatcgccctactcatcctgctattgctgattcccctgttgatgatcgacggcctgatccgcgatcgccaggaggttcgtgacggcgtgctgcaggatatcgcccgcagctccagctacagccagcgcctcaccggcccgctgctggtggtgccgtaccgcaggacggtgcgcgagtgggtcaccgaggagaagaccgagaagcgcgtgttgcaggagcgcgagcagcgcggcgagctgtacttcctgcccgaccgcttcgccctcgacgggcagatgcgcaccgagctgcgctaccgtggcatctaccaggcgcgcctgtaccacgtcgacaacaaggttgccggctacttccaggtgcctgcgcactatggcatcgaagaagacctggaggactaccagttcgaaacgccgttcctggcgatgggcatcagcgacatccgcggcatcgagaatgccctgcgcctgtccctcaacggtgccagcgtcgacttcgagccgggtagccgggtcggcctgctcggcagcggtgtgcacgcaccgctgcaaggcgtcgacgggcgccaggcgcagcgcctggagtacgccttcgacctgtcgttgctcggcagcgagcggctggacatcgtgccggtgggccgcgacagccaggtcatcctgaaggccgactggccgcacccgagcttcggcggcgagttcctgcccagcgagcgggagatcaccgcccagggcttcaccgcgcgctggcagaccagcttcttcgccaccaacatggaagaggcgctgcgcagttgcgtggaggagcagcgttgcgacggcttccaggcgcgcgccttcggcgtcggcctggtcgatccggtggaccagtacctgaaggccgaccgcgcgatcaagtacgcgctgctgttcatcaccctgaccttcgccggcttcttcctcttcgaggtgctcaagcgcctggcggtacacccggtccagtacgcgctggtcggcctggcgctggcgttcttctacctgctgctgctgtcgctggccgagcacgtcggcttcgagctggcctacctggtctccgccggagcctgtgtcggcctgatcggcttctacctgtgcttcgtcctgcgcagcgtggcccgagggctgggcttcagcgtcggcctggcagggctgtacggcctgctctacggcttgctgagcgcggaggactacgccttgctgatgggctcgctgctgctgttcgcggtgcttgccgcggtgatggtgctgacccgccgcctggactggtacggggtcggccgcaaggacttcccggcggtacccgccagggcctga

SEQ ID NO: 29996 - DNA, 621 bp, Pseudomonas aeruginosa
atgagcgctacccatacgctgttctacgccgccgcctcgcccttcgtgcgcaaggtcctggtcctgctccacgaaaccggccaacgcgagcgcgtggcgctcgaggaagtcacgccgacgccggtcgcgcccatccggcagctcaacgccagcaacccggccggcaagattcccgccctgcgcctgccggacggccaggtgctgcacgacagccgggtgatctgcgactacttcgaccagcagcacgtcggcgaaccgctgatcccccgcgaaggcagcgcccgctggcgacgcctgaccatcgcctcgctggcggacgccgtcctcgacgccgcggtgctgtcccgctacgaaaccttcgtccgccccgaggagaagcgctgggacacctggctcgaagcacagcgggaaaagatcgggcggtccctggcgtggctggagggcgactgcatcgccgaactgcaggcgcgcttcgacatcgccgccatcggcgtcgcctgcgccctgggctatctcgacctgcgccagccggagtgggactggcgcggccgctacccgcgactcgccgcctggttcgccgaagtcagccagcgcccgtcgatgcaggccacccgcgcctga

SEQ ID NO: 29997 - DNA, 1728 bp, Pseudomonas aeruginosa
atgtccagcaccccgaagccgcccgcctcgccccgcgagttttctccctcgctgctcgacctcggcaccctggaaagcctcgacagcctgccgcgcgccggtcagcggagcgcggagttctccgcctcgctgctcgacctgggcactccggccagtctcgactgcctgccacgcgccgggctgcgcgcagcggagttctcggcggcgcgcctggacctgggcactcccgccagcctcgattgcctgccccgcgccagccatcacgccggccccgaactgccgccgctgagcccgcgcctgtacagcgccgatctcgccccgaccaaggccgaagggcgccgctggggacgctacagcctgttcgcgctgtggaccaacgacgtgcacaatatcgccaactactccttcgccatcggcctcttcgccctcggcatgagcggcgcgcagatcctcgccgcgctggccctgggcgcgctgatggtctacgggctgatgaacctgtccggctacatgggccagaagaccgggctgccctacccggtgatgtgccgcatcgccttcggcatccacggcgcgcaactccccgcgctgatccgcgcggtgatcgccatcgcctggttcggcatccagacctatctcgcctccatcgtcctgcgcgtgctgctgacggcgatctggccggggctcgcagcctacgaccaggacgccatcctcggcctgtcgagcctgggctgggcgaccttcgtcgccatctggtgcgtgcaactgctgatcttcgcctacggcatggagatggtgcgtcgctacgaatccttcgccggaccggtgatcctgctcaccgtcgccgccctcgccgcctggatgtacctgcgcgccggcgcctccatcgcctggtccagcggcgaacccatgagcggttcgcagatgtggttgaagatcttcggcggtgcggcgttctgggtgaccctgtacggcaccatgatcctgaacttctgcgacttcgcccgcggctgcccggaccgccgcaccatcagcgtcggcaacttctgggggctgccggtgaacatcctgctgttcggcctgttcgcggtggtcctcgccggcgcccagttcaggatcgacggccagctcatccagagccccaccgacatcgtcgccgcgatccccgacaccctcttcctggtgctggccagcctggcgctgctgatcgtcaccgtggcggtgaacatcatggccaacttcgtcgccccggcctacgtactcaccaacctggcgccgaacctgctgaacttccgccgcgccgggctgatcagcgcgaccatcgcggtgctgatcctgccctggcacctgtacaacagccccggggtgatcctctacttcctcggcggcctcggcgcgctgctcggcccgctgtacgggatcatcatggtcgactactacctggtgcggaaaggccgggtgaacctgccggagctgtacaccgaaagccgcgccggcgcctatcactacgcgcgaggggtgaacccgcgggccatcgccgcgttcgtcccggcggcgatcatctccaccctgctggcattgttgccggcattcgccgagctatcgccgttctcctggttcttcggcgccggcctggccggcctgatccactacgccctggccaagcgccgcacggcctaccgcgaagtttccggcgaagcgatcgcggtggacagcgtgcagcactga

SEQ ID NO: 29998 - DNA, 1059 bp, Pseudomonas aeruginosa
atgagtgcaaccgcttccgtcgccacccgtcacgactggtccctcgccgaagtccgtgccctgttcgagcaaccgttcaacgacctgctgttccaggcgcagacggtgcatcgcgcgcacttcgacccgaaccgcgtgcaggtctcgacgctgctgtcgatcaagaccggcgcctgccccgaggactgcaagtactgcccgcagtccggccactacaacaccggcctggacaaggagaagctgatggaggtgcagaaggtcctcgaggcggcggccgaggccaaggccatcggttcgacccgcttctgcatgggcgctgcctggaagcacccgtcggccaaggacatgccctacgtcctggagatggtcaagggcgtgaagaagctcggcctggagacctgcatgaccctcggtcgcctgacccaggaacagacccaggcgctggcggacgccggcctcgactactacaaccacaacctggatacctcgccggagttctacggcaacatcatcaccacccgcacctacagcgagcgcctgcagaccctggcctacgtgcgcgaggcggggatgaagatctgctccggcggcatcctcggcatgggcgagtcggtggacgaccgcgccggcctgctgatccaactggcgaacctgccggagcacccggagtcggtgccgatcaacatgctggtgaaggtcaagggcacgcccctggcggaagagaaggacgtcgatcccttcgacttcatccgcaccctggcggtggcccggatcatgatgccgaagtcccacgtgcgcctgtccgccggccgcgagcagatgaacgagcagatgcaggcgctggccttcatggccggggccaactcgatcttctacggcgaaaagctgctgaccacgaagaacccgcaggccgaaaaggacatgcagttgttcgcccgtctcggcatcaagccggaagagcgcgaagagcacgccgacgaagtgcaccaggccgccatcgagcaggcgttggtggaacaacgcgaatcgaagctgttctataacgccgcttccgcctga

SEQ ID NO: 29999 - DNA, 1206 bp, Pseudomonas aeruginosa
atgtccttcgatctcgcttcccgcctcgccagccggcgcgcggaagacctctaccgccagcggccgctgctggagtcggcccagggcccggacgtcgtggtcgacggccagccgctgctggccttctgttccaacgactacctcggcctggccaaccatcccgaggtgatcgccgcgctgcgcgccggcgccgagcgctggggcgtgggcggtggcgcctcgcacctggtggtcggccacagcggcccgcaccacgaactggagctggccctcgccgaattcaccgggcggccgcgcgcgctgctgttctccaccggctacatggccaatctcggcgcggtggccgcgctggtcggcaagggcgacacggtgctggaggaccgcctcaaccacgcttcgctgctggatgccggattgctctccggcgcgcgtttctcgcgctacctgcacaacgacccggcaagcctcgccgcgcgcctggacaaggccgagggcaataccctggtggtcaccgacggggtcttcagcatggacggcaatctcgccgacctgccggccctggccgccgtcgcgcaggcccgcggcgcctggctgatggtcgacgacgcgcatggcttcggcccgctgggcgccagcggcggcgggatcgtcgaacacttcggcctcggccaggagcaggtgccggtgctgatcggcaccctcggcaagggtttcggtaccgccggcgccttcgtagcgggcagcgaggaactgatcgagaccctgatccagtacgcccggccctacatctacaccaccagccagccgccagcggtggcctgcgccaccctgaagagcctggagctgctgcgccgcgaaagctggcggcggcaacacctggcggcgctgatcgcccgtttccgccatggcgccgaggcgcttggcctgaccctgatggacagcttcacgccgatccagccgatcctggtcggcggcagccgccaggccgtggccctggccggcatgcttcgagcccgtggcatcatggtcggcgcgatccgcccgccaaccgtgccggccaacagcgcgcggctgcgcgtcacgctgtccgccgcgcacagcgaagcgcaggtcgaccgcttgctcgaagccctcggcgaaagctggcgacagctgtcgtctagccttctggcagagatcgaagccgaggagggagacgatgcgtga

SEQ ID NO: 30000 - DNA, 1164 bp, Pseudomonas aeruginosa
atgctgaggatcagccattacctgcgcagcctcaccgaggacgcgccgacgccgcgccgcgccggcggcaggcgcgccccggtggtgatctggaacctgctgcggcgctgcaacctgacctgcaagcactgttactccacctccgccgacagcgacttccgtggcgagctggagaccgcggaaatccttcgcggcatcgacgacctgcgcgccgccggagtgcgcgtgctgatcctctccggcggcgagccgctgatgcacccggacctcttcgagatcgccgcccatgcgcgccaggccgggatgttcgtggcgctgtcgagcaacggtacgctgatcgacgaaggcaacatccagcgcgtcgccgaggcccgcttcgactacgtcggcatcagcctcgacggcctgcgcgagacccacgaccgcttccgccagaagcagggcagcttcgacgccgcgctggcggccatgcgcctgtgccgcgaggcggatatccgcgtcggcatgcgcaccaccctgaccgaggagaacgccgcgcaactaccggcactgctcgacctgatgcgcgaactcgacgtgcagaagttctacctctcgcacctcaactacagtggccgcggccgccgcagccgcgccctcgacgcccaccaccggcgcacccgcgaggccctcgcgctgctcttcgaacgggccgaccaggacatccggcaggggcgcgacagcgacttcgtcaccggcaacaacgacgccgacgcgatccttctcctcgactggctcaagcgccgccgcccgcagcaactggcgcgtctctgcgagctgctgctggactggggcggcaacgcctcgggcgagggcatcgccaacatcgacaacaccggcgaggtgcatccggacagctactggtggcaccacagcgtcggcaacatccgccatcagcgcttcgccgacttctggttcgagcgccccgacccgctgctcctgcaactgcgccagcgcccgcgaccggtggtcgggcgctgcagccaatgccgctggctggacatctgcaacggcaacacccgcacccgcgcctgggccggcggagaactctggggcgaagaccccggctgctacctcagcgatcaggaaatcggcctcgagcgcatcgcgctgcacgccgtctaa

SEQ ID NO: 30001 - DNA, 1179 bp, Pseudomonas aeruginosa
atgaacctgcgtcccctcgcgccgcttctcctcaccctgctcgccggctgtagccagcagccgcccttgcgcggcagcggcgacctcggcgtgctgatcgaacgcgccgacggcagcgtgcagatcctcgacggcacggcgaagacctcgctggcgcgggtcgaaggcctcggcgacctgtcccacgcctccctggtgttctcccgcgaccagcgctacgcctacgtattcggtcgcgacggcggcctgaccaagctcgacctgctggcccagcgcatcgacaagcgcctgatccagggcggcaacagcatcggcggagcgatcagccaggacggtcggctggtcgcggtatccaactacgagccgggcggggtcaaggtgttcgacagccgcaccctggagctggtcgccgagattcccgccacccgcctccccggccaggacaggaactcccgggtggtcggcctggtcgacgcgcccgggcagcgcttcgtgttcagcctgttcgacagcggcgagatctggatcgccgacttcagccagggcgacacgccgcacctgacccgcttccgcgatatcggcaagcaaccctacgacgccctcatcagccccgacgggcgctactacatggccgggctgttcggcgaggacggcatggcccagctcgacctctggcacccggagcgcggcgtcaggcgcgtactcggcgactacggccgcggccaacgcaagctgccggtgtacaagatgccgcacctggagggctggaccatcgccagcgaccaggccttcgtcccggcggtcggccatcaccaggtgctggtgctcgacgcgcgcgactggaagcagaccgacgccatcgacgtcgccggccagccggtgttcgtcatgactcgaccggacgaccggcagatctgggtcaacttcgcctacccggacaacgacaaggtgcaggtcatcgacagcgagacccacgaagtgatcgaaaccctgcgtcctggccccggcgtactgcacatggaattcagcgggcgcggcgaccaggtctggatctcggtgcgcgacgccgaccagttgcaggtctgggacccgtaccgcctgaagcgcatcggcagccttccggcccgcagcccgagcggcatcttcttcagccaccgcgcccagcacatcggactctag

SEQ ID NO: 30002 - DNA, 1707 bp, Pseudomonas aeruginosa
atgccatttggcaagccactggtgggcaccttgctcgcctcgctgacgctgctgggcctggccaccgctcacgccaaggacgacatgaaagccgccgagcaataccagggtgccgcttccgccgtcgatcccgctcacgtggtgcgcaccaacggtgcccccgacatgagtgaaagcgagttcaacgaggccaagcagatctacttccaacgctgcgccggttgccacggcgtcctgcgcaagggcgccaccggcaagccgctgaccccggacatcacccagcaacgcggccagcaatacctggaagcgctgatcacctacggcaccccgctgggcatgccgaactggggcagctccggcgagctgagcaaggaacagatcaccctgatggccaagtacatccagcacaccccgccgcaaccgccggagtggggcatgccggagatgcgcgaatcgtggaaggtgctggtgaagccggaggaccggccgaagaaacagctcaacgacctcgacctgcccaacctgttctcggtgaccctgcgcgacgccgggcagatcgccctggtcgacggcgacagcaagaagatcgtcaaggtcatcgataccggctatgccgtgcatatctcgcggatgtccgcttccggccgctacctgctggtgatcggccgcgacgcgcggatcgacatgatcgacctgtgggccaaggagccgaccaaggtcgccgagatcaagatcggcatcgaggcgcgctcggtggaaagctccaagttcaagggctacgaggaccgctacaccatcgccggcgcctactggccgccgcagttcgcgatcatggacggcgagaccctggaaccgaagcagatcgtctccacccgcggcatgaccgtagacacccagacctaccacccggaaccgcgcgtggcggcgatcatcgcctcccacgagcaccccgagttcatcgtcaacgtgaaggagaccggcaaggtcctgctggtcaactacaaggatatcgacaacctcaccgtcaccagcatcggtgcggcgccgttcctccacgacggcggctgggacagcagccaccgctacttcatgaccgccgccaacaactccaacaaggttgccgtgatcgactccaaggaccgtcgcctgtcggccctggtcgacgtcggcaagaccccgcacccggggcgtggcgccaacttcgtgcatcccaagtacggcccggtgtggagcaccagccacctgggcgacggcagcatctcgctgatcggcaccgatccgaagaaccatccgcagtacgcctggaagaaagtcgccgaactacagggccagggcggcggctcgctgttcatcaagacccatccgaagtcctcgcacctctacgtcgacaccaccttcaaccccgacgccaggatcagccagagcgtcgcggtgttcgacctgaagaacctcgacgccaagtaccaggtgctgccgatcgccgaatgggccgatctcggcgaaggcgccaagcgggtggtgcagcccgagtacaacaagcgcggcgatgaagtctggttctcggtgtggaacggcaagaacgacagctccgcgctggtggtggtggacgacaagaccctgaagctcaaggccgtggtcaaggacccgcggctgatcaccccgaccggtaagttcaacgtctacaacacccagcacgacgtgtactga

SEQ ID NO: 30003 - DNA, 1839 bp, Pseudomonas aeruginosa
atggccttcgccgtcgagctggaggaatgggtcggcgcccactggcaccgcttcatcacccgccatgccagcggcgagttcgaggcggcgcgggtgaccctggagagcatgcggcgtccgctcggcatgctcttccgggcgctcggcggcgcaccgggggtagccctcgaggcgaccccggcgcgccgcctgctgctacgccgcacctggttgcagcgggtcgccgggacctgcgagcaggccccggtgtcctggttcaacggcgacagcctgcgcctgccggaatccctcgcggtctatccgcaggccgagctgaaccgcgaactgtatcgctggctggcgctgctggcggccagcgccgggccgctgcggcactgggcccaggacaaccagcgctgggcgcggcagttgctcgatgcctatccggcgctgcgcccgcgctacgcccggctggtcgccgcgcatctgcgccagcgcccgtcgctggacgattgcccggcggcagacgccgaactggaaatcgccctgcgccgcgcgcttgccgagccgggcagcgtcgagcgcttcccgcgagtcgagcgggcgccctggccggtgccgctgtggctgtatcccggcgagcgctggacgccttccgccagtgcggaggacggcgaggaagcggccgccggcgccggcaagcgccaggtcgcccgcagcggagcgcgcaagcgcgccgagcgcattgaggaacgcaacagcgaacgcaacctgctgctgttccgcctggaaagcctgctcagttggtcggagcacctggccctggaccgctgtagcgacgacgaggacgacccggacggcgcgcgcgtcgccgaagacctcgactacctgtcgctgtcgcgccagcgcacgcagaagggcggcggcctgcgcctggatctcgacctgccggccgccgactacgatgacctgccgctcggccccgggctgaagctgcccgagtgggactatcggcagcagcgcctgctgagcgaccacgtgctgctgcaaccgatgcggccgcgcggcgcgaccagcgccagcctgccggcgcacctggagaagaccgcgctgcatctgcgccgccagttcgcctgcctgcgcgacggccgccaacgcctgcgccagcagccgcaaggcgacgagatcgacctcgatgcctggctcgacttccaggtcgagcggcggcgcggcggttccacccagccaggcctgttcctcgaacagcggccgcgccggcgcgacctcgcctgcctgttgctggcggacctgtcgatgtccaccgaagcctacctcgacgaccagcggcgagtgatcgacagcatcgtcgacagcctgctgctgttcggcgaggcgttgcaggcactgggcgaccccttcgcgctgtacgggttttcctcggtgcgccggcagcaggtgcgctggcaggtgctgaaggacttcgacgaaggctacggcggcgaggtccgcggtcgcgtgctggcgctctcgccgggctactacacgcggatgggcgcggcgatccgccgggccagccaggtgctcggcgggcagccgcagaagcgtcgcctgctgttgctgttgagcgacggcaagcccaacgacctggaccgctacgagggccgctacggcatcgaggacacccgccaggcggtgatcgaggcgcgcagccagggactggtgcccttctgcatcaccatcgacaaggaggcggcggactacctgccctacctgttcggcgccgacggcttcgcgctggtcgagcgcgccgggcagttgcccgagcgcctgctccagctctatcggcgcctgcgccgctga

SEQ ID NO: 30004 - DNA, 1026 bp, Pseudomonas aeruginosa
atgcgccggctgctactgggcgccgggctgctgctcgccagcctggtcgcctgggccgatgtgccaccgatacccgcgctgacggcgcgggtcaccgacctcaccgcgaccctttccggcgaccagcgccagcacctggagcaacagctcgccgccctggaagccaagagcggcgcgcagctcgctgtgctgctggtcccgaccaccggcgacgattccatcgaggagtacgcggtgcgtaccttcgagaaatggaagctgggccagaagaaggtcgacgacggcgtcctgctgctggtggcgaagaacgaccgcaccctgcgcatcgaggtcggctacggcctggaaggggccatcaccgacgtccaggccgggcggatcatcagcgagcagatcacgccgcagttccgccagggcaacttctatggcggcatccaggccggcgtggacagcctggtgcaactgatcgatgccgagaagaacccggacagcgctaccgccagcgctcccgtcgacgccttgccggcggttcccgaggccacgccgccgcgggccctgccggcaccggtcgacgagggtgaggtgtatgacagcgccccgccggagccgaagaagaagagcggcctgagcggacagctctggggcaatccggtctacctcggtgtctatgtggcggtcctgctcgccgtggccctgctcggacgcctgctgccgttgcagtggatgcggcggcgcagcatcggccgcttcctgctttgcagcgcggcggtcgccggcctggcctggctgttgagcatgggcctgtggcagaacgtcgaccgcgcggcggacgacagtctcggcgtactggccccgaccctgttcatctacgccctgttcctgcttcccggcgaagtgctgatggccattctcagcgccatcctcaatagtcgcggcggcggtgggggaggcggcagcggcggtggcggcatcttccgcggtggcggcggctccagcggcggcggcggcgcctccggacgctggtga

SEQ ID NO: 30005 - DNA, 420 bp, Pseudomonas aeruginosa
atgtccattcgtccttcactgccgctggccgggctgctgctcgccgtcgccctgccgctctctgccgcccagccgggcgccgccaaaggcgccccactcagcggttgcgccgccaagcaggccgccatcgaggcgaagctggaaacggcccgctcgttcgccaacgaaggccaggtggccggcttggaaaaggccctctccgaggtcaaggaacactgcaccgaagccggcctgctgagggagaacaagcagaaggtgatcgacagcgagcgcgaggtcagcgaacgcgagaaggatttgcgcaaggccatgggcaagggcgatccggagaagatcgagaaacgcaaggccaagctggccgaggcccgcgccgaactggaagaggccaagaaaggcctggaacaggcccaggcgcagtag

SEQ ID NO: 30006 - DNA, 969 bp, Pseudomonas aeruginosa
atgcgtacgctgatccgcctggttcgcacgcttatcctgctgctggtcctggcgctgctcgccggcgcctggtggtggttgcaggacgaggccctgcgcccccccgcgctggccggccacagcgaggactcgagtctgaaggtcgcgggcctgcgccggcattacctgctctacgtgccgccgggcgtgtccgagggagcgccgttgctggtggtgctgcacggctcacggggcgacggcgcgcagatgcgccgcatcagcggctacggcttcgaccggctggcggcgcaagaaggtttcctggtggcctacccggacggcttcgagggccactggaacgattgccgcaaggccgccagctattcggcgcggctgcgtgacgtcgatgacgtggctttcctccgcgcgctggtggcgcggctggcccaggaataccgcgtcgattcgcagcgggtatatgtcgccggctactccaatggcggccagatggctttccgcctggccgccgaagcgccggggttgccggcggcgatcgcagcggtggcggcgagcctgccgaccacggggaacgatgcctgtcggccggtcgagcggccgaccgcggcgttgctgatcaacggcacgcgcgatccgatcaatccctatctcggcggcaaggtcagcctgttcggcttcggcgaccggggcgcggtacgctcgaccctggactcggcacgctggtgggccggcctgaacggcatcgcagcgccgccggacgtggcgccgctgacccgtcccggcccggtctggaccgagcgacagcgctggcaggaagacggccatccgccggtggagctgctcagcgtgcatggcggcggccacgtgctggcgcagccggactatcgcttcccgcggattctcggcaagagcgacccggaactggacgcgccagtggaaatctggcgcttcttcagccagttgccgcgctga

SEQ ID NO: 30007 - DNA, 1305 bp, Pseudomonas aeruginosa
atgaaactgttatggggagttctcgccgccgcgctggcggcctggggcctgacgctggccgtcgatccgccggcgagcctggacatctgggtggtgcgcaagcaggcgatcctgcttaccggggtagcgtccttcgccctgatgtcgttgatcatgctgctggcggtgcgtccggtctggctggagaagccgctggacgggctcgaccgcatgtaccgcctgcacaagtgggcgggcatcctggccatcgtcctcggcctgttgcactacctgctggagttggccggcccctggctggcgggtatcgtcggcaaaccggtgaaaggcccgcgggtggaaaccttcctcgatgtcttccgtggctcggccaaggagttgggtgaatggtcggcgtggattctcggcgggatgctgctggtcactctctggcagcgcttcccgtatcacctctggcgttatgtgcacaaggcgttggccctggtctacctggtactggccttccattccgtggtgctcgccccggccagctactggagccagccggccggttggctggtggcggcctgcgctctgctcggttcggcctgcgcactgttgtctctgagcgggcggatcggtcgcacgcgtcgccatgcgggcgtggtcaccgccgtcgagcggcacggcgaaagcctgctcgaggtgacctgccggctgcagggcgactggtcgcacagggccgggcagttcgcctttctcacctgcgaccgcctggagggtgcccatccgttcaccatcgccagcgccgaccgcggctgcggcgaggtgcgcttcagcatcaaggcgttgggcgactacacccggcgcctgcaggacaacctggaggtcggcgccagggtcgaggtggaggggccatacggctgcttcgacttccgccgtggcctggccgggcggcaggtctgggtcgccgccgggatcggcgtgacgccgttcatcgcctggctggagtcgctgcaggccgcgccggaaagcgcgccatcggtggagctgcactattgcgtgcgcaattcccaggaagcgctgttcgccgggcgcttgcgcgagctttgcgaacacctgcccagcgtgaccctgcacatccgctatagcgacgagcagggcaagccgcaggcggcgcaactgggcgtgctgaagagcgccgaaggacgctggccgagcgtctggttctgcggtccgcaggggctggccgacagcctgcgccgcgatctgcgccggcagggcatgccgctgcggctgttccaccaggaagccttccgcatgcgctga

SEQ ID NO: 30008 - DNA, 1191 bp, Pseudomonas aeruginosa
atgagcgaatattccgttttcacctccgagtccgtgtccgaaggccatccggacaagatcgcggaccagatctccgacgcggtgctggacgccatcatcgccaaggacaagtacgctcgcgtggcatgcgaaaccctggtcaagaccggcgtggcgatcatcgccggtgaagtcaccacctccgcctgggtcgacctggaagagctggtgcgcaaggtcatcatcgacatcggctacgacagctccgacgtcggcttcgatggtgccacctgcggcgtgctgaacatcatcggcaagcagtcggtggacatcaaccagggcgtcgaccgggccaagccggaagaccagggcgccggcgaccagggcctgatgttcggctacgccagcaacgagaccgacgtgctgatgccggcgccgatctgtttctcccaccgcctggtcgagcgccaggccgaggcgcgcaagtccggcctgctgccatggctgcgcccggacgccaagtcccaggtgacctgccgctacgaaggcggcaaggtggtcggcatcgatgcggtggtgctgtccacccagcacaacccggaagtctcctataacgacctgcgcgacggcgtgatggagctgatcatcaagcaggtgctgccggccgagctgctgcacaaggacacccagttccacatcaacccgaccggcaacttcgtgatcggcggcccggtcggcgactgcggcctgaccggacgcaagatcatcgtcgactcctacggcggcatggcccgccacggcggcggcgcgttctccggcaaggacccgtccaaggtcgaccgctccgccgcctacgccggccgctacgtggcgaagaacatcgtcgccgccggcctcgccgagcgttgcgagatccaggtttcctacgccatcggcgtggcccagccgacctcgatctcgatcaacaccttcggcaccggcaaggtcagcgacgagaagatcgtgcaactggtccgcgagcacttcgacctgcgcccgtacgcgatcaccaagatgctcgacctgctccacccgatgtaccagccgaccgcggcctacggccacttcggtcgtcatccgttcgagctgaccgtggacggcgataccttcaccgcgttcacctgggagaagaccgacaaggccgctctcctgcgcgacgccgccggcctctga

SEQ ID NO: 30009 - DNA, 1164 bp, Pseudomonas aeruginosa
atgaccgtgttgaagatgactgacctcgacctcaaaggtaagcgcgtgctgatccgcgaggacctcaacgtgcccgtgaaggacggccaggtgcagagcgatgcacggatcaaggccgccctgccgaccctcaagctggccctggagaagggcgcggcggtgatggtctgctcgcacctgggccgtccgaccgagggcgagttctccgccgagaacagcctgaagccggtggccgagtacctgtccaaggccctgggccgcgaagtgccgctgctggccgactacctcgacggcgtcgaggtcaaggcgggcgacctggtgctgttcgagaacgtgcgcttcaacaagggcgagaagaagaacgccgacgagctggcgcagaagtacgccgcgctgtgcgacgtgttcgtgatggatgccttcggtaccgcccaccgcgccgaggggtcgacccacggcgtggccaggttcgccaaggtcgccgccgccggcccgctgctggccgccgaactggacgcgctgggcaaggcgctgggcaacccggcgcggccgatggcggcgatcgtcgccggctccaaggtttccaccaagctcgacgtgctgaacagcctggccggcatctgcgaccaactgatcgtcggcggcggcatcgccaacaccttcctcgccgcggccggacacaaggtcggcaagtcactgtacgaggccgacctggtcgagaccgccaaggccatcgccgccaaggtcaaggtgccgctgccggtggacgtggtggtggccaaggaattcgccgagagcgccgtggcgaccgtcaaggccatcgccgaggtcgccgacgacgacatgatcctcgacatcggcccgcagaccgccgcgcagttcgccgagctgctgaagacctcgaagaccatcctgtggaacggtccggtcggggtgttcgagttcgaccagttcggcgagggcacccgtaccctggccaatgccatcgccgatagcgcggcgttctccatcgccggcggcggcgataccctggcggcgatcgacaagtacggcatcgccgagcggatctcctatatttccaccggtggcggcgcgttcctcgagttcgtcgagggcaaggtcctgccggccgtggaaatcctggagcagcgcgccaagggctga

SEQ ID NO: 30010 - DNA, 1065 bp, Pseudomonas aeruginosa
atggcactcatcagcatgcgccagatgctggatcacgccgccgaattcggctacggcgtgccggccttcaacgtcaacaacctcgagcagatgcgcgccatcatggaagcggcggacaagaccgattcgcccgtgatcgtccaggcttccgccggtgctcgcaaatacgccggcgcgcccttcctgcgccacctgatcctcgccgcgatcgaagaattcccgcacatcccggtggtcatgcaccaggatcacggcaccagtcccgacgtctgccagcgttccatccagctgggcttcagctcggtgatgatggacggctccctgcgtgaagacggcaagacccctgccgactacgactacaacgtccgtgtgacccagcagaccgtggcgttcgcccatgcctgcggcgtgtccgtggaaggcgagctgggctgcctgggttccctggaaaccggcatggccggcgaggaagacggcgtcggcgcggaaggcgtgctggaccacagccagttgctgaccgatccggaagaagccgccgacttcgtgaagaagaccaaggtcgacgccctggccatcgccatcggcaccagccacggcgcctacaagttcaccaagccgccgaccggggacaccctgtcgatccagcgcatcaaggaaatccacgcgcgcatcccggacacccacctggtgatgcacggctcttcctcggtaccgcaggactggctggcgatcatcaacgagtacggcggcgagatcaaagagacctacggcgtgccggtcgaggaaatcgtcgagggcatcaagtacggcgtgcgcaaggtgaacatcgacaccgacctgcgcctggcctccaccggtgccatccgccgcttcctggcgcagaacccgagcgagttcgacccgcgcaagtacttctccaagaccgtcgaggccatgcgcgacatctgcatcgctcgctacgaagccttcggcaccgccggcaacgcttccaagatcaagccgatctccctggaaggcatgttccagcgctacgctcgcggcgagctggatccgaaggtcaactaa

SEQ ID NO: 30011 - DNA, 1179 bp, Pseudomonas aeruginosa
gtggcaagtacagatgtgctgatcgttggcgccggggcggccgggctgatgtgtgcgatgacggcggccgggcgcgggcgccgcgtgcgggtactcgaccacgccaacaaggccggcaagaagatcctcatgtccggcggcgggcgctgcaatttcaccaacctgtacaccgagccggccaacttcctttcgcgcaacccccacttctgcaagtcggcgctggcccgctacacccagtgggacttcatcggcctggtggccaagcaccaggtgccgtaccacgagaagaaactcggccagctgttctgcgacaacaagtccagcgacatcctcgagatgctgctgcgcgaatgcgccgaggccggagcggaaatcctgctggacacctcgatcgaagagatcgcccgcgacgacgccggctaccgcctgcgtaccagcgccggcgagatgcgctgcgagtcgctggtgatcgccagcggcggcctgtcgatcccgaccctcggcgctagcggtttcggctaccaggtggcgcgccagttcggccacgaggtgctgccgacccgcgccgggctggtgccgttcaccatcaccgaccagctgaaggagctgtgcgccgagctttccggcacctccgtggattgccgggtgagctgcaacggccaggcgttccgcgagaacctgctgttcacccatcgcggcctcagcggcccggcgatgttgcagatttcctcctactggcaaccgggcgataccctggaaatcgacctgctgccggaccacgacgccagcgaatggctggcgcagcaacagcgcgagcgtcccaacagcgagctgaagaccctgctcgccgagctgttcaccaagaagctcgccggactgctggccgaccgctggttcgtctccaagccgatgaagcagtacaccccgaccgaactggcgggtatcgccgggcagctttcggcctggcgggtcacgccctcgggcaccgagggctaccgcaccgcggaagtgaccctgggcggggtgagcaccgacgaagtgtcgtcgaagaccatggagtcgcagcgctcgccggggctgtatttcgtcggcgaagtactggacgtcagcggccatctcggcggcttcaacttccagtgggcctgggcctcgggttatgcggcggggcagtacgcctag

SEQ ID NO: 30012 - DNA, 1854 bp, Pseudomonas aeruginosa
atgtccggaaaagcgcaacagcaatctcgtctgaaagagttgatcgcccgaggccgtgagcagggatacctgacttacgcggaggtcaacgaccacctgccggaggatatttccgatccggaacaggtggaagacatcatccgcatgatcaacgacatggggatcaacgtattcgagacagccccggatgcggatgccctgttgctggccgaggcggataccgacgaagccgcagcggaagaagccgcagcggccctggccgcggtggaaagcgacatcggtcgcaccaccgacccggtgcgcatgtacatgcgtgaaatgggtaccgtggaactgctgacccgcgaaggcgagatcgaaatcgccaagcgcatcgaggaaggcatccgcgaagtgatgagcgccatcgcccagttcccgggcacggtggacagcatcctggccgactacaatcgcatcgtcgccgaaggcggtcgcctctccgacgtcctcagcggctatatcgatcccgatgacggcagcctgcccgccgaagaggtggagccggtcaacctgaaggacgattccgccgactcgaaagagaaggacgacgaggaagaagaaagcgacgacagcagcgacagcgacgacgaaggcgacggcggtccggatccggaagaagcccgcctgcgtttcaccgcggtctccgagcagctcgacaaggccaagaaggccctgaagaagcacggtcgcggcagcaagcaggccaccgccgaactcaccggcctggccgagctgttcatgccgatcaagctggtgcccaagcagttcgacgccctggtcgcccgcgtgcgctccgccctggaaggcgtgcgcgcccaggaacgcgccatcatgcagctctgcgtgcgtgacgcgcgcatgccgcgtgccgacttcctgcgcctgttcccgaaccacgagaccgacgagaagtgggtcgacagcgtcctgaagagcaagccgaagtacgccgaggccatcgagcgcctgcgcgacgacatcctgcgcaaccagcagaagctggcggccctggaaagcgaggtcgagctgaccgtcgccgagatcaaggaaatcaaccgcgcgatgtcgatcggcgaagccaaggctcgccgggcgaagaaggaaatggtcgaggccaacctgcgcctggtgatttccatcgccaagaagtacaccaaccgcggcctgcaattcctcgacctgatccaggaaggcaacatcggcctgatgaaggcggtggacaagttcgaataccgtcgcggctacaagttctccacctacgccacctggtggattcgccaggcgatcacccgttcgatcgccgaccaggcacgcaccatccgcatcccggtgcacatgatcgagacgatcaacaagctcaaccgcatctcccgccagatgctccaggaaatgggtcgcgagcccaccccggaagagcttggcgagcgcatggacatgcctgaggacaagatccgcaaggtactgaagatcgccaaagagccgatctccatggaaaccccgatcggtgacgacgaagattcgcacctgggcgatttcatcgaggactccaccatgcagtcgccgatcgagatggcgaccagcgagagcctcaaggaatccacccgcgaagtcctcgccggcctcactgcccgggaagccaaggtgctgcgcatgcgcttcggcatcgacatgaacaccgaccacaccctcgaggaagtcggcaagcagttcgatgtgacccgcgagcggatccgccagatcgaagccaaggcgctgcgcaagctgcgccatccgtcgcgaagcgagcaccttcgctccttcctcgacgagtga

SEQ ID NO: 30013 - DNA, 1995 bp, Pseudomonas aeruginosa
atggccggcctgataccgcaaagcttcatcgatgacctgctgaaccgcaccgacatcgtcgaggtggtgagttcacgcatccaactgaagaaaaccggcaagaactacagcgcctgctgcccgttccacaaggaaaagactccctcgttcaccgtcagcccggacaagcagttctactactgcttcggctgcggcgccggcggcaacgcgctcggcttcgtcatggaccacgaccagctggagttcccccaggcggtcgaggaactggccaagcgcgccggcatggacgtgccgcgcgaggaacgcggcggacgcgggcacacgccgcgccagccgaccgactcgccgctctacccgctgctcagcgccgccgccgagttctacaagcaggcgctgaaaagccacccggcgcgcaaagccgcggtgaactacctgaagggccgcggcctgaccggcgagatcgcccgcgacttcggcctcggtttcgccccgcccggctgggacaacctgctcaagcacctgggtggcgacaacctgcaactcaaggccatgctcgacgccggcctgctggtggagaacagcgacaccggcaagcgctacgaccgcttccgcgatcgcgtgatgttcccgatccgcgacagccgcgggcggatcatcgccttcggcggccgggtgctcggcgacgacaagccgaagtacctgaactccccggagactccggtcttccacaagggccaggaactctacggactctacgaggcccggcagaagaatcgcgacctcgacgagatcatggtggtcgagggctacatggatgtcatcgccctggcccagcaaggcatccgcaacgcggtggcgaccctcggcacggcgaccagcgaggaacacatcaagcgcctgttccgcctggtgccgagcatcctgttctgtttcgacggcgaccaggccgggcgcaaggcggcctggcgcgccctggagtcggtgctgccgaacctgcaggacggcaagcgcgtgcgcttcctgttcctccccgagggcgaggacccggacagcctggtacgcgccgagggcgaggatgccttccgcgcacgcatcacccagcaggcccagccgctggcggagtacttcttccaacaactgatgctggaggccgaccccgccaccctggaaggcaaggcccacctggcgaccctcgccgcgccgctgctggagaagattcccgggaacaacctgcgcctgctgatgcggcaacgtctgtcggaaatcaccggcctgtccggcgaaaacatcggacaactggcgcaccacagcccgccgccgtcgtccatggaccacggagcgagcggcgtcttggacggcgacgactatttcgccgccagcgcctactacgagaacgagccctcccatgcgccgttcgacgctgcgccaggctatgtcgaggcgcaaccgcgcaagagctggaacaaggacaagaagccctgggacggcaagaagtgggatggcaagaagaagtgggacaaaggcggccgcggcgacttcaaggctccgcaacgaacgccggtcagcgtggagtccaccaccctcaacgccctgcgcaccttgctgcatcatccgcagttggccttgaaggtcgacgatgcgggcaccctcgccagggagcaggatacctacgcccagttgctggtgtccctgctggaagccctgcagaagaacccgcggcagagctcgatgcaactcatcgcgcgctggcacggcacgccccagggccgcctgctgcaggccctgggcgagaaggagtggctgatcgtccaggagaaccttgaaaagcagttcttcgacaccattactaaactctccgagagccagcgtttcggcgagcgggaggagcgtttacgcagcgtcatgcagaagagctacagtgaactgaccgatgaagagaaagccttgctcagagagcactacagtgttgccgcttcatcgccttcccagagctga

SEQ ID NO: 30014 - DNA, 450 bp, Pseudomonas aeruginosa
atgagcgaaatcaaatcccgcctcctcgacgccgtcaaggtcgccatgcgcgcccaggacaagccgcggctgaccacgttgcgcctggccctcgcggacatcaagcgcgtcgaagtcgacgaacgcatcgaggtggatgacgcccgagccctgctgatcctagaccggatgatcaagcagcgccgcgacgcccagcgccagttcagcgacgccggccgccaggacctcgccgaggtcgaggccgccgagatcctcgtgctccaggacttcatgcccaagcccctggacgaccatgagatcgacgccctgatcgagcgcagcatcgtcgacagcggcgcccagggtccgcaggacatgggcaaggcgatgaacctgctgcgaccgcaggtccagggtcgcgtcgacatggcacaggtcagtcagcgcctgaaggcgcgcctctcctcctga

SEQ ID NO: 30015 - DNA, 216 bp, Pseudomonas aeruginosa
atgccagccgtcaaagtaaaagagaacgaacccttcgacgtagccctgcgtcgtttcaagcgctcctgcgaaaaagcaggtgtactggctgaagttcgcagccgcgagttctacgagaagcccactgccgagcgcaagcgcaaggccgctgccgcagtgaagcgccacgcgaagaaagtacagcgcgaacagcgccgtcgcgagcgcctgtactga

SEQ ID NO: 30016 - DNA, 1026 bp, Pseudomonas aeruginosa
atgcgcgtgctgggactggaaacgtcctgcgacgaaaccggcgtcgccctttacgacagcgaacgcggcctgctggccgacgcgctgttcagtcagatcgacctccatcgcgtctacggcggcgtcgtgcccgagctggcctcgcgcgaccacgtcaagcgcatgctgccgctgatccgccaggtgctcgacgagtccggctgcacgccggcggatatcgacgcgatcgcctataccgccggtcccggcctggtcggcgccctgctggtgggggcttcctgtgcccaggcgatggccttcgcctggggcgtgccggcggtcggcgtgcaccacatggaagggcacctgctggcgccgatgctggaagagcagccaccgcggttcccgttcgtcgccttgctggtttccggcggtcacacccagttggtgcgggtggacggtatcggccgctaccagttgcttggcgaatcggtggacgatgccgccggcgaagccttcgacaagaccgccaagctgatcggcctgggctatcccggtggtccggaaatcgcccgcctggcggagcgcggcactcctggccgcttcgtgttcccgcggccgatgaccgatcgccccggcctggacttcagcttcagcgggctcaagacctttaccctgaacacctggcagcgttgcgtcgaggccggcgacgacagcgagcagacccgctgcgacatcgccctggcgttccagaccgcggtggtcgagaccctgctgatcaagtgccgtcgcgccttgaagcagaccggcctgaagaacctggtgatcgccggcggcgtcagcgccaaccaggcgctgcgcagcggcctggaaaagatgctcggcgaaatgaaggggcaggtgttctacgcccgcccgcgcttctgcaccgacaatggcgcgatgatcgcctacgccggctgccagcgcctgctcgccggccagcatgacggcccggcgatcagcgtccagccgcgctggccgatggagtcgctgccggcggtctga

SEQ ID NO: 30017 - DNA, 570 bp, Pseudomonas aeruginosa
atggtctggctactggcgatcctcgcctacctgctcggttccctctccttcgccgtcctgctcagccgctggttcggcacccaggacccgcgcgccagcggttccggcaaccccggcgcgaccaacatgctgcgcgtcgccgggaagaaactcgccatcctgaccctgctcggcgacgtcggcaaaggcctgttgccggtgctggtcgcccgctggctggggctcggcgtgatggaggaggcctgggtcggcatcgccgccgtgatcggccacctgtacccgctgtacttcaacttccgcggcggcaagggtgtcgccaccgccgcgggcatgctcctcggcctctatccgccggccgtactgctggccgcggcggcctggctgctgaccttcaagctgtcgcgcaccagctcgctcgcctcgctggtggccaccccgctgaccctgccgttgctggcctggcagcagcccggagcgctgctgccgatgaccgtgctgaccggcctgatcgtctggcggcaccgcgccaacttacgcgatctgttcgccggccgcgaacggcatttctaa

SEQ ID NO: 30018 - DNA, 1233 bp, Pseudomonas aeruginosa
atgcagatttacaaggtcggcggcgccgtgcgcgatcgccttctcggccgtccggtcaccgatatcgactgggtggtggtcggtgccagcagcgacgagatgctcgcccgcggctaccgcccggtgggcgccgacttcccggtcttccttcatccgcagagcggcgaggaatacgccctggcgcgcactgagcgaaagagcgggcgcggctacggcggcttcaccttccatgccagccccgaggtgaccctggaggaagacctgactcgccgtgacctgaccatcaacgccatggccgaggacgaacagggccgggtaatagacccctacggcggccaggccgacctcgaggcgcgcctgctgcgccacgtttccccggcgttcgccgaggatcccctgcgggtcctgcgcgtagcgcgcttcgccgcccgctacgccggcctgggcttccgggtcgccgccgaaaccctcgccctgatgcgccaactggcggaatccggcgagttgcaggcgctgaccccggagcgcagttggaaggaaatttcccgagccctgatggaacccaaccccgaggtcttcatccaggtcctgcacgactgcggcgccctggccgaactgatcccagaagtcgaggcgctattcggcgtaccgcagccggcggcccaccatccggaaatcgataccggcgtccatgtcctgtcggtattgcagcaatgcgcccgccaccggcagccgctcagcgtacgctgggcctgcctgctgcacgacctgggcaagggactcaccagcgaagcggactggccccgccatatcgcccacgaggctcgcggcgtgccgttgatcgatgcggtgaaccagcgcttcagggtgccgcgcgagtgccaggaactggcgcgcctggtgggcgagtaccacacccacgcccatcgggcgctggagctgcgcccgaatacactgctggagctgttgcagagcttcgacgtgtatcgccgcccgcagcgtttcgaggagttcgtcgccgccagcgagatggacgcgcgcggccgcctcggcctggaacagcgggactatccgcaggccgcctacttgctcggcgcggcgcaggcagcgcgggcagtcagcgtgaagccgctggtggaaaagggcttgaagggcgcggaactgggcgaggcgctgaagcgtgcgcgcctcgccgcactcaaggcctacaaggaagaacgcggaaaggcctga

SEQ ID NO: 30019 - DNA, 1554 bp, Pseudomonas aeruginosa
atgagcaagcgccagcccatcgccaccggctcggaatggaccttcgagctgatccagcagtacgaccgggaaatcagcaggatcgccgagcgctatgccctggatacctatccgaaccagatcgaggtgatcaccgccgagcagatgatggacgcctacgcctcggtgggcatgccgatcggctataaccactggtcctacggcaagcacttcctcagtacggaaaagaactacaagcgtggccagatgggcctggcctacgagatcgtgatcaactccgatccctgcatcgcctacctgatggaggaaaacacccagtgcatgcaggcgctggtgatcgcccacgcctgctacgggcacaacagtttcttcaagggcaactacctgttccgcacctggaccgatgccagttcgatcatcgattacctggtgttcgccaagcagtacatcatgcagtgcgaggagcgctacgggatcgacgcggtggaagacctgctcgactcctgccacgccctgatgaactacggtgtcgaccgctacaagcgtccctacccgatttccgcggaagaggagcggcagcggcagaaggagcgcgaggaactgatccagcgccaggtcaatgacctctggcggaccatcccgcgcgtcggcggcaaggacaaggaacaatccatggcgcgctatccgagcgagccgcaggagaacatcctctacttcatcgagaagaacgcgccgcttctggagccctggcagcgcgaggtgatccgcatcgtgcgcaagatcgcccagtatttctacccgcaacgccagacccaggtgatgaacgaaggctgggcgaccttctggcactacacgctgctcaacgacctctacgacgaaggcctggtcaacgacggcttcatgatggagttcctgcaataccacaccagcgtggtctaccagccgtccttcgacagcccctattacagcggcatcaacccctacgccctgggcttcgccatgtaccgcgacatccgccgcatctgcgaggaacctaccgacgaggaccgccgctggttcccggatatcgccggcagcgactggctggccacgctgaagttcgccatgaagagcttcaaggacgaaagcttcatcctgcagttcctctcgcccaaggtgattcgcgacctgaagctgttcagcattctcgacgacgaccagaaggacgacctgctggtcgcggcgatccacgacgaagccggctaccgcaccatccgcgagaccctggcggcgcagtacaacctcggcaaccgcgagccgaacatccagatctggaacgtcgaccgtcgcggcgaccgctcgctgaccctgcgccaccagcagttcgaccgccagccgctgagcgactccaccgccgacgtgctcaagcacctgcatcgcttgtggggcttcgatatccacctggagaccctgcagggcgaccagctcgtgcagacccaccacatgccgcccaagggcgccagcgagggcgaggaaggctacccgcgtttggacctgatcatcccgcccatttga

SEQ ID NO: 30020 - DNA, 1272 bp, Pseudomonas aeruginosa
atgagctacgtcatcgaccggcgtctgaacggcaagaacaagagcacggtgaaccgccagcgcttcctgaggcgctaccgtgaacacatcaagaaggccgtcgaggaggccgtcagccggcgttccattaccgacatggagcacggcgagcagatcagcattcccgggcgcgatatcgacgaaccggtgctgcaccatggccgtggcgggcggcagaccgtcgtccaccccggcaacaaggaattcaccgccggcgagcacatcgcccgtccatccggcggcgggggcggccgcggcggcggcaaggccagcaacagcggcgaaggcatggacgacttcgtcttccagatcacccaggaggaattcctcgacttcatgttcgaggacctggagctgcccaacctggtcaagcgccacatcaccggcaccgacaccttcaagaccgtccgcgccggcatcagcaacgacggcaacccgtcgcgcatcaacatcgtccgcaccctgcgctcggcccatgcgcggcgcatcgcgctgtccggcggcagccgggccaagctgcgcgcggcgctgaaggaactggagcggatcaagcgcgaagagccggacaacctcggcgatatccaggaactcgagctggaaatcgccaagctccgcgcgcgcatcgaccgggtgccgttcctcgataccttcgatctcaagtacaacctgctggtcaagcagcccaaccccacctccaaggcggtgatgttctgcctgatggacgtctccggctcgatgacccaggcgaccaaggacatcgccaagcgcttcttcatcctgctctacctgttcctcaagcggaactacgagaagatcgaagtggtgttcatccgccaccacaccagcgcccgcgaggtcgacgaggaggagttcttctactcccgcgagaccggcggcaccatcgtctccagcgcgctgaagatgatgcaggagatcatggccgagcgttatccgacccatgagtggaacatctacgccgcccaggcctcggacggcgacaactggaacgacgactcgccggtgtgccgggacatcctcctcaagcagatcatgccgttcgtccagtactacacctacgtcgagatcaccccgcgcgaacaccaggccctgtggttcgagtacgagcgcgtgcgcgaagccttcgaagacagcttcgcccagcagcagatcgtctcggcatcggacatctacccggtgttccgcgagctgttccagaggaggctcgtcgcatga

SEQ ID NO: 30021 - DNA, 807 bp, Pseudomonas aeruginosa
atgtccgagctttaccaacaccgcgcgcgcaagcgcttcggccagaacttcctgcacgatgccggggtgattcaccgcatcctccgtgccatccatgcccgcgagggtcagcgcctgctggagatcggcccgggccagggcgccctgaccgagggactgctgggcagcggcgcacgcctggacgtgatcgagctcgaccaggacctgatccctctgttgaagctgaaattcggcctcgagtcgcgcttcagcctgcaccagggcgacgccctcaagttcgatttcgcctcgctggtggagagcggcgagaagctgcgagtggtcggcaacctgccctacaacatctccacgccactgatcttccatctgctggagcacgcgccggtgatcgaggacatgcacttcatgctgcagaaggaagtggtcgagcgcctggcggccacgccgggcggcggagactggggccggctctcgatcatggtccagtatcactgtcgggtggagcacctgttcaacgtcggccccggcgcgttcaacccgccgcccaaggtcgactcggccatcgtccgtctcacccccttcgccgagccgccccatccggcacgcgatccgaaactgctcgaacgggtggtccgcgaggccttcaaccagcgccgcaagaccctgcgcaacaccctcaagcctctcctgagcgtcgaggacatcgaggccgcagaggtcgatccgacccttcgtcccgaacaactcgacctggccgcattcgtccgcctggccaaccagctggccgagctgccaggcaatcgttag

SEQ ID NO: 30022 - DNA, 837 bp, Pseudomonas aeruginosa
gtgagtgtgccgacggttctgcagaagatcctcgcccgcaaggccgaggaggtcgccgagcgccgtgcgcgcgtcaacctggcagaggtcgagcggctggcgcgtagcgccgatgcgccgcgcggcttcgccaatgccctgctggagcgggccaagcgcaaggagccggcagtgatcgccgagatcaagaaggcatcgccgagcaagggcgtgctgcgcgaacacttcgtcccggcggagatcgcccgcagctacgaggcgggtggcgcggcgtgcctgtcggtgctcaccgacgtggacttcttccagggcgccgatgcctatctgaaggaagcgcgggccgcctgtgcgctgccggtgatccgcaaggacttcatgatcgatccgtaccagatcgtcgaggcgcgggcgatcggtgccgactgcatcctgctgatcgtctcggcgctggacgacgtgctgatggccgaactggcggcgactgccaagtcggtcggtctcgacgtactggtcgaagtgcatgacggcaccgagctggaacgtgcactgaagaccctggacacgccgttggtgggcatcaacaaccgcaacctgcacaccttcgaggtgagcctggaaaccaccctcgacctgttgccggaaattccccgcgaccgcctggtggtcaccgagagcggtattctcaaccgggccgacgtggagctgatggaagtcagcgaggtctacgccttcctggttggcgaggcgttcatgcgggccgacgatcctggcctcgagctgaagcgcctgttcttccaggagcgtggtgctgtggtgctgggcgccgatcctgactga

SEQ ID NO: 30023 - DNA, 900 bp, Pseudomonas aeruginosa
atgattgaagaagccacttccagcaagcactcaggcacgacggacgccccgctggtatccgtcgtagcgccctgcttcaacgcggaaaagtacctggaagaagccctgcgcagcatctacgagcaggactacccgaatttcgaagtgatcatcgtcgacgacggttccaccgacaacagctacgccatgctggagcagttgcagaaagtccacggtttccagctctaccgccagcagaaccagggcgtcagcgcagcgctgaacttcggcctgcgacacgcccgcggcgactacgtagccacgccggacctggacgacatcatgctgccgcactcgttgagcgtgcgcgccgcgtacctcgaccagcacccggaagtcggctgcgtcggcgccctggtgatctacatcgacagcgaaggccaggaaaccaagcggcagaacggcaatcgcatccgccagctggacttcgactacctgctcggcaacgcctacgtctgcggcgccccggtgtccctgtaccgcatggaggccctgcgcgcagccggcttctacgatcccgagatcaaggtgcaggacttccagatgaccctgcgcatcgccagccagggctaccagatccacaagctgccggtactggtcacccgctaccggcgccaccccgacaacctgtcgcggcgctacaaggtgctgctcgatgccgacctgcgcaccatcgccccctaccagtcgcatcccgcctacgagcgcggccgcacggagctggtcaacaaggccctgaaatacgccgtggtcgcggacaagcggcatgcctggcaactgctccgctcgctgccgctgcggcagtggaaccgcaccaccttccgccggttgaagcgcttccttctccatcacgagagctga

SEQ ID NO: 30024 - DNA, 693 bp, Pseudomonas aeruginosa
atgcgcctggaccgcttcctcgccaacctgcccgaactcagccgccgcgacgcgcagatgctgatcgccggtggacacttgcgcgtggacggccaggtggtgcgcgacggcacccacgaggtgcgggtgttcagccgggtggaactggacgagcggctgctccaggctggcaagccggcgcgctactacatgctgcacaaaccgatgggctgcgtcagcgccacccgcgacccgcaacacccgaccgtcctcgacctgttcccggaagacctgcgcgacgacctacacattggcggtcgtctcgactacaacaccaccggcctgatgctgctgaccaacgatggccagtggtcgcgccgcctgaccctgccgggcagccggcgcgacaaggtctactacgtggaaaccgaggcgcccatcgaccaacgctacgtggatgccttcgccgccggcctccacttccgcttcgaagacctggtcaccctccccgcgcagctcgaaccgatcggcccacgctgcgcccgcctgaccctgcacgaaggccgctatcaccaggtcaagcgcatgttcggccacttcgacaacaaggtgctgcgcctgcaccgcgagcgcatgggcgatatttgtctcgacccgcagttgccgccgggtgcctggcgccccctgaatgctgaagaaatctgttcggtgtga

SEQ ID NO: 30025 - DNA, 945 bp, Pseudomonas aeruginosa
atggccgaccccgctttccacaccccgctagtccatgaaggcatcctcgccgtccgcggccctgacgccgccaagttcctccagggccagctgacctgcaacctcgcctacctcaacgacgagacctccagcctcggcggccgctgcaacatcaagggccgcctgctatcgagcttccgcatcctgcccgagggcgacggcctgctgctggcgatggccggcgagctgctcgaggcccagttggcggacctgaagaaatacgccgtattctccaaggccagccttgccgacgagagcgcagcctggctccgcataggcttgcgcgacgccagcgaggcactgcgcgccctggggatagacaccccggcggagagcggcaggatcgcccgccacggcgacctgctcgccgtcgccctgggcgacggccgcgtcgagctatgggttccggcgcagcgcgccgaggcggtgcttgccacgctccgcgagcacagccgcgaggcgccgctcgacgattggctgctcggccaggtgcgcgcaggcatcggccaggtgttcggcgctacccgcgagctgttcatcccacagatgatcaacctgcaggcggtcggcggggtcagcttcaagaagggctgctataccggccaggaaatcgtcgcccgcatgcagtatctcggccgcctcaagcgccgcctgtatcgcctggcgctggacgcagacgaggtgccggcgcccggcaccgggctgttctcgccagtccattccaccagcgtcggcgaagtggtactggccgcccgtacgccggagaacagcgtggaattgctcgccgtgctgcaagacgacgccgtcgccgacggccggatcagcctcggaagcgccgaaggagcgccgctcgtcctcctcaatctgccttacacgctggacagcgaccgcgaaatccagcgctga

SEQ ID NO: 30026 - DNA, 255 bp, Pseudomonas aeruginosa
atggcagatgaaaccgaactgaaacgactctactggcacagccgtcgcggcatgctggaactggatgtgctgctggtgcctttcgtgcaggaggtttacccgggcctggacgccgaggaccaggcgcgcttccgcaagctgctggagtgcgaggaccaggacatgttcggttggttcatgcagcgcggcgagccggaagacgccgacctgcggcggatggtgcggatgatcctggaccgtgtccagccggattga

SEQ ID NO: 30027 - DNA, 1425 bp, Pseudomonas aeruginosa
atgcataccctaaaacgctgtatggctgcgatggtggccttgctggccttgagcctggcgatgacggcccgggcagaactgccggacttcacgcctttggtcgaacaggcgtcgccggcggtggtgaatatcagtacgcggcagaagctgccggatcgcgccatggcgcgcgggcagctgtcgatccccgacctcgaagggctgccgccgatgttccgcgacttcctcgagcgcagcatcccgcaggttccgcgcaatccgcgcgggcagcagcgcgaggcgcaatcgctgggttccggcttcatcatctccaacgacggctacatcctcaccaacaatcacgtcgtggccgatgccgacgagatcctggtgcgcctgtccgaccgtagcgagcacaaggccaagttgatcggcgcggacccgcgcagcgacgtggcggtgctgaagatcgaggcgaagaacctgccgaccctgaaactgggcgattcgaacaagctgaaagtgggcgaatgggtcctggccatcggttcgccgttcggcttcgatcactcggtcaccgccggtatcgtcagtgccaagggtcgtagcctgccgaacgagagctacgtacccttcatccagaccgacgtggcgatcaacccgggtaactccggcggtccgctgctgaacctgcagggcgaagtggtcggcatcaactcgcagatcttcacccgttccggcggcttcatgggcctgtccttcgccattccgatcgatgtcgcgctgaacgtcgccgaccagttgaagaaagccggcaaggtcagtcgcggctggctgggcgtggtgatccaggaagtgaacaaggatctcgccgagtccttcggcctcgacaagccgtccggcgcgctggtggcgcaactggtggaagacggcccggcggccaagggtggcctgcaggtgggcgatgtgatcctcagcctgaacggccagtcgatcaacgagtccgccgacctgccgcacctggtgggcaacatgaagccgggcgacaagatcaacctggacgtgattcgcaacggccagcgcaagtccctgagcatggcggtaggcagccttccggacgacgacgaggaaatcgcctcgatgggcgctccgggcgccgagcgcagcagcaaccgcctgggcgtgaccgtcgccgacctgaccgccgagcagcgcaagagcctggatatccagggcggcgtggtgatcaaggaagtccaggacggtccggccgcggtcatcggcctgcgtccgggcgatgtcatcacccacctggacaacaaggcggtgacctcgaccaaggtcttcgccgacgtggccaaggccctgccgaagaaccgttcggtttcgatgcgggtgctgcgccagggacgcgccagcttcattaccttcaagctggccgaataa

SEQ ID NO: 30028 - DNA, 855 bp, Pseudomonas aeruginosa
atgacactcaatttcccgttgttgctggtcatcgccgtggctgtatgcggcgccctggccctggtcgacctggtgctgttcgcgccgcgtcggcgggccgcgatctcttcctacgaagggcaggtgaacgagcccgatccggcagtgctggagaagctcaacaaggaaccgctgctggtggagtacggcaagtcgttcttcccggtgctgttcatcgtgctggtgctgcgttccttcctggtcgagccgttccagattccctcggggtcgatgaaacctaccctcgaggtcggcgatttcatcctggtcaacaagttcgcctacggtatccgcctgccggtgctggacaccaaggtgatcccgatcggtgatccgcagcgcggcgatgtcatggtgttccgctatcccagcgaaccgaacatcaactacatcaagcgcgtggtcggcctgcccggcgacaccgtgcgctacaccaaggaaaagcgcctgtacgtcaacggcgagctggtggcggagaaactggtcggcgaggaaccgggcaccctgggcagcgtgaccctgtaccaggagaagctgggccaggccgagcacctgatccgcaaggaaatgagccgctatcgcatcgagcccgaccgccagtggaccattcccgccggccactacttcatgatgggcgacaaccgcgacaactccaacgacagccgctactggaacgatccgaagatccccaaggatctgctgggcatggttccggaccgcaatatcgtcggcaaggccttcgccgtgtggatgagctggcccgatccgaagatgagcaacctgccgaacttctcccgggtcggcgtgattcactga

SEQ ID NO: 30029 - DNA, 918 bp, Pseudomonas aeruginosa
atgactgacatgcacgacgacatccccgccggcagccgttgcggctacgtggcgatcgtggggcgccccaatgtgggcaagtccaccctgctcaaccacatcctcgggcagaagctggcgatcacctcgcgcaagccgcagaccacccgccacaacatgctcgggatcaagaccgagggcgaggtgcaggccgtctacgtcgatacgcccggcctgcacaagagcggcgagaaggccctcaaccgctacatgaaccgtaccgccagcgcggcattgaaggatgtcgacgtggtgatcttcgtggtcgaccgcacccgctggaccgaagaggaccagatggtcctggagcgcgtgcagtacgtcagttgcccggtgctgatcgcggtgaacaagaccgaccgcatcgaggaaaaggccgacctgctgccgcacctcgaatggctcacccagcagttgccgaaggccgaggtagtaccgatctcggcgcagcacgggaccaacctggacgtgctggagaagctggtcgccgagcgtctgccggaaagcgagcacttcttccccgaagaccagatcaccgaccgcagcagccgcttcctggccgccgagctggtccgcgagaagatcatgcgccagctcggcgccgagctgccctaccagatcaccgtggagatcgaggagttcaagcaggaaggtcgcatcctgcatatccatgcgctgatcctggtggagcgcgaggggcagaagaagatcatcatcggcgacaagggcgagcggatcaaaagcatcggccagaacgcgcgcaaagacatggaagtgctgttcgactccaaggtcatgctcaacctctgggtcaaggtcaagggcggctggtccgacgacgagcgtgccctgcgctcgctgggctacggcgacctctga

SEQ ID NO: 30030 - DNA, 1128 bp, Pseudomonas aeruginosa
atggctgaagcaaaagtactgagtggcgccggcctgcgtggccaggtggccggtcagacagccctgtccaccgtcggccaggaaggcgccggcctgacctaccgtggctacgacgtccgcgacctggcggcggcggcgatcttcgaggaagtcgcctacctgctgctctacggcgaactgccgaacaagcaacagctcgacgcctacctgaagaagctccagggccagcgcgacctgccgcaggcgctgaaggaagttctcgaacggattcccaaggacgcccacccgatggacgtgatgcgcactggcgcctcggtcctcggcaccctggaaccggagctgagcttcgaccagcagcgcgacgtcgccgaccgcctgctcgccgccttcccggcgatcatgacctactggtaccgcttcacccacgaaggccagcgcatcgactgcaacagcgacgagccgaccatcggcgggcacttcctcgccctgctccacggcaagaagcccagcgagctgcacgtgaaggtgatgaacgtctcgctgatcctctacgccgagcatgagttcaacgcatccaccttcaccgcgcgggtttgcgcctcgaccctgtccgacctctactcctgcgtcaccggcgccatcggctcgctgcgcggcccgctgcacggcggcgccaacgaggcggcgatggaactgatcgaacgcttctcttcgccgcaggaagccaccgccgagctgctgaagatgctcgagcgcaaggacaagatcatgggcttcgggcatgccatctacaaggattccgacccacgcaacgaagtgatcaagggttggtcgaagcagctcgccgacgaggtcggcgacaaggtcctgttcgcggtttccgaggccatcgacaagaccatgtgggagcagaagaagctgttccccaacgccgacttctaccacgcctcggcgtatcacttcatgggcatcccgaccaagctgttcacgccgatcttcgtctgctcgcggaccagcggctggaccgcccacgtcttcgaacagcgcgccaacaaccgcatcatccgcccgagcgccgagtacaccggcgtcgaacagcgtgcgttcgtgccgctggagcaacgctga

SEQ ID NO: 30031 - DNA, 723 bp, Pseudomonas aeruginosa
atgacccagaacccgccccctctcgagattgcccatgacgacggagagaccttgtcggaacacgtcttccgcaagatccagagcgccatcgtcagcggcgagatcgcgccgggcagcaagatctccgagccggagctggcgcgcacctacggcatcagccgcggcccgctgcgcgaggcgatccaccgcctggaaggcctgcgcctgctggtgcgggtgccgcatgtcggggcgcgggtggtgtcgctgagccacgccgagctgatcgagctctacgagatccgcgagtccctggaaggcatggcctgccgactggccgccgagcgcatgagccaggccgagatcgacgagttgcgccgagtgctcgacacccacgagcgcgacgaggcgttccaggccgggcgcggctattaccagcaggaaggcgactacgacttccactaccggatcatccagggcagcggcaacgccactctcacccgcatgctctgcggcgagctctaccaactggtgcggatgtaccgcatccagtactcgaccacgccgaaccggccgcgccaggccttcgccgaacaccaccgcattctcgacgccatcgccgaccgtgacggcgaactggccgagctgctgatgcgccgccacatcagtgcgtcgcgccgcaatatcgagcgccagctggaaccccagccggcgaagctcgcctccgcttcctccaccgtctaa

SEQ ID NO: 30032 - DNA, 294 bp, Pseudomonas aeruginosa
gtggcaccttgtccgggcaaaaccgtcaccgcacagtccccttccaccttcatccccctgcgacgcacctcgcaatgcaaccagcatcccggctgcgccaccctctacctggactgcagcgcagccagcgaagatctgttcgacaccgcccgcacccgtctggagtcggcgatcggaacgctgagcgtcctcgacctgctcgacgaaaccgaagaacccggtgaaagcacctgccgcatcaccggctccttgctgtcgctgttcgaggcggaatacgcacgcagacaccgataa

SEQ ID NO: 30033 - DNA, 2115 bp, Pseudomonas aeruginosa
atgcataccttcttcatcgccccgaccggtttcggcgtcggcctcacctcgatcagcctcggcctgcttcgcgccctggaacgcgccgggctgaaggtcggcttcttcaaacccatcgcccaactgcatcccggcgacctcggcccggagcgctccagcgaactggtggcgcgcacccacggcctggatacgccgaagccgctgccgctggcccaggtcgagcgcatgctcggcgacggccaactggacgaactgctcgaagagatcatcagcctctaccagcgcgccgccgccgacaaggacgtggtgatcgtcgaaggcatggtaccgacccgtcacgccagctacgccgcgcgggtcaacttccacctggcaaagagtctcgacgccgaggtgatcctggtctccgcgccggaaaacgagacgctcaccgaactgaccgaccgtatcgagatccaggcccagctgttcggcggcccgcgcgatccgaaggtgctcggggtgatcctcaacaaggtccgcggcgaggccgacgcggccaacgccgaggacggcgtggcggacttcgcccggcgcctcaccgaacactcgccgctgctgcgcgacgacttccgcctgatcggctgcattccctggcaggacgaactcaacgccgcgcgcacccgcgacatcgccgacctgctcagcgcacgggtgatcaacgccggcgactatgagcagcgccgggtgcagaagatcgtgctatgcgcccgcgccgtgcccaacaccgtgcaactgctcaagcccggcgtgctggtggtgacccccggcgaccgcgacgacatcatcctcgccgccagcctggccgcgatgaacggcgtacccttggccggcctgctgctgtgcagcgacttcccgcccgacccgcggatcatggaactctgccgcggcgccctgcagggcggcctgccggtgctgtcggtggccaccggctcctacgacaccgcgaccaacctgaaccggatgaacaaggaaatcccggtggacgaccgcgagcgcgccgagcgggtcaccgagttcgtcgccgggcacatcgatttcgaatggctcaagcagcgctgcggcacgccgcgcgagctgcgcctgtcgccgccggcgttccgctaccaggtggtgcaacgcgcgcagaaggccggcaagcgcatcgtcctgcccgagggcagcgagccgcgcaccgtacaggcggcggcgatctgccaggcgcgcggcatcgcccgctgcgtgctgctggccaagccggaagaggtccaggcggtggcccaggcccagggcatcgtgctaccggaaggcctggagatcatcgaccctgacctggtgcggcagcgctacgtcgaaccgatggtcgagctgcgcaagggcaaggggctgaacgcgccgatggcggagcagcaactggaggacagcgtggtcctggcgaccatgatgcttgccctggacgaggtcgacggcctggtctccggcgccatccacaccaccgccagcaccatccgcccggcgctgcaactgatcaagaccgcgcccggctacaacctggtgtcgtcagtgtttttcatgttgttaccggaccaggtgctggtctacggcgattgcgcggtgaatcccgatccttcggccagtgacctggccgagatcgccgtgcagagtgccgcgtcggcgcaggctttcggcatcccggcacgggtcgcgatgatcagctactccaccggcgactccggttccggggtggatgtcgacaaggttcgcgaggccacccgcctggcgcgcgagcagcgccccgacctgttgatcgacggacccttgcagtatgatgccgccgccatcgccagcgtcggccgccagaaggcgccgaacagcccggtggccgggcaggccacggtgttcatcttccccgacctgaacaccggcaacaccacctacaaggcggtgcagcgcagcgccgattgcgtcagcgtcgggccgatgctgcaaggcctgcgcaaaccggtgaacgacctgtcgcgcggcgcgctggtggaagacatcgtctacaccatcgccctcaccgccatccaggcggacgcccaggccccggcctga

SEQ ID NO: 30034 - DNA, 1221 bp, Pseudomonas aeruginosa
atgagcagacctctaagcatcgccctgatcagcgaaacctacccaccggaagtcaacggcgtcgccaataccctgggtcgcctgcatgccggtctccagcagcttggccatcgggtccaggtggtgcgcccgcgccagcccggcgacgacggccggcgcagcgacgccgagctggtgctgacccgcggctggccgttgcccggctaccccggcctgcaatggggcatgtcgagcctgcacaagctgctgcgctgctggaagcgccagcgcccggacgtgctctacatcgccaccgaaggcccgctcggcttctccgccctgcgcgccgcgcggcgcctgggcatcccggcggtcagcggtttccacaccaacttccagcagtacagcgagcactacggcttcggcccgctgacccggctggtcaccggctacctgcgctggttccacaaccgcacgcagatgaccctggtgcccagcggcagccagcgcatggaattgcaacggcgcggtttcgaacgcctcaacctgctctcccgcggggtcgacagccaactcttccatccctcccggcgcgatcccgaactacgccggcgctggggcctgggcgaacaggacatcgccgtactgcacgtcggccggctggcggcggagaagaacctcggcctgctcggcggcaccttccgcgcgctctgcgccgcccatccgcagctgaagctgcgcctggtactggtgggcgacgggccggagcgcaagcacctcgaacgggacctgcccgaagcgctgttctgcggcgtccagcgcggcgaaaccctggccgcccactacgcctcgggcgacctgttcctcttcccaagcctgtcggagaccttcggcaacgtggtcctcgaagcccaggccgccggtctcgcggtggtcgccttcgaccaggccgccgccggccagcacatccgccatgggcacaacggcgtgctcgccgcgccgggcgacaagagcggcttcgtcgaagtcgccagttggctgctggacgaccaggaacgcctgcgccgggtccgtctcaacgcccgccaacacgccagccggcaaggttgggacagtatcgtcgagcacttccagaactacctggaagacgcctgcgccagtccgctggtccagcccgctcggtcgaagcccgagcggccgccggcagaggatggcggggccttgccacgcagccgcgagtag

SEQ ID NO: 30035 - DNA, 939 bp, Pseudomonas aeruginosa
atgacatccatcgtcgtggcggcgctgtacaagttcgtgactctcgacgattacgtggcgctgcgtgaacccctgctgcaaaccctgctcgacaacggtgtgaaaggcaccttgctgctggccgaggaaggcatcaacggcaccgtctccggtagccgcgaaggcatcgatgcgctgttcgcctggctgcgcagcgatccccggctggccgatatcgagcacaaggagtcctactgcgacgaacagccgttctaccgcaccaaggtcaagctgaagaaggaaatcgtcaccctcggcgtgcctggcgtcgatccgaacaagcaggtcggccagtatgtcgaggcgaaggactggaatgccctgatcagcgatccggaagtcctgctgatcgatacccgcaacgactacgaggtggcgatcggcaccttcgagggcgcggtcgatccgaagaccaggtcgttccgcgagttccccgagtacatcaaggcccactacgacccggcgcggcacaagaaggtggcgatgttctgcaccggcggcatccgctgcgagaaggcttccagctacatgctcggcgccggtttcgaggaggtcttccacctcaagggcggcatcctcaagtacctcgaagaggtgccgcaggaacagagcctgtggcgcggcgactgcttcgtattcgacaaccgcgtgaccgtgcgccacgatcttagcgagggcgagtacgatcagtgccacgcctgccgcaacccggtttcgctggaggaccgccagtccgagcactacgtgcccggcatcagctgtccgcactgctgggactcgctgagcgagaagacccgcgccggcgctcgcgagcggcagaaacagatcgaactggcgcggcagcgcaaccagccgcacccgctcggtcgcgatccgcgccagtccacgctggagaactga

SEQ ID NO: 30036 - DNA, 828 bp, Pseudomonas aeruginosa
atgaaccgacagatcgtgcgcagcgcgctgttcgtcccggcgacccgcccggagcggatccccaaggcccttgccagcggcgccgaccgggtcatcgtcgacctcgaggatgcggtggaggaggggctgaaggtcgaggcgcgggccaatctccggcgtttcctcgtcgatacgccggaagcccgggtgctggtgcggatcaacgcggcggagcatcccgggcatgccgacgacctggcgctgtgccgcgaccacgccggagtgatcggcctgctcctgccgaaagtggagagcgccgcccaggtgcgccacgccgccgtggccagcggcaagccggtctggcccatcgtcgagagtgcccgcggccttgccgcgctgggcgagatcgccgccgccgcgggggtcgagcggctgtccttcggcagcctcgacctggccctggacctcgatctcaacagcggcagcaacgcagccgaacagattctcggtcacgcccgttacgcactgctcctgcaaacgcgcctggcaggcctggcgccgccgctggacggcgtctatccggcgatccagaaccgtgccggactggtcgaggcagtgcgcttcgctcgcgacatgggcttcggcgggttgctgtgcatccatccgagccaggtcgagccgatccaccagacattgatgccgagtcccgcggaactggagtgggcgcgtcgggtggcagaggccggcgcctccggtgccggcgtcttcgtggtcgacggcgagatggtcgacgcgccggtgctggggcgcgcgcgacgcctgctggagcgggccggggagggtggctga

SEQ ID NO: 30037 - DNA, 996 bp, Pseudomonas aeruginosa
atgttcaagacgatggtacgggcgctgttgtgcgccctggcgatcggtggctcctgcctggcgaatgccgcgcagccgatcgtcatcaagttctcccacgtggtcgcggaaaacacgcccaaaggccagggcgcgctgctgttcaagaaactcgtcgaacagcgcctgggcggccgggtcgaggtagacgtctatcccaactcgtcgctgttcggcgacggcaaggaaatggaggcgctgctgctgggcgacgtgcagatgctggcgccgtccctggccaagttcgagcagtacacgcgcaaggtgcagatcttcgacctgccgttcctcttcgacgacatccaggcggtcgaccgcttccagcgcagcccgcaggggcgcgccttgctgaccagcatgcagggcaagggcatcctcggcctggcctactggcacaacgggatgaagcagctctccgccaatcgcccgttgctggagccggaagacgcgcgcgggctgaaattccgcgtgcaggcgtccgacgtgctcaacgagcagttccgccagctccgcgcgatctcccggaagatgtccttcgccgaggtctaccagggcttgcagaccggcgtggtgaatggcaccgagaacacctggtcgaactacgagagccagaaggtcaacgaggtacagaagtatttcaccgagtccaaccacggcttggtggactacatggtgatcaccaacgcgaagttctggaatggccttccggcggacatccgcgaagaactgcagcggatcatggacgaggtcaccgtgcaggtgaacctcgaggccgagcgcctcaaccgcgacgcccgccagcgcatcctcgccagtggcgccagcgagatccataccctgagcccgcagcagcgcgccgactggcgccaggcgatgcagccggtatggcagaaattccgcggcaatgtcggtgccgatctgctccaggccgccgaagcttccaaccgtcccgattga

SEQ ID NO: 30038 - DNA, 1221 bp, Pseudomonas aeruginosa
atgtccgctccccatgcgcaggtagaacgtgccgatttcgaccggtatatggtccccaactacgcccccgccgccttcattccggtgcgaggcgagggatcgcgcgtctgggaccagagcggccgcgaactgatcgatttcgccggcggcatcgccgtgacctccctgggccacgcgcatccggcgctggtcaaggcgctcaccgagcaggcccagcgcatctggcacgtttccaacgtcttcactaacgagccggccctgcgcctggcgcgcaagctggtggacgccaccttcgccgagcgggtgttcctcgccaattccggcgccgaagccaacgaggcggccttcaagctggctcgccgctacgccaacgatgtctacggcccgcagaagtacgagatcatcgccgccagcaacagcttccacgggcgcaccctgttcaccgtcaacgtcggcggccagccgaagtattccgatggcttcgggcccaagttcgagggtatcacccacgttccctacaacgacctggaagcgctgaaggcggcgatctccgacaagacctgcgccgtggtgctggaaccgatccagggcgagggcggcgtgctgccggcgcagcaggcctacctggaaggggcgcgcaagctgtgcgacgagcacaacgcgctgctggtcttcgacgaggtccagagcggcatgggccgggtcggcgagctgttcgcctacatgcactacggcgtggtcccggacatcctctccagcgccaagagcctgggcggcggcttccctatcggtgcgatgctgaccaccggcgagatcgccaagcacctgtcggtcggcacccacggcaccacctacggcggcaacccgctggcgtcggcggtggccgaggcggcgctggacgtgatcaataccccggaagtgctggatggcgtgaaggccaagcatgagcgcttcaagtcccgcctgcagaagatcggccaggagtacggcatcttcgacgagatccgcggcatgggcctgctgatcggcgcggcgctgaccgacgagtggaagggcaaggccagggatgtgctcaacgccgccgagaaagaggcggtcatggtgctccaggccagcccggacgtggtgcgcttcgcgccgagcctggtgatcgacgacgccgagatcgacgaaggcctggagcgcttcgagcgcgccgtggccaagctggtccgcggctga

SEQ ID NO: 30039 - DNA, 1467 bp, Pseudomonas aeruginosa
atgatgagtacccattacattgccggccagtggctggcgggccagggcgagaccctggagtccctcgacccggttggccagggcgtggtctggtccgggcgcggcgctgacgccacccaggtcgacgctgccgtgtgcgccgcccgcgaggccttcccggcctgggcgcggcgcccgctggagcagcgcatcgagttgctcgagcgcttcgctgcgaccctcaagtcccgcgccgacgagctggcccgagtgatcggcgaggaaaccggcaagccgctgtgggagtcggccaccgaagtgaccagcatggtcaacaaggtggcgatctcggtgcaggcgttccgcgagcgcaccggcgagaaatccggtccgctggccgacgctaccgccgtgctacggcacaagccgcatggcgtggtggcggtattcggtccctacaatttccccggccacctgcccaacgggcatatcgtcccggcgctgctggccggtaactgcgtggtgttcaagcccagcgagctgaccccgaaggtcgccgagctgacgctcaaggcctggatccaggccggcctgccggccggcgtgctcaacctggtccagggcggtcgcgaaaccggcgtcgcgctggccgcccaccgagggctcgacggtctgttcttcaccgggtccagtcgcaccggcaacctgctgcacagccagtttggcggccagccgcagaaaatcctggcgctggagatgggcggcaacaacccgctggtggtggaggaggtcgccgacctcgacgccgccgtctacaccatcatccagtccgccttcatctccgcaggccagcgttgcacctgcgcccgccgcctgctggtgccgcagggcgcctggggcgacgcactgctggcgcgcctggtggcggtcagcgctaccctgcgggtcggtcgcttcgacgaacagccggcgccgttcatgggcgcggtgatttcgctgagcgccgccgagcacctgctcaaggcccaggagcatttgatcggcaagggcgcacagccgctgctggcgatgacccagccgatcgacggcgccgccctgctgaccccgggcatcctcgacgtcagcgcggtggccgagcgaccggacgaagagttcttcgggccgctgttgcaagtgatccgctactccgatttcgctgcggcgatccgtgaagccaacgccacccagtacggcctggccgccgggttgctgtcggattcccgcgagcgtttcgagcagttcctcgtggaaagccgcgccggcatcgtcaactggaacaagcagctcaccggcgccgccagcagcgcgccgttcggcggtatcggcgcgtccggcaaccaccggccgagcgcctactacgccgccgattactgcgcctatccggtcgcctcgctggaaagccccagcgtgtcccttcctgccaccctgactcccgggatcagcctatga

SEQ ID NO: 30040 - DNA, 999 bp, Pseudomonas aeruginosa
atgctcgccctcggcaaactgctcgacttgaccctggccggccgcgagccgaccgagaagatccagctcaccgccgacggcacccgcctgcactggctggccgagggcgcgctggaagtcacgccgatcggcgcccgcgataacggcgtcgacctgttgctctcggccggtatccacggcaacgagaccgcgcccatcgaactgctcgaacggctgatccgcaaggtcgccgctggcaccctcaagcctgccgccagggtcctcttcctgttcggcaaccccgaagccatccgccgcggcgagcgctacgtcgaacaggacatgaaccgcctgttcaacggtcgccacgaggagggcagtggcaacgaggccttccgtgccgccgagctggagcgcctggcccaggtgttcttcagcaagaccgagcgagtccacctgcactacgacctgcataccgcgatccgcggctcgaagatcgagcagttcgccctctacccctgggccgagggccgccagcattcccgcagcgaactggcccgcctgcgcgacgccggcatcgaggcggtgctgttgcagaacaagccgggcatcaccttcagcgcctacacctacggccagctcggcgccgaggcctttaccctggaactgggcaaggcacgtccgttcggagagaaccaggaggtcaacctggagcgcctggagcggagcctggagctgctgatcgacggcagcgaggaacagccggacggctcccggctcgacggcctcaagctgttcagcgtgtcgcgcgaggtgatcaagcacagcgaccacttccgcctgcacctcgacgacgacgtggccaacttcaccgaactctcgccgggctacctgctggccgaggatatcggcggcacgcgctgggtggtggacgaggtcggcgcgcgcatcatcttccccaatccacgggtgaagaacggcctgcgtgccggaatcctggtggtgccggccaagctctga

SEQ ID NO: 30041 - DNA, 2625 bp, Pseudomonas aeruginosa
atgaaaagcgctgaaatccgtgaagccttcctccgcttcttcgaagagaagggacacacccgtgtcgcttccagttcgctgatcccggcgaacgatccgaccctgctgttcaccaacgcgggcatgaaccagttcaaggactgcttcctcggcctggaaaagcgcgcctacacccgtgcgaccaccagccagaaatgcgtgcgcgccggcggcaagcacaacgacctggaaaacgtcggctacaccgcgcggcaccacaccttcttcgaaatgctgggtaacttcagcttcggcgactatttcaagcgcgacgccatccattacgcctgggagttcctcaccggcgagaaatggctgaacctgcccaaggaaaagctctgggtcaccgtctacgccaccgacgacgaggcctacgacatctggaccaaggaagttggcgtgcccgccgagcgtatggtgcggatcggcgacaacaagggcgcgccctatgcgtccgacaacttctgggcgatgggcgataccggaccctgcggtccctgcaccgagatcttcttcgaccatgggccggagatctggggcggcccgcccggttcgccggaagaggacggcgaccgctacatcgagatctggaacaacgtgttcatgcagttcaaccgcaccgcggacggcgtcatgcacccgctgccggcgccgagcgtggacaccggcatgggcctggagcgcgtcagcgcggtactccagcacgtgcactcgaactatgagatcgacctgttccagaacctgctgaaagcctccgccgaggccatcggctgcgccaacgacgacgcgccgtcgctgaaggtggtagccgaccacatccgttcctgcagcttcctgatcgccgacggcgtgctgccgtccaacgaaggtcgcggctacgtcttgcggcggatcatccgccgcgcctgccgccacggcaacaagctgggcgccaggggcaccttcttccacaagatcgtcgcagcgctggtcgccgagatgggcgatgccttccccgagctgaagcaacagcaggcacacatcgagcgcgtgctgaagaccgaggaagaacagttcgccaagaccctggagcaaggcctgaagatcctcgaacaggacctcgccgaactgcagggcagcgtgattcccggcaacgtggtgttcaagctgtacgacacctatggcttcccggtcgacctgaccaatgacatcgcccgcgagcgcgagctgaccatcgacgaggacggcttcgagcgcgagatggaggcccagcgcgagcgcgcccgcgcttccagcgccttcggcatggactacaacagcctggtcaaggtcgacggcgagacccgcttcctcggctatcagggcgtctccggcgccgggcagatcgtcgcgctgttcagggacggccaggccgtcgagcgcctggaggagggcgaggagggcgtcgtggtcctcgaccagacgccgttctacgccgagtccggcggccaggtcggcgacagtggctacctcgaggcggctggcgtgcgcttcgacgtgcgcgataccaccaaggctggcggcgcgcacctgcaccatggcgtggtcgcccggggcaacctgagcgtcggcggcgcggtcaaggccgaggtcgacgcctcggtacgccaggccaccgcgctcaaccactccgcgacccacctgctgcatgccgcgctgcgccaggtactgggcgaccacgtacaacagaagggctcgctggtggacagccagcgcctgcgtttcgacttcagccacttcgaggcgatcaaggcggaacaactgaaggccctggaggatatcgtcaacgccgaaatccgtcgcaacaccgaggtcgagaccgaggaaaccgatatcgacaccgccaaggccaagggcgccatggcgctgttcggcgagaagtacggcgaccaggtgcgcgtactgagcatgggcggcgatttctccgtcgagctgtgcggtggcacccacgtatcccgcaccggcgacatcggcctgttcaagatcaccagcgagggtggcgtggctgctggcgtacgccgtatcgaggcggtcaccggcgcggcggcgctggcctacctgaacggtgccgaggagcagctcaaggaagccgccagcctggtcaagggcagccgcgacaacctgctggacaagctcggcgccctgctggagcgcaaccgctcgctggagaaggagctggaacagctcaaggccaaggctgccagcgcggccggcgacgacctttcggcggcggcggtggaaatcaagggcgcgaaggtactcgccgcgcgcctcgatggtctggacggcaaggcgctgctggcgctggtcgaccagttgaagaacaagctcggccgcgcagtgatcctgctcggcggcgagctggacgggaaggtcgtactggtcgcaggcgtgacccaggacctgaccggccaactgaaggccggcgagcttatgaagcaagccgcggcggcagttggtggcaaaggtggcggacgcccggatatggcccagggcggcggcaccgatgcagcgaaattggacgaggccctggccctggcccagcgcttcgtcgagcaagggctctga

SEQ ID NO: 30042 - DNA, 1239 bp, Pseudomonas aeruginosa
atggctttgatcgtacagaagtttggagggacctccgtcggcaccgtcgagcgtatcgagcaggtggccgagaaggtgaagaaattccgcgaagcgggcgatgacgtcgtcgtggtggtatccgccatgagcggggagaccaaccgtctgatcggcctggccaaccagatcatggagcagccggttccgcgcgaactggacgtcatggtctcgaccggagagcaggtgaccatcgccctgctcagcatggccctgatcaagcgcggcgtgccggcggtctcctataccggcaaccaggtgcgtatcctcaccgacagcgcgcacaccaaggcgcgcatcctgcacatcgacgacacccacatccgcgccgacctcaaggccggcagggtagtggtggtcgccggtttccagggcgtcgacggcaacggcaacatcaccacgctgggccgcggcggttccgataccaccggggtggccctggcggcggcgttgaaggccgacgaatgccagatctacaccgacgtcgacggcgtctacaccaccgatccgcgcgtagtgccgcaggcccgtcggctggacaagatcaccttcgaggaaatgctggaaatggccagcctcggttccaaggtgctgcagatccgggcggtcgagttcgccggcaagtacaacgttccgctgcgcgtgctgcacagcttccaggagggtccgggcaccctcattactatcgatgatgaagaggaatccatggaacagccgatcatctccggcatcgccttcaaccgcgacgaagccaagctgaccatccgtggcgtacccgatacccccggcgtggccttcaagatcctcgggccgatcagtgccgccaatgtggaagtcgacatgatcgtgcagaacgtggcgcacgataacaccaccgacttcaccttcacggtgcatcgcaacgattacctgaacgccctggaaatcctcaagcagaccgccgccaacatcggcgcgcgcgaagccatcggcgacaccaacatcgccaaggtttccatcgtcggcgtcggcatgcgttcgcacgccggcgtggccagccgcatgttcgaagcgctggccaaggaaagcatcaacatccagatgatctccacctcggaaatcaaggtttccgtggtgatcgaagagaagtacctggaactggcggtacgtgctctgcacacggcgttcgagctcgacgcgccggcgcgacagggtgagtga

SEQ ID NO: 30043 - DNA, 186 bp, Pseudomonas aeruginosa
atgctgattctgactcgtcgggtcggagagaccctgatggtaggtgacgacgtcaccgtgacggtactgggtgtcaaagggaaccaggtgcgcatcggcgtcaacgcgccgaaggaagtcgccgtacaccgggaggaaatttaccagcgcatccagaaagagaaagatcaagagccaaaccattaa

SEQ ID NO: 30044 - DNA, 1449 bp, Pseudomonas aeruginosa
atgaccgaagtagaagccaagaagccgcaggaaagcctgcaggaccgcctagcgcaggtggtcgagctgctgcatcgccacaaggtggtggaagacctgacccatcgtcaggaaggccagcaccatgaccgggtggaaaacctcgtccaccggcagaatctcgtagaactccagcgcaagctggaggaactgcaccccgccgacatcgcccacatcctcgaatcgctgccgctggacgaccgcctgacggtctggcaactggtcaagtccgaggacgacggcgacatcctcctcgaagtctccgacgcggtccgggaaaccctgatcgcggacatggacgaccacgagatcatcgccgcgaccaaggacctggacgccgacgaactcgccgacctggcaccggaactgccgcgcgacgtggtccatgaactgatggaaagcctcgacgcgcagcagcgcgagcgagtgcgttcggcgctgtcctacgaggaggaccaggtcggcgcgctgatggacttcgagatggtcaccatccgcgaggacgtcagcctggaagtggtgctgcgctacctgcgccgcctgaaggaactgcccgggcataccgacaaactgttcgtggtcgactacgacggcgtgctcaagggcgtgctgccgatcaagcgcctgctggtcaacgatccggacaagcaagtgctggaagtcatggccaccgacccggtgaccttccacccggacgaggacggctacgacgccgcccaggcattcgagcgttacgacctgatttccgcgccggtggtggacaagggcggcaagctgatcggtcgtctgaccatcgacgagatggtcgacctgatccgtgaggaaagcgaaagcgaagtcctcaacatggccggtctgcgtgaagaagaagacatcttcgcctcggtctggaagtcggtgcgcaaccgctgggcctggctggccaccaacctgatcaccgccttcgtcgcctcgcgggtgatcggtctgttcgaaggctccatcgagaaactggtggcgctggccgcgctgatgccgatcgttgccggcatcggtggcaattccggcaaccagaccatcaccatgatcgtccgcgccatcgcgctcgaccaggtacagccgaccagcaacagtcgcaaccgcctgctgcgcaaggagcttggcgtcgcgctggtcaacggcctggcgtggggcggagtgatcggcgtggtggccttctatctttacggcaactgggaactgggcgtggtgatgaccgccgcgatgaccctgaacctgctgctggcggcgatgatgggagtgctgatcccgatgaccctgcatcgtttcggacgcgatccggcgatgggctccagcgtgatgatcactgcgatgaccgacagcggcggtttcttcatcttcctcggcctggcgacgatcttcctgatgtag

SEQ ID NO: 30045 - DNA, 1323 bp, Pseudomonas aeruginosa
atgtccacccccactcccaaagtcggcttcgtcagtcttggatgccccaaggcgctggtcgactccgagcgcatcctcacccagctgcgcatggaaggctatgaggtcgttccgacctacgaagacgccgacgtcgtggtggtcaacacctgcggtttcatcgacagcgccaaggccgagtccctggaagtgatcggcgaagccatcgccgagaacggcaaggtcatcgtcaccggctgcatgggcgtggaagagcacgcgatccgcgacgtgcatccaagcgtgctggcggtcaccggcccgcaacagtacgagcaggtggttaccgcggtgcacgaagtggtgccgccgaagaccgaacacaacccgctggtcgacctggtcccgccgcaaggcgtcaagctgaccccgcgccactacgcctacctgaagatttccgaaggctgcaaccacagttgcagcttctgcatcatcccgtccatgcgcggcaagctggtcagccggccggtcggcgacgtgctgagcgaggccgagcgcctggtcaaggccggggtcaaggaactcctggtgatttcccaggacaccagcgcctacggcgtggacctgaagtacaagaccgacttctggaacggccagccggtcaagacccgcatgaaggaactctgcgaggcgctgagcagcatgggcgtgtgggttcgcctgcactacgtctacccgtaccccaacgtcgacgacgtgatcccgctgatggccgccggcaagctcctgccgtacctcgacatccccttccagcatgccagcccgaaggtgctcaaggccatgaagcgcccggccttcgaggacaagaccctggcccggatcaagcagtggcgcgagatctgcccggaactgaccatccgctcgaccttcatcgtcggcttcccgggcgaaaccgaagaagacttccagtacctgctcgactggctgacggaagcccagctcgaccgcgtcggctgcttccagtactcccccgtcgaaggcgctccggccaacgagctgggcctggagccggtgccggacgaggtcaagcaggaccgctgggaacgcttcatggcccaccagcaggcgatttccgccgctcgcctgcagctcaaggtgggcaaggaaatcgaagtgctgatcgacgaagtcgacgaacagggcgcggtcggccgctcctgggccgacgctccggaaatcgacggcaacgtgttcgtcgacagcgacgagctgaagccgggcgacaaggtccgcgtgcgcatcaccgatgccgacgagtacgacctctgggccgagctggtctga

SEQ ID NO: 30046 - DNA, 1905 bp, Pseudomonas aeruginosa
atgagtgatgcagcgacgcgtgccgaggagacttcggaggggcattccagctctgccatcggcctgatggtcggggcggttggagtctgctatggggatattggcaccagtcccttgtataccctgaaagaggtcttcatcggcggctacggggtgcaggccaaccacgatggcgtccttggcgtgctgtcgctgatcttctggtcgctggtctgggtcgtttccatcaagtacgtgatcttcgtcctgcgtgccgacaaccagggcgagggcggggtgatggcgctgtcggccctggcgcgccgggcggcggcgccgttcggcaggctgcagaccttcgtggtggttgccggcctgatcggcgcggcgctgttctacggcgacagcatgatcaccccggcgatctcggtactgtcggcggtagaagggctggagatcgccttcgacggcctggagcactggacggtaccgctggcgcttatcgtgctgatcggcctgttcctgatccagaagcacggcaccgcgcggatcggcatcctattcggcccggtcatggtgctctggttcggcgccctggcggcgctgggcgtctacggggtgatccagcagccggaagtgctgcaggcgatgaaccctgtatgggccgtgcgtttcttcagctcgcatcccggcatcggtgtcgccatcctcggcgccaccgtactggcgctgaccggcgccgaggcgctgtacgccgacatgggccacttcggtcgcaagccgatcgcccgtgcctggttcctgctggtgctgccggcgctggtgctgaactacttcggccagggcgcgaccatcctttccaacgccgaggcggcgcgcaaccccttctacctgctggcgccgggctgggcgctgctgccgatggtggcgctgtccaccctggccacggtgatcgcctcccaggcggtgatctccggcgccttctccctgacccgccaggcgatccagctcggctacgtgccgcggatgaccatccagcacacttccagccacgagcaggggcagatctacatcggcggggtgaattgggcgctgatggtcggcgtggtcctgctggtgctcggcttcgagtcctcggcgtcgctggcggctgcctacggcgtggcggtgaccggaaccatgctgatcaccaccctgctgatgggcgtggtgatctggcgcctgtggaaatggccgctgtggctgggcgtcccgttcttctgcgtgatgctcgcggtggacagcctgttcttcgccgccaacctgcccaaggtgatccagggcggcgccttcccggtcatcgcgggtatcgtcatcttcatcctgatgtccacctggaagcgtggccgccaactgctggtggagcgtctcgacgagggctcgctgccgctctcggtgttcatttccagcatgcgcgtgcagccgccgcaccgggtccaggggaccgcggtgttccttaccgcgcgtaccgacgcggtgcctcacgcgctgctgcacaacctgttgcacaaccaggtgctgcacgagcaggtggtgctgctcaccgtggtcaacgaagacagcccacgggtttcgccggatcgccgtttcgaggtcgaggcctatggcgacgggttcttccgggtgatcctgcacttcggcttcatggaagagccagacatcccggctgccttgcgcctgtgccatctcaacgaactggacttcagcccgatgcgcaccacctacttcctcagccgggagacggtgattccatccaagcgcatcggcatggcgcgctggcgcgaggggttgttcgccttcctgctgaagaacgccaacggcaacctgcgctatttcaacctgccgctcaaccgggtgatcgagttgggaacccaggtcgagatctga

SEQ ID NO: 30047 - DNA, 831 bp, Pseudomonas aeruginosa
atgtaccgactcgacgacctgctccacctcatggcgcgcctgcgcgatcccgaattcggctgcccctgggatctccagcagagctacgcgaccatcgtcccgcacaccctggaagaagcctacgaagtagcggacgccatagagcagggggatttcccgcaattgcgcgaggaactgggcgacctgctgttccaggtggtctattacagccagttggctcgcgaagaggatcgcttcgctttcgacgaggtggtggacggcatcacccgcaagctgatccgtcgacatccccacgtattcctcgatggcgatctctatggcaagcccgatgcggcgaagctggccgaagcggcagtcaagcagcgctgggaagaactgaaggccgaggagcgtgccgccaaggccaaggagccgcagcagttgtcgctgctggatgacgttcctgtcgccctgccggcgttgtcacgggcggcgaagctgcagaagcgcgcggcgcaggtcggcttcgactggccggaagcgctgccggtggtggacaaggttcgcgaggggctggacgaagtcctcgaggcgatggcagagggtgacgagggtgccgtgggcgaggaggttggcgacctgctgttcgtcgtggtcaacctggcccggcatctcaaggtcgatccggaggctgctctgcgccaggccaacggcaagttcgagcggcgattccggttcatcgagcggaacctgcgcgaagccggccggaaagccgaagagtgttcgctggaggaactggacagcctctggggcgaggctaagaaagcggagaggagcgcgcccggctgttaa

SEQ ID NO: 30048 - DNA, 540 bp, Pseudomonas aeruginosa
atgagcatgtcattgcgtgaccagttgctgaaagccgggctggtcaatgagaaacaggccaagcaggccaccaagcagaaacagaaacagcagcgcctggagcacaagaaccaggtcgacaaggacgactcccagcgccaggcggcggagcaggccaaggcggaaaagctggcgcgcgaccaggagttgaaccgccagcagcaggaaaaagccgagaagaaggccaaggccgcgcagatcaagcaacttatcgaagggacgcgcctgcccaagctggaaagcgacgactactacaatttcgtcgacgccaagaaggtcaagcggatcgcggtcaacgacctgatccgcgacaagctgagccgaggcagcctggctatcgtcagctatgacggacgctacgagatcgtgccccgggatgcggcggtgaagatccaggagcgcgatccgcggcgggtggtgctgctcaacgtacagagccaggagccggacgaagacgatccctacaaggactatgtggtgcccgacgatctcatgtggtga

SEQ ID NO: 30049 - DNA, 957 bp, Pseudomonas aeruginosa
atgcccaccggaagacccctgcgcctattcgccgccgccctgtgcggcggccttctgctgagcggctgcgccaaccagttgccgcagcgtagcgagcatgaggagcgcgtcgagcggaagctgctcgaacacaccctgcaagtcgatgtcggccagcccgatgtgctcgaactgccgcagcgccgggtccggatcaacgaccagaagtccttcgaggtcaccgagttcgaggtgacgcgccgttacgaccgctatacgccgtaccaggcctggcgggagatctacgagatcccgttgggcgcggtggcgctggtggccggcgtcggagcgaacatcgtcaacgtggtgaccttcggcagcgtaccggacaacatcacccacggctggatcaactacggactggccggggtgaatccgttcatgaacgtggaatccaacggtcgcgccgaacagaatctcgcgagcatcgacgagaaacagcgcgacaagcgcctggaatactccagcctgccctgggcggagcgtccggtcctggtcagttccggcaaggaactcaacgaactgcttaccgaccgtcatggcgtgctgcgcctcaacctgctcgacagccccttcgccgaacaggacatcagccgcatctcgcagatacacctttcggtgagcgacccacaggatggtacccgcgccgatgccagcctccgcgtcagccgcagcctgcgcggcaagctcctggaagctcacgccctgatctatgacgacctggaaggcgatgacgtccaccactgggtccatcgggtgaaacgcctcgcggagctgggcctggaagaagaagccagcgaactggaacagagcctgatcgagctcacgcgcaacgaccccgaactgcagcagcagttcatgcatgccctgctccgggatgccggtcgcctggccgcggaccctggcgagacgccctga

SEQ ID NO: 30050 - DNA, 1716 bp, Pseudomonas aeruginosa
atgcgtaccagtcagtatctgctttccacgctcaaagaaacccccgccgacgcggtggtaatcagccatcaactgctgcttcgcgccggcatgatccgtcgcctggcctcgggtctctacacctggctgccaatgggcctgcgggtactgcgcaaggtcgagaccatcgtccgcgaggaaatgaacgctgccggcgccctggaagtgctgatgccggcggtgcagccggccgagctgtggcaggagtcggggcgctgggagcaatacggccctgagctgctgcgcctgaaggaccgccacgagcgcgaattctgcgtaggcccgacccacgaagaagtgatcaccgacctcgcgcgcaacgagctgaacagctacaagcaactgccgatcaacttctatcagatccagaccaagttccgcgatgagatccgcccgcgcttcggcctgatgcgcggacgcgaattcatcatgaaggacgcctattccttccacctgagccaggactcgctgcagcagacctacgacgggatgtaccaggcgtacagcaagatcttctcccgcctcggcctggatttccgtcccgtgcaagccgacaacggctccatcggcggcagcggctcccatgagttccacgtgctggccaactccggcgaggacgatatcgtcttcagcgacagctccgactacgccgcgaacatcgagaaggccgaagccgtgccgcgcgagagcgcccgcggcagcgccaccgaggacatgcgcctggtcgacacgcccaacaccaagaccatcgcggccctggtggacggcttccagctaccgatcgagaaaaccatcaagaccctggtggtgcatggcgccgaagaaggcaccctggtcgccctgatcgtccgcggtgatcacgagctcaacgaaatcaaggccgccaaccagccgctggtcgccagcccgctggtattcgcttcggaggccgagatccgtgccgccatcggtgccggccccggctcgctgggcccggtcaacctgccgatcgcctgcatcgtcgaccgctccgtcgccctgatgagcgatttcgccgctggcgccaacatcgaggacaagcactacttcggcgtgaactgggagcgcgacctgccgctgcccgaggtcgccgacctgcgcaatgtcgtcgaaggcgaccccagcccggacggcaagggcaccctggtgatcaagcgcggcatcgaggtcggtcatatcttccagcttggcaccaagtacagcgaagcgatgaagctgagcgtcctgagcgaacagggcaagccggtcaacctgatcatgggctgctacggcatcggcgtatcccgcgtggtcgccgccgccatcgagcagaaccatgacgagcgcggcattctctggccaagcgcattggcgccgttccagatcgccctggtaccgctgaagtacgaaaccgagagcgtcaagcaggcgaccgacaagctctatgccgagctgaccgcagccggtttcgaagtgctgctggacgatcgcgacaagaagaccagccccggggtgaagttcgccgacatggagctgatcggcattccccaccgcatcgtgatcagcgaccgcggcctcagcgaaggcgtcctggaatacaagggccgccgcgacagcgagtcgcagaacctgccgatcggcgaactgatgtcgttcatcaccgaaaaactcagccgctga

SEQ ID NO: 30051 - DNA, 471 bp, Pseudomonas aeruginosa
atggaaatcaatatcggaatcggcgaacaggatcgcgcagccattgccgagggcctgtcgcggctactggccgacacctacaccctctacctgaaaacccacaacttccactggaacgtcaccggcccgatgttcaacacgttgcacctgatgttcgaaggccagtacaccgaactggccgttgccgtggacgacatcgccgagcgcatccgggccctgggcttcccggcgcccggcacctacgccgcctacgcccgcctgtcgtccatcaaggaggaggaaggcgttccggaagccgaggagatgatccggcaactggtccagggccaggaagccgtggtgcgcaccgcccgcagcatcttcccgctgctggacaaggtcagcgacgaacccaccgccgacctgctcacccaacgtatgcaggtgcatgaaaagaccgcctggatgttgcgcagccttcttgccagctga

SEQ ID NO: 30052 - DNA, 1776 bp, Pseudomonas aeruginosa
atgatgcgcagccactattgcggccaactgaacgagagcctggacggccaggaagtcaccctttgcggttgggttcaccgccgccgcgaccatggtggagtgatcttcctcgatgtgcgcgatcgcgaggggctggcccaggtggtgttcgatccggaccgtgcggaaaccttcgccaaggccgaccgggtgcgcagcgagttcgtggtgaagatcaccggcaaggtgcgcctgcgccctgaaggcgcgcgcaacccgaacatggcgtctggctccatcgaggtactgggctacgaactggaagtgctgaaccaggccgagactccgccgttcccgttggatgaatattccgatgtgggcgaggaaacgcgcctgcgctaccgcttcatcgacctgcgtcgtccggagatggccgccaagctgaagctgcgtgcgcgcatcaccagcagcattcgccgctacctggacgacaacggcttcctcgacgtcgagaccccgatcctcggccggccgacgccggaaggcgcgcgcgattacctggtgccgagccgtacctacccgggccacttcttcgccctgccgcagtcgccacagctgttcaagcaactgctgatggtcgccggcttcgatcgctactaccagatcgccaagtgcttccgtgacgaggacctgcgtgccgaccgccagccggaattcacccagatcgacatcgagaccagcttcctcgacgagagcgacatcatcggcatcaccgagaagatggtgcgccagctgttcaaggaagtgctggatgtcgagttcgacgagttcccgcacatgccgttcgaagaggccatgcgccgctacggttcggacaagcccgacctgcgcatcccgctggagttggtggacgtcgccgaccagttgaaggaagtggagttcaaggtcttctccggtccggccaacgatccgaaggggcgtgtcgccgccctgcgtgtaccgggcgccgcctccatgccgcgcagccagatcgacgactacaccaagttcgtcggcatctatggtgccaagggcctggcctacatcaaggtcaacgagcgcgccaagggcgtggaaggcctgcagtcgccgatcgtgaagttcatccccgaggccaacctgaacgtgatcctcgatcgcgttggcgcggtcgacggcgacatcgtgttctttggcgccgacaaggccaagatcgtttgcgatgccctgggcgcgctgcgtatcaaggtcggccatgacctcaagctgctcacccgggagtgggcgcccatgtgggtcgtggacttcccgatgttcgaggagaacgacgacggctcgctgtccgcgctgcaccacccgttcacctcgcccaagtgcaccccggctgagcttgaggccaatccgggcgcggcactttcccgcgcctacgacatggtgctcaacggtaccgagctgggtggcggttccatccgtatccatgacaagtccatgcagcaggcggtgttccgtgtgctgggcatcgacgaggcggaacaggaagagaaattcggcttcctgctcgacgcgctcaagtacggtgcgccgccgcatggcggcctggccttcggcctggatcgcctggtcatgctgatgaccggtgcatcgtctatccgcgaagtgatcgccttcccgaagacccagagcgctggcgacgtcatgacccaggcaccgggttccgtggacggcaaggccctgcgcgagctgcacattcgcctgcgcgagcagccgaaggccgagtga

SEQ ID NO: 30053 - DNA, 1044 bp, Pseudomonas aeruginosa
ttgaagcaacagttcgaacgctcgccttccgagagttatttctggcccgtcgtcctggcggtggtcctgcacgttctgatcttcgccatgctgttcgtcagctgggcgtttgctccggagcttcctccctccaagccgatcgtgcaggccacgctctaccagctcaagtcgaagagccaggcgacgacacagaccaaccagaagatcgctggcgaggcgaagaagaccgcctccaagcaatacgaagtcgagcagctcgaacagaagaagctcgagcagcagaaactcgagcaacaaaagctggaacagcagcaggtcgctgctgcgaaagcggcggaacaaaagaaggctgacgaggctcgaaaggccgaggcccagaaagccgccgaggcgaaaaaggccgatgaagccaagaaagctgccgaggccaaggccgccgaacagaagaagcaggctgacatagccaagaagcgcgccgaggacgaggccaagaaaaaggccgctgaggacgccaagaaaaaggcagccgaggacgcgaagaagaaagcggccgaggaggccaagaagaaggctgctgcggaagcggcgaagaagaaagccgccgtcgaggccgccaagaaaaaggccgccgccgctgccgcggcagcccgcaaggctgccgaggacaagaaggcgcgggcattggccgagttgctttcggatacgaccgagcgccagcaggccctggccgacgaggtgggcagcgaggtcaccggcagtctcgacgacctgatcgtcaacctggtgagccagcagtggcggcgtcctccatcggcgcgtaatggaatgagcgtagaagtactgatcgaaatgctgccggacggtaccatcaccaatgccagcgtcagccgttcgagtggcgacaagcctttcgacagttcggcggtggcggcggtgcgcaacgtcggccgtattcccgagatgcagcaattgccgcgggctaccttcgacagcctgtatcgtcagcgccgcatcatctttaaaccggaggatttgagtctgtga

SEQ ID NO: 30054 - DNA, 825 bp, Pseudomonas aeruginosa
atgcccaagcacctgcgtgtcctgacgttcctcgcgctcagcctgccattagcggcctgggcggaagttcctgtgtatgacggcgttgccgccaacaatggcggcaacgttcctccttccgggtatggcacggcaggtgccggcggcgcctttgccggaggtggggtgacaacccccacctccgtgcagggcgaactgttcatgcagctccagcagatgcaggacgagttggctcgcctgcgtggcacgctcgaggagcagcagaaccagatccagcagctcaagcaggaaagcctggaacgctaccaggacctcgaccgtcggatttccggtggtggcgctcccgctgcacagaattccgcacccgctggcgccatcaacgccaatggggcgcctgcggctcccgcaggtaacaacgcaccggcgccgagcagcgagccgggcgacccggcgaaggagaagctctactacgatgcggccttcgacctgataaagagcaaggatttcgacaaggcgagccaggcgttcaatgccttcttgcgcaagtacccgaacagccagtactccggcaacgcccagtactggctcggcgaggtgaacctggccaagggcgacctgcaaggtgccggccaggccttcgcgcgggtcagccagagctaccccagcagccagaaggtgcccgactctctgtacaagctggcggacgtcgagcgtcgcctgggtaacaacgacaaggccaagggtatcctccagcaggtcatttcccagtacccaggcacttcggccgctcaactggcgcagcgcgatctcaagaaccttcgctga

SEQ ID NO: 30055 - DNA, 2520 bp, Pseudomonas aeruginosa
gtggccatatttaggaaaaagttcgacttcgaggtgtccgtctattccaggtcttcctgtctcgtggccttgggattggctttgcctgccgtaaccttcgcggtggaattcaacgccgagttcctgaacaacgagggcggggcgcccgttgaactgaagtatttcgagaacggcaactcggtgtcgcccggcacttacagcgtcgacattcatttgaaccagatcatgatccggcgcgaagatgtcgtgttcagtgccgattccgaaaccggaagcgtccgcccggtcatccgggtggggctgctcaaggagattggggtcgatattgcccggctgactcgggacaagctcattccggccaacctggaaaacaatacgcccctgaatgtcgccgaactcatccctggtgcatccgtcgagttcgacgtcaacagtctttccctgttggtcagcattccacagctgtatgtacagcggcactcgcgtggctatgtggatccctctctttgggatgacggtgtcaccgcgttgttttccaactaccaggccaacttcacgcgcaacaccaattttggccagaacagcgattaccgctacctgggcctgcgcaatggcttcaacctatttggctggcgcctgcgcaacgactcctccctgagcgggggtaccggcatgcgcaacaagttcagtagcaaccgtacctatgtggaacgtgacattcgtgccctgaaggggaccttgtccctcggtgagttgtatacctccgctcagggggatgctttcgagagcgtgcgtatgcgcggcgtgcaactgcaatccgatatcggcatgctgcccgacaacgagatcagctataccccggtggtgcgcggtatcgctgaaaccaatgcgacggtcgaggtgagccagaatggcttcgtgatctattccaccaacgtaccgcccggtgcgttcgagatcaccgacatctatcccagcggctccaatggcgacctagaggtcaagatcatcgaggcggacggacgccagcggtccttcaagcagtcctattcctacctgccggtcatgacccgcaaggggaacctgcgctatggcctggccgccggtgaataccataatgacggccagccgtcggtcaacctgctccagggatcggctgtgtatggcttgtccgacagggttaccggctttggcggcctgctggctgccgagaagtacaatgccaccaacctgggcctcggcttcaacacgcccctgggcggtctttctgcggacgtgacccatagccagtcccgcacgcgacggggtgggcgcaaccaggggcagagtctgcggcttctctattccaagaccatcaacgccaccgaaaccagctttaccgtggtgggctatcgctattccacggaaggctaccgtactctcagccagcatatcgacgacatgtccgacgagagctacctctatggctcaagttccagtcggcagaagagccgcatagacctgacggtgaaccagacgctgttccgacgcagttcgctctatctcacggcgggcgaaaccacatattggaatcgccccggcagcagccgtcgcgtgcagttcggcttcagcagcggcatcaagcgcgcgagctacagcctggcggtttcccgtacccaggagacggggtcgttcgggcgctccgatacccagttcacggcctccgtcagcatccccttgggcggtagcgcacgctccagtcaggtatatgccaatgccgtgagttcacagcatggtgattcgagtctgaacaccggtatctccggatacctggatgaagccaatgcgttcaactacagcgcacaggccaactacagcaaggacggcggcaactccggcagcgtcggcctgggttgggacacgtccaaggccaagttgtccgccaattacagccaggggcgcgacaacaagcagatcaacctgggagcaagcggttcggtagtggtgcatccggggggagtgaccttcggccagccggtgggggaaacgttcggcctggtggaggttccggaggtcggcggcgtcggcctcgacggctactcttcggttcgcaccgacggccgtggctatgccgtgctcccctacatgcaaccctatcgttacaactgggtgaacctggataccaatacccttggaagcgataccgagatcagcgacagcacgcaaatggccgtgccgacccggggcgccgtgatcgccaagcgtttctccgcggagtccggtcggcgggtgcagttcgacctgagcatggactctggaggaaagattcccttcggtgcacaggcatacgacaaggaagagcgggtcgtgggaatggtcgacaacctgtcccgtttgctggtgttcggtattgaggaccaggggcgcctgtccattcgctggagcgatggctcctgttccgtcgactatcagttgccgcccaggaacaaggacctgacttacgaacgagttgcgctcagttgccgtcggtcctcgatctga

SEQ ID NO: 30056 - DNA, 522 bp, Pseudomonas aeruginosa
atgccccatagctacaggaaaatggaatcgccggtcgggacactgaccctggtagccagggacgatgcctttctggtcgcgattctttggcagcatgagcgtcccaaccgagtaccgctggacgagatgcggctctccgaggacagctccctcctggcggaaaccgaacgccagttgcgggaatatttttccggcaaacgttcccggttcgaactcccgctcgacttccaaggtaccgaatttcagaaaaaggtctggtccgccctgctcaccattccattcggcgagacccgcagctatacggaaatagccgtgcagatcggcagccccaacgcagtacgggcggttggagccgccaacggacggaacccactgtccattgttgcaccttgccatagggtgatcggagcctctggcggcctcaccggtttcgccggtgggttggccgccaagcagtggttgctgcgtttggaaacccgaggcaggacaccagacctgttgagcatgatcgaggacgagtga

SEQ ID NO: 30057 - DNA, 993 bp, Pseudomonas aeruginosa
gtgtggccgagctgcatggcacggtttccttccgacgggcagccaggttatcggtttgtgccgagtcccggatccggggctggggaggaagaaatgcgtccgctcgtttccgtcgtttgcgcctgtttcaatatctcgaagtatctggacgaggcgatcgccagcatctacgcgcagggctatcccaatctcgagttgatcgtggtggatgacggatccacggacgacacctatgagcgtctcgccatgctccgcgagcgtcacggcttccagctctaccgccaggctaaccgaggggtgagcgacgcgctcaatcacggtttgcgtcatgcgcggggcgagttcgtgatgactcccgacctggacgacattctcctgcctggagcgctcgacacgcgcgtcgactacttgcttgcgcaccccgaggtcgggtgcgtgggcggtttcaatatctgtatcgacagtgctggtaacgaagtggcgcgagacggtttcagcgaggggtgtgtggagcgttgggggttcgatgcagcattggccgagaccctggtggtcatgccgctgacggcgctctaccgcatggaagcgatgaagcgggcggatttcttcgacccgtcgattcgcgtgcaggatttccagatcaccctaaggatcgcggcgcagggctatgaaattcatcgactgccggcctacatggggcgttatcgccggcatggaagcggtctgtccggcaggtacaagctcaattacgaggcggatatgcaagccattgagccttatcgggctcacccgaattatcgccgggcccggcaactgatcctgaacaaggcgctgaagaaggctgttgtccaggatgggcgatatgcctggcagttgttccgctcggtgccgctgagggcgtgggaccgggtgacgctgaagcgattctggcgctttctccgttatctgccggtcctcgggttgaaaggtggtaccggcgtcgagggtcgatga

SEQ ID NO: 30058 - DNA, 474 bp, Pseudomonas aeruginosa
atgacccaaccctcctgcccctgcggcagcggcgacccgctcgacgattgctgcggccgctatcaccagggacatcccgcgcctaccgcggaagccctgatgcgctcgcgctacagcgcctacgccctcggactggtggactatctgcgcgacaccacgctgccggcgcaacaggccggcctcgatctcgacggcatccgcgcctggagccacggcagcacctggctcggtctggaggtggaaaaccacgaggtgctcggcggccagccggagcatgcgcgagtcaccttcgtcgcgcgctggcacgacgccgacggggaacatgcccatcgcgaatgttccggcttcgtccagcgcaacggtcgctggtacttcctcgatccgaccgtggccctgaaactcggccgcaacgatccctgcccctgcggcgccggcggcaagctgaagaaatgctgcggtccgtggatcacctga

SEQ ID NO: 30059 - DNA, 2802 bp, Pseudomonas aeruginosa
atgattctggcgctgatcatcgcgctgccgttcatgggggcgttgttgcccctgcttgccgagcgtggcggccgcaccttgtgcgcggcgtccgccggcgtggcgccgctgatcggcctgatcctgttgctcgggcagcgcggcacggtgttcgccgggcagaccctgaccgccagctattcctggctgccggaaatcggcatcaacctcagcctgcgcctggacggcctcggtttcctcttcgctctgctgatcctcggcatcggcctgctggtgattctctacgcccgctactacctctccgaacaggagccgatggggcgtttcttcgctttcctgctgctgttcatgggctccatgctcggcgtggtgctcgcggaaaatctcttgctgatgatgctcttctgggagctgaccagcctgtcctcgttcctgctcatcggcttctggggcagccgttccgacgcccgcaagggtgcgaggatggccctgaccgttaccggagggggcggcctggcgctgctggccggggtgctgctgctcggccacatcgccggcagcttcgaactcaccgaggtcctcgcggctggcgagctgatccgcgcccacgccctgtatccgctggtgctgatactgatcctgctcggcgtgttcaccaagtcggcgcagtttcccttccatttctggctgccccacgcgatggcggcgccgaccccggtttccgcgtacctgcactcggcgaccatggtcaaggccggcgtattcctgctggcccggctgtatccggcgctggccggcaccgagtggttcttctacctggtcagcctgagcggcctggtgacgctgttgctgggggccggcatggcactgttccagcatgacctgaaggggctgctggcctactcgacgatcagccacctgggcctgatcaccctgctgttcggcctcgactccccgctgtcgaacgtcgccgcggtgttccacatcatcaaccacgcgaccttcaaggcctcgctgttcatggccgccgggatcatcgaccacgagaccggcagccgcgacatgcgcctgatcaacgggatgtggaagtacctgccgcataccgcggtgctggccatcgtcgcctccctggcgatggccggggtgccgctgctgaacggcttcctcagcaaggagatgttcttcggcgaaaccctcagccagaacctgctgggcagcttcaactggctggtgccggcggtggcgaccctggccggcgtgttctcggtggcctattcgctgcgtttcatccacgacgtgttcttcaacggcgagccggcccggttgccgaagttcccgccccacgagccgccgcgctacatgaaggtaccggtggagatcctggtgttcctctgcctgttggtcggcatgctgccggcctacaccgtggcgccgctgctggccgccgccgccagtgccagccttggcgggcaactgccggaatacagcctggcgatctggcacggtttcaacctgccattgctgatgagcgtggtggcgctggttggcggtgtgctggtctatgtcctgcgcaagccgctgttcaactggtacgccgggttaccggaggtggacgccaagctggtcttcgagcagcaggtgcaacgtgtggtggccctggccgcgcgcctgaccgcctggctggagaacgggtcgctgcagcgctacctggcctggctgctgggcgcggcgctggtcgtggtggcggtcgagctggcaccgctggcgaggctgaccggctcgcgcgggctgaccccgctggacggtatcaccgccctgggcatgctggtgctggccttcagcggcctggccacggcgctgttccatcgtatgcgcctggtcgcgctattgatcctcagcgtcgccggcctgctggtggccctggccttcgctcgcttctcggccccggacctggcgctgacccagttgtcggtggaagtggtgaccatggtcctgctgatgctggcgctgtatttcctgccctcgcgcactccggcggagtcctccagcctgcgcggcttgcgcgacgtggcgctggccggcggggtcggcatgctggtggcgctgctggcctacgcggtgctgacccggccctacgagagcatcgccggattcttcgtcgagaacagcgtctccgggggcggcggctacaacgtggtcaacgtcatcctggtggacttccgtggtttcgataccctcggcgagatcagcgtgctggcgatcgccggtgtcggcatctacgcgatgctcgccggtttcgccctgcacaagccgacctgcgacccgcagggtcgcaactgggcccacgccaagcacccgctgatcctggaaaccctgtcgcgggtgctgctgccgctggcgttgctgatctcggtgttcatcttcctgcgcggccacaacctgccgggcggaggtttcatcgccggcctggtgactgccatcgccctggtgctgcagtacatcgccagcggctcgcagtgggtcgagcagcgcctaccgctgaactatgcggccatggctggcgccggagtgctgatcgccgggctcaccgggctcggcagctggctgttcggctatccgttcctgacttccgcgttcggccacttcgagttgccgctgatcggcgagatcgagctggccacggcgatgctgttcgacctcggcgtgtacctcaccgtggtcggtgccgcgctgctgatcctgtcctacctcggcaagctcagcctgatgcctgaacccgtcgcacaagaggaggcgctctga

SEQ ID NO: 30060 - DNA, 924 bp, Pseudomonas aeruginosa
atgcccgagatttatcattacctacaacaattggttaacggcctgaccgtcggcagcacctatgcgctgatcgcgatcggctacaccatggtctacggcatcatcggcatgatcaacttcgcccacggcgaggtgtacatgatcggctcgtacatcgccttcatcgccatcaccctgctggcgatgatggggctggacagcgttccgctgatgatgctcgccgcattcgccgccagcatcatcgtcaccagtgctttcggctacagcatcgagcgggtcgcctaccgcccgttgcgcggcggcaaccgcctgatcccgctgatctccgcgatcggcatgtcgatcttcctgcagaacgccgtgatgctctcgcaggactccaaggaaaaggccatcccgaccctgctgcccggcaacttcgtgttcggcgaaagcagcatgaacggcgtggtgatctcctatatgcagatcctgatcttcgtcgtcaccttcctggtgatgttcggcctcaccctgttcatctcccgttcccgcctgggccgcgcctgccgcgcctgcgccgaggacctgaagatgaccaacctgctgggtatcaacagcaacaacatcatcgccctcaccttcgtcatcggcgccgccctggccgccgtcgccgcggtgctgctgggcatgcagtacggcgtgatcaaccccgggatcggcttcctcgccgggatcaaggcgttcaccgccgcggtgctcggcggcatcggtagcatccccggcgccatgctcggcggcctgctgctgggcgtcgccgaagccttcggcgccgacgtgttcggcgaccagtacaaggacgtggtggccttcggcctgctgatcctggtgctgctgttccgacctaccggcatcctcggtcgtccggaggtggaaaaagtatga

SEQ ID NO: 30061 - DNA, 714 bp, Pseudomonas aeruginosa
atgagcatcgataacgtcagcggcaccagcagcaacaccggcaacgtcaacggcagcaagcgcgccgccggcagcggcgccaccgagaccgggcagagcgtcaagggcagcagcaaccttggcaaggacgaattcctcaagctgctggtggcccagttgaagaaccaggacccgatgtcgccgcagcagaacggcgagttcatcgcccaactggcccagttcagcaccgtggaaggcgtgcagtcgctgaacaagagcatggagagcattctctccaactaccagtcgtcgcaggccctgcaagcctcgtcgctggtggggcgcaaggtcatcgtggcgaccgacaagtcggtggtggacaccaaggacaccttcaaggcgtccctcaacctgccggtctccagcagcaacgtatgggtcaacgtctacgacgacaagggcaccgtggtcaatcgcatcaacctcggccagcaggctgccggcagcgtcagcttcatgtgggacggcaaggacagcagcggcaacatcatgccgccgggcacctacaagttcgaggcgcagacctcgatcgacggcaagacctacgggctccagacctacctgccggccaacgtcgacagcgtcaccctggggcagaacggcggcgagctgatgctcaacctcgcaggcctgggcagcatcgcgctgtccaaagtacagatcatcggccagtaa

SEQ ID NO: 30062 - DNA, 5085 bp, Pseudomonas aeruginosa
atgattgaggacagcgtgagcgaacccgaccggcgcgacggcggggatgccgggaaacgattggcctggctgcagcggcaggtcttgccggtgctggaggaggggggcgcggtctgggtttccgggctggacggcgcgccgttcgccgggggcgcacacaaggtcgtcgaggcttccgtcgctggcgagctgcctggcaacgagcgtttccgcctggcttgcctgggcggggcggtgggaggcgtggcggacgactggcaggccatgcgcctgctcctgcgcgcggtggagagcctggaggatcgcggctggctgctgctggaggaggctctctcggtatccgccgcaggcgcttgccggagtccccaggcgcaggcccgcctggcgctttccctgggcttgcggcaggtcgcggaactgcgcctgggcgcgccggacgacggcggacgccagcgggtgctgcaactgttccggcaggacctggcggttgcgcgcatgcagcgctactcgggcctgagggtcgcctgttacggcaacatgcctttccactaccgctcgttgcgtcctttggccgagtgtttcgaggacagcctcctgagcctcgacatcgatgaagtcatggcctggaaaccggacgtgatagcggtggccgacggctggtcggtggagttctggcgcgactactgcgatgcgcacaacgtattgctggtcggcatgcgccatggctcggtcacccgctacggattcgccgagggcacctaccgctacgccgactatctgtgcggcagcgcatgggacatcgacgacaccctggcttcctcggtgatgccgcgcaacggtttcctgctgaccggcaacgcctggtgcgacgaggtgttccggctgcccgcgagaaccccggcggagaacgcgccgaccatcctcttcgcccccacctacaaccccgagatcagcgccgccgtccacctcggcgagcgtgtggtggcattgatccgcaaggtctatcccgcgtcgcggatcatcatcaagccgcatcccgccatcgtccagcacgaacatgcgttcgtcagcgacaaggatctgttccgcgacctcatgaagctctggcgcgaacagtcacgcacggacccgctggtcactctggtggacgaccccgaggcgagcatcgcggccagcttcgccgaagccgacattctgctggcggaccgttcttcgctgatcttcgagttcatgacgctcgaccgaccgatcctgctgttctcccgcgaacagcggatcgcccgctgggcctacaacccggaggctccagggaacgcctggcgcgatatcggactggagttcgccgacgacgagcaactgctcgacctgctggccaatgcctttacccggcacgcggagagtcgcgatacccaggagaaccgcacgcagcagctgtacggccggtttcgcgacggacgcagcgtccagagggtcgccgcagcgatcgccgaggcgccgcgcttgcagatcgtgctcgacgcgcgggccgctgcggatggcgggcagcgcctggccgaacattatgcggcctgcttcgcccatcgccgtatcgacctgatcgctccgtccggcgcggcattgccggccgacgtgcggcgcttcgattcgtggcgggcctggtgcgacgcggaggctgccacgctcgaacgcagggcttcggcggtgcttctggtggaagacgacggccagttgctgccgggcagcgcgcatcaggtaagcgcgctcctgccggccatcgccatgggccagttgcggcatgcccggctggcgttggaggagcgcgaggccgggcccgctggcgaaaccgactggagcgcccgccgcctgcacaggttgctcgcgcgcctgcagccgaagccggcctggcgtctgctggcgcccgcgctgttgcgcgaggaactggccgacctgccggacgaagcggagcagccgttgtggctgcgcgccgtggcggcagccgaggcgccggtcgaatggcccgtcgggcagttgaacctgttcgccgaagagggactgttgcgccagggcgacgtgcatatgctctgcgcgcgcgctcggctgcgcgcggttccttgcgtgtcgggcctgccgctgcgccagcgccaggtcgtcctgcaggtcacgcccttcgccagccagctttacgaccgtttcccgttccagttgcgcgtgtgccttaacggccagctcttcagccgcgtgagcgtcgaggacgcgcgagcgaagtcgctggtcctgccgttccggggtgacgaacgcggtggcatgacgatcgaactggagtgcgacggcagctatccggctttcgaaggcgtttccacgccggtctccctgctgctccagaccgcgttccagccggcgccgggagactattgcgcggccctcgcggccggcgcagcgagcccggaggcgggggaggacctccgcagcgaatacgagacctggctgcacgggcgcgaagtggagccggcccgctaccgtcccttcatcgacgctttgcgacgcgactcgcggatcgaagtcctggtgcttgccgaggaggccgaggacgcagacctccagcgcagcctggcgagcatcgacggccaggccttgccggcctggcgcacgcggatactgggcagagccccggcgtttgcgcgcaagggcctggcgtggctggccgagggtggttccgccgccgagcggatcaacctggcggcggccgccagcgacgccgactggctgatcgtcatccatgccggagacgaactggcgcgttccgcgttgctcctgctggcggaaaagatccgtacggaaaccgcgctgctgtgctgctacagcgatgaagaccatgtgtgcgacggacgctacgaggcaccgttgctgaagcccgacttcaacctcgaccttctgcgcagctacccctactgcggtcgttccctggccttccagcgtgccgccttgctggcgcagggcggcttgcaggaaggcttcggcgatctggcgttgcaggacttcatgttccgcctggcggagcgggagggcctggatcgtatcggccatctcgccgaggtcctctaccacagcgctcgcgccttcggagaatggctggcgagcgccgccgtgcgcccgttcatcgcgagcgtggttgacgagcacctgaaccgcctcggggttccgcatcgaatcgagccgggccggctggcggtgattaaccgcatcgcctacgactatccggggacgccggcagtgtccctgctgcttcccgtgggagacagcctgagcgctctccagcgcagcgtggaaagcttcctggagaacaccgactacccgtcctacgaattgctgctggtcgcctccggcccgctggcgcccgacatggccgcctggctggaggcggtccagggactggggagcgagcagatccgggtgctcagcccgcaggcttcgagcctggccgggtgcctcaacctctgcgtggccgaggcccgaggcgaattcctcctgtcgttgggggcgggggtcgtggcccttcgtccggactggttgcgcgagttgctcaaccacggccgccgcccggaggtcggggcggtcggcggcaagctcctgggcctggacggaacgattcgcgaggcgggcctggtgcttggcctgggcggcacggcgggccgcgcgttcgccggcgaggcgggagacagcgccggctacatgcatcgcctgctggtcgtccagaatcacacggctctgtcggcttcctgcctgttgttcaagcgctcgctgcacgacgaactcggcggcttcgacgagaacgacttcgctcatggccacgccgacgtcgatttcagcctgcgtgcccgccagctcggctacctgtcggtgtggacgccctatgcaatcctggcccagaacggaaacgtcgagctgccttccgtggaggccgatgagtcgctctaccggcgctggctaccggcattggcgcgggatcccgcgtacaaccgcaatctcagcctggagggggccgggttcgccctggagcgccccgaggtaccggcctggcaaccgctgttcggacggtcgccgctgccgcgggtcctggcgcatcctgccgatccctacggttgtggccactatcgcgtgcgtcagccgttccgcgcgctgcacgacgccggcctgctggacggcatgctcagcgagtcgctcctgcagccggtggcgttggagcgcctggaggtcgacagcgtgattctccagcggcagatcagcgaagagcagttgcgggccatttcccggatgcggtcgttcaaccgcgccttccgggtctacgaactggacgactatctgcccgagctgccgctgaagagcctgcatcgggccgagatgcccggcgacattcgccagatcctcggtcgtgccctgggcctggcggaccgtttcgtggtctcgaccgaaccgttggcggaggcattccggcgcatgcacggggacatccgggtcgtgccgaaccgccttccgttgccctggtggcgcgacctttccagtcggcgccgggacgcagagcggccacgggtcggatgggccggcgggatcggccatggcggcgatctcgaggtgatcgccgaggtcgtgcgcgagctggcggacgaggtggactgggtgttcttcggattctgcccggatgccttgcgtccctatgtgcgcgaataccatccgggggtggagatcgaacgctatcccgcctacctggccagcctcgaccttgatctcgccctggcgccgttggagcagaaccgcttcaacgagtgcaagagcaacctgcgcctcctggagtacggcgtgctcggcttcccggtgatctgcagcgacgtgctttgctatcgcgacagtctcccggtcacgcgggtgaagaaccgttccagggactggctggaggcgatccgcgcgcacctggccgatgcagacgccaacgccgcggccggcgcgcagttgcgcgaggcggtgcgccgcgactggatgctcgaaggcgcgcatctcgaggcatgggcggcagcctggctgccggactga

SEQ ID NO: 30063 - DNA, 1209 bp, Pseudomonas aeruginosa
atgcaaccagccctcaacgccttcaccgagcagccagccgatacggccgaggccaccagccgcgccggcctcgagcaggccttcgcgctgttcaaccagatgtccagccagctcagcgagtcctacagcctgctggaggagcgcgttaccgagctgaaagggcaactggccctggtcagcgcgcagcgcatggaggagctggcggaaaaggagcgcctggcgaaccgcttgcagagcctgctcgacctgcttcccggcggcgtcatcgtcatcgatgcccatggcgtggtccgcgaggccaacccggcggccctgggcctgcttggcgagccgttggtgggcatgctctggcgtgaggtgatcgcccgctgcttcgctccgcgcgaggatgacggtcacgagatttccctgcgcgacggacgtcgcctgtccatcgccacccgctcgctgaatggcgaaccggggcaactgatcctgctcaacgacctcaccgatacccgccgtctccaggagcaactggcgcgccacgagcgcctgtcggcgctggggcggatggtcgcctcgctggcccaccagatccgcacgccgttgtcagcggcgttgctctatgccgggcacctcagcgagcaggcgctgccgaccgaccagcagcaacgcttcgccgggcgcctgaaggagcgcctgcacgaactggagcatcaggtacgcgacatgctggtgttcgcccgcggcgagctgccgctgaccgaccgggtggcgccgaaggcgctgttcgacagcctgcgcgcggcggccgaagtccatgtccaggggctccaggtgcgttggcagtgcgaggcgcgcggcggcgagctgctgtgcaatcgcgacaccctggtgggcaccgtgctcaacctggtggagaacgcgatccaggcctgcgggcccgaactgcgcctgaaggtgcatctctatgcccgcgccgacagcctgcgcctcagcgtcagcgacaacggaccgggtatggacccggcgaccctggcgcgcctgggcgaacccttcttcaccaccaagaccaccggtaccgggctcggcctggcggtggtcaaggccgtggcgcgcgcccaccaggggcaattgcagttgcgctctcggccggggcgcggcacctgcgccaccttgatcctgccgctgattccggcggcgcctctttctgcgattcaggagtaa

SEQ ID NO: 30064 - DNA, 990 bp, Pseudomonas aeruginosa
atgagcgttgaaagcattcgcatcgagggtatcgacacgccggtctcgcgcatcggcctcggcacctgggccatcggcggctggatgtggggcggcgctgacgacgcgacgtcggtggaaaccatccggcgtgcggtggaatccgggatcaacctgatcgacaccgcgccggtctatggcttcggccattccgaagaggtcgtcggcaaggccttgcagggcctgcgcgacaaggcggtgatcgccaccaaggcggcgctggagtggagcgacgcgggcatccaccgcaacgcctccgccgcacgcatccgccgggaggtcgaggactcgctgcggcggctgaagaccgatcgtatcgacctgtaccagattcactggccggacccgctggtggcgcacgaggaaaccgccggcgaactggagcgcctgcgccgcgacggcaagatcctcgccatcggcgtgagcaactattcgccggaacagatggacgggttccgccagttcgctccgctggccagcgtgcagccaccctacaacctgttcgagcgcgccatcgacgccgacgtgctgccctacgccgagcgtaacggcatcgtcgtgctggcctacggagcgctgtgccgcggcctgctttccggacggatgaacgccgagacccgcttcgatggcgacgacctgcgcaagtccgacccgaagttccagcagccccgcttcgcccagtacctggcagcggtcgcgcaactggaggaactggctcgcgagcgctatggcaagtcggtgctggccctggccatccgctggattctcgatcgcggccctacggtggcgctgtggggggcgcgcaagccggagcagttgaacggcatcgccgacgccttcggctggcgcctggacgacgaggccatggcccgcatcgagcggatcctcgccgagaccatccaggatccggtcggtcccgagttcatggcgccgcccagccgcaacgcctga

SEQ ID NO: 30065 - DNA, 408 bp, Pseudomonas aeruginosa
atgcttaccggtctcaatcacctgaccctggcggtcgccgacctgccggccagcatcgccttctaccgcgatcttctcggctttcgcctggaagcgcgctgggaccagggcgcctatctcgaactgggttcgctgtggctgtgcctgtcccgggagccgcagtacggcgggccggccgcggactacacgcactacgccttcggcatcgccgccgcggatttcgcccgcttcgccgcgcagctgcgcgcgcatggcgtgcgcgaatggaagcagaaccgcagcgagggcgattcgttctacttcctcgacccggacggccatcgcctggaggcccacgtcggcgacctgcgcagccggctcgcggcgtgccggcaagcgccctatgcgggaatgcgtttcgccgactag

SEQ ID NO: 30066 - DNA, 876 bp, Pseudomonas aeruginosa
atgagcaacgagcgcgataccagcagaaccccgacgcccgaccccgccgagcacaacgcgttctttccctcgccctattccctgagccagtacacctcggcaaagaccgacttcgacggcgccgactacccgaccccgtacaagggcggcaagaaggtgctgatgatcggtaccgacgaacgctacatcctgatgcagaacgccagcatgttctccaccggcaaccacccggtggaaatgctcctgccgatgtaccacctggacaaggccggcttcgagttcgatgtcgccacgctctccggcaacccggtgaagctggagatgtgggcgatgcccggtgaggacgaggcggtgaagagcatctacgcgaagtacctgcccaagctgaaagcgccgcggaagctcgccgacctcctggagcaggccgtcgccgacgactcgccgtacgccgcggtgttcgttcccggcggccacggcgtgctggcgggcattccgcacagccgggaggtgaaacggctgctcaatgccttcctcgccaaggaccgctacatcatcaccctttgccacggtccggcctgcctgctggcaccggcggtcgaggagaagccggaggactacccgttcaagggctacgagatctgcgtgttccccgacgccctggacaccggcgccaacctggagatcggctacatgcccggtcccctgccctggctggtgggcgagaacctgcagaagctcggggtgaagatcctcaacaagggcatcaccggccaggtccaccgcgaccgcaagctgctcaccggcgacagcccgctggcctccaacaaccttggcaagctggccgccaagacccttctcgaagcgttcgcccgctga

SEQ ID NO: 30067 - DNA, 2070 bp, Pseudomonas aeruginosa
atggctgtcaatgattacgaacctggttcgatggttattacacatgtgcagggtggtgggcgtgacataatccagtatattcctgctcgatcaagctacggtactccaccatttgtcccaccaggaccaagtccgtatgtcggtactggaatgcaggagtacaggaagctaagaagtacgcttgataagtcccattcagaactcaagaaaaacctgaaaaatgaaaccctgaaggaggttgatgaactcaagagtgaagcggggttgccaggtaaagcggtcagtgccaatgacatccgcgatgaaaagagtatcgttgatgcactcatggatgccaaagcaaaatcgctaaaggccattgaggatcgcccggccaatctttatacggcttcagactttcctcagaagtcagagtcgatgtaccagagtcagttgctggccagccgaaaattctatggagagttcctggatcgccatatgagtgagctggccaaagcgtacagcgccgatatctataaggcgcaaatcgctatcttgaaacaaacgtctcaagagctggagaataaagcccggtcattggaagcagaagcccagcgagccgctgctgaggtggaggcggactacaaggccaggaaggcaaatgtcgagaaaaaagtgcagtccgagcttgaccaggctgggaatgctttgcctcaactgaccaatccaacgccagagcagtggcttgaacgcgctactcaactggttacgcaggcgatcgccaataagaagaaattgcagactgcaaacaatgccttgattgccaaggcacccaatgcactggagaaacaaaaggcaacctacaacgccgatctcctagtggatgaaatcgccagcctgcaagcacggctggacaagctgaacgccgaaacggcaaggcgcaaggaaatcgctcgtcaagcggcgatcagggctgccaatacttatgccatgccagccaatggcagcgttgtcgccaccgccgcaggccggggtctgatccaggtcgcacaaggcgccgcatcccttgctcaagcgatctccgatgcgattgccgtcctgggccgggtcctggcttcagcaccctcggtgatggccgtgggctttgccagtctgacctactcctcccggactgccgagcaatggcaggaccaaacgcccgatagcgttcgttacgccctgggcatggatgccgctaaattggggcttcccccaagcgtaaacctgaacgcggttgcaaaagccagcggtaccgtcgatctgccgatgcgcctgaccaacgaggcacgaggcaacacgacgaccctttcggtggtcagcaccgatggtgtgagcgttccgaaagccgttccggtccggatggcggcctacaatgccacgacaggcctgtacgaggttacggttccctctacgaccgcagaagcgccgccactgatcctgacctggacgccggcgagtcctccaggaaaccagaacccttcgagtaccactccggtcgtaccgaagccggtgccggtatatgagggagcgacccttacaccggtgaaggctaccccggaaacctatcctggggtgattacactaccggaagacctgatcatcggcttcccggccgactcggggatcaagccgatctatgtgatgttcagggatccgcgggatgtacctggtgctgcgactggcaagggacagcccgtcagcggtaattggctcggcgccgcctctcaaggtgagggggctccaattccaagccagattgcggataaactacgtggtaagacattcaaaaactggcgggactttcgggaacaattctggatagctgtggctaatgatcctgagttaagtaaacagtttaatcctggtagtttagctgtaatgagagatggaggggctccttatgtcagagagtcagaacaggctggcgggagaataaagatcgaaatccaccacaaggttcgaatagcagatggaggcggcgtttacaatatggggaaccttgttgcagtaacgccaaaacgtcatatagaaatccacaagggagggaagtga

SEQ ID NO: 30068 - DNA, 1248 bp, Pseudomonas aeruginosa
atgctgagctgggacgaattcgacaaagaagacccgaccgaagccaaggccgcgcccgccgccgcccaggccgttgcccagggccatgacaagctggacgacgaagccgccggctcggtggaagaagcgcgcgccgtttccgccgacgactccgacgctgtcgcccgcgccaagaaggccctgaacgacctcgacatccaggaaggcttggacgacctcgaaggctccgccgcgcgcgtgcaggtcggcgacaagcagatgatcaacgcccgtgccgacctcaaccagctcgttcccttcaagtacgactgggcctggcagaagtatctggatggttgcgccaaccactggatgccgcaggaagtcaacatgaacgccgacatcgccctgtggaagagcaaggacggcctcagcgaagacgagcggcgcatcgtcatgcgcaacctcggcttcttctccaccgccgactcgctggtcgccaacaacctggtgctggccgtgtaccgcctgatcaccaaccccgagtgccgccagtacatcctgcgccaggccttcgaagaggcgatccacacccacgcctaccagtactgcatcgagtcgctgggcatggacgagggcgagatcttcaacatgtaccacgagatccccagcgtggcgaagaaggcctcctggggcctgaagtacacccgctcgatctccgacccgatgttccagaccggcaccccggaaaccgaccgccagttcctgcgcaacctgatcgcctactactgcgtgctggaaggcatcttcttctactgcggcttcacccagatcctctccatgggccgccgcaacaagatgaccggcaccgccgagcagttccagtacatcctccgcgacgagtcgatgcacctgaacttcggtatcgacgtgatcaaccagatcaagatcgagaacccgcacctgtgggacgcccagatgaaggacgaggcgacccagatgatcctccagggcacccagctggagatcgaatacgcgcgcgacaccatgccgcgcggggtgctgggcatgaacgcggcgatgatggaggactacctgaagttcatcgccaaccggcgcctgacccagatcggcctgaaggaagagtatccggggaccaccaacccgttcccgtggatgtcggagatcatggacctgaagaaggagaagaacttcttcgagacgcgggttatcgagtaccagacgggcggagcactgagctgggattga

SEQ ID NO: 30069 - DNA, 2892 bp, Pseudomonas aeruginosa
atgcataccgacaccacacgcgagaacccgcaggccagcgcgccgcaggccgccgattcgtcgcaggatctggccgccaccgcgccgggccagctacgcgtgatcaagcgcaacggcaccgtagtcccctacaccgatgacaagatcaccgtcgccatcaccaaggcgttcctcgccgtggaaggcggcaccgccgccgcctcgtcgcgtatccatgacaccgtgcgccgcctgaccgagcaggtcaccgccaccttcaagcgccgcatgccgtccggcggcaccatccacatcgaagagatccaggaccaggtcgaactggccctgatgcgcgccggcgagcagaaggtcgcccgcgactacgtgatctaccgcgaagcccgcgccgccgagcgcaagaacgccggcgccgccagcgacgtcgcccagccgcacccgagcatccgcatcacccgcgccgacggcagcctgtcgccgctggacatgggccgcctgaacaccatcatcagcgaagcctgcgaaggcctggccgaggtggacggcgcgctgatcgagcgcgagaccctgaagaacctctacgacggcgtcgccgagaaggacgtcaacaccgccctggtgatgaccgcgcgcaccctggtcgagcgcgagccgaactactcctacgtcaccgcccgcctgctgatggacaccctgcgcgccgaagccctgggcttcctcggcgtggccgagagcgccacccatcacgagatggccgagctgtacgccaaggccctgccggcctacatcgagaaaggcgccgagttcgagctggtcgatgccaagctgaaggaattcgacctggagaaactgggcaaggccatcgatcacgagcgcgaccagcagttcacctacctcggcctgcagaccctgtacgaccgctacttcatccacaaggacggcatccgcttcgaactgccgcagatcttcttcatgcgcgtggccatgggcctggccatcgaggagaaggaccgcgaggcacgtgccatcgagttctacaacctgctgtcgtccttcgactacatgagttccacccccaccctgttcaacgccggcaccctgcgtccgcagctctccagctgctacctgaccaccgtgccggacgacctgtcgggcatctacggcgccatccacgacaacgccatgctgtcgaaattcgccggcggcctgggcaacgactggaccccggtgcgcgcgctgggctcctacatcaagggcaccaacggcaagtcccagggcgtcgtgcccttcctgaaagtggtcaatgacaccgcggtcgcggtcaaccagggcggcaagcgcaagggcgcggtctgcgcctacctggaaacctggcacctggacatcgaggaattcctcgagctgcgcaagaacaccggtgacgaccgtcgtcgtacccacgacatgaacaccgccaactggatccccgacctgttcatgaagcgcgtcttcgacgacggctcctggaccctcttctcgccgtccgacgtccccgacctgcacgacctctacggcaaggccttcgaggagcgctacgagtactacgaggccctggccagctacggcaagctgaagctgcacaaggtcgtccaggccaaggacctgtggcgcaagatgctctccatgctgttcgagaccggccacccatggctgaccttcaaggacccgtgcaacctgcgcagcccgcagcagcacgtgggcgtggtgcacagctcgaacctctgcaccgagatcaccctgaacaccaacaaggacgagatcgccgtctgcaacctgggctcgatcaacctggtcaaccacatcgtcgacggcaagctggacaccgccaagctggagaagaccgtcaagaccgcggtacgcatgctcgataacgtcatcgacatcaactactactcggtcccgcaggcgcagaactccaacttcaagcaccgtccggtcggcctgggcatcatgggcttccaggacgccctgtacctgcagcacatcccctacggttcggacgcggccatcgccttcgccgaccagtccatggaagccatcagctactacgcgatccaggcttcctgcgacctggccgacgagcgcggcgcctaccaaaccttccagggctcgctgtggtcgcaaggcatcctgccgatcgactcggagaagaagctgatcgaagagcgcggcgccaagtacatcgaagtcgacctgtcggaaaccctcgactgggcgccgctgcgcgagcgcgtacagaaaggcatccgcaactcgaacatcatggccatcgcgccgaccgcgaccatcgccaacatcaccggcgtctcgcagtcgatcgagccgacctaccagaacctgtacgtgaagtcgaacctctccggcgagttcaccgtgatcaacccctacctggtgcgcgacctcaaggcccgcggcctgtgggacccggtcatggtcaacgacctgaagtactacgacggttccgtgcagcagatcgagcgcatcccgcaggacctcaaggacctctacgccaccgcgttcgaagtcgagacccgctggatcgtcgaagccgccagccgtcgccagaagtggatcgaccaggcccagtcgctgaacctgtacatcgccggcgcctcgggcaagaagctcgacgtgacctaccgcatggcctggttccgcggcctgaagaccacctactacctccgtgccctggccgccaccagcaccgagaagtccaccatcaacaccggcaagctcaacgccgtgtcggccggtggcaacgacggcctgcaagccgccccggccgccgagccgaagccggcgccggtgccgcaggcgtgcagcatcgataaccccgactgcgaagcctgccagtga

SEQ ID NO: 30070 - DNA, 711 bp, Pseudomonas aeruginosa
gtggagcaagaagcctggcgcatcctgatcgtcgaggacgatcgacgcctggccgagctgacccgggaatacctggaaggcaacggcctgaaggtcgacatcgaagccaacggcgcactggcggcggcgcgtatcctcgccgaacgcccggacctggtggtgctcgacctgatgctgccgggcgaggacggcctgtccatctgccgccaggtgcgcccgcagttcgacggtccgatcctgatgctcaccgcgcgcaccgacgatatggacgaggtactcggcctggagatgggcgccgacgactacgtgtgcaagccggtgcgcccgcgtgtgctgctggcgcgcatccgtgccctgttgcggcgcagcgaggcgccggaagcgggcgccccggcggcggacagcaaacgcctggcgttcggtcgcctggtgatcgacaacgcgatgcgcgaggcctggctggacgggaccaccatcgagctgaccagcgccgaattcgacctgctctggctgctggcggcgaacgccgggcgcattctctcccgcgaggagatcttcaacgccctgcgcggcatcgagtacgacggccaggaccgctccatcgacgtgcgcatctcgcggattcgcccgaagatcggcgacgacccgatgcacccgcggctgatcaagaccgtgcgcagcaagggctacctgttcgtcggcgagggctga

SEQ ID NO: 30071 - DNA, 321 bp, Pseudomonas aeruginosa
atgaaaaatcaggtgaatgccctggcggttctaagtgtgggtgaaatcgaacaagtttctggcgccgggactttcctgggcgatgccatcatcaacggcgtctacgcggccaactccttcctgaactcgccgctgttctccagcatcggcaacgcggccagcgccatcggcctcaaccgtacccacgagctggtcgacctgctggccttccaggtgccttcggtggcggcgatcaccgtcggcaagattctcggcgggaccgacaaccacaatgttccgttgcattacaacaaggaaagcggcgaagggctttacagctga

SEQ ID NO: 30072 - DNA, 1347 bp, Pseudomonas aeruginosa
gtgatccgttccctgcgcatccgtctgatgctcggcgccgccgccctggcggtgctgttcatgctggcgctgctgccggccctgcagcgggccttcggcatcgccctggagaacaccatcgagcagcgcctggccgccgacgtggcgaccctggtctcggcggcgcgggtggagaagggccgcctggtgatgcccgagcacctgccggtggaggagttcaacctgccggaggccaaggtcctcggctatatctacgaccagaatggcgatctgctctggcgctccacctcggcggccgacgagtcgatcaactacacgccgcgctacgacggccgcggcaacgaattccacaccacccgcgatgcgaagggcgaggagttcttcgtgttcgacgtcgagatcgacctgctgcgcggcaagcaggcggcctacagcatcgtcaccatgcaatcggtcagcgagttcgagagcctgctcaaggggttccgcgagcagctctacctgtggctcggcggcgccctgctggtcttgctcgggctgctctggctgggtctgacctggggcttccgggcgatgcgcgggttgagttccgagctggaccagatcgaatccggcgagcgcgagagcctgagcgaggagcatccgcgcgagctgctgcgcctgacccactcgcttaaccgcctgttgcgcagcgagcacaaacagcgcgagcgctaccgccactccctcggcgacctggcgcacagtctgaagacgccgctggcggtcttgcagggggtcggcgaccagctcgccgaggagcccggcaaccgcgagcaggtgcgggtgctacagggccagatcgagcgcatgagccagcagataggctatcagttgcagcgcgccagcctgcgcaagagcggcctggtacgccatcgcgagcaactggcgccgctggtggagaccctgtgcgacgcgctggacaaggtctatcgcgacaagcgggtaagcctgcagcgggacttctcgccgtccttcagcgtgccggtggagcgcggcgcgctgctggaactgctcggcaacctgctggagaacgcctatcgcctgtgcctgggccgggtccgcgtgggcgcccggctggggccgggttactcggagctgtgggtcgaggacgacggtcccggagtgcctgccgaacagcgcgcacgaatcatccgccgcggcgagcgcgccgatacccagcacccggggcagggcatcggcctggccgtggcgctggacatcatcgagagctacgacggcgaactgagcctggacgattccgagctgggcggcgcctgcttccgcatacgtttcgctacagtctga

SEQ ID NO: 30073 - DNA, 1311 bp, Pseudomonas aeruginosa
atgaccaaacaacccttctacaagagcctgtacgtgcaggttctggtcgccatcgccatcggtatcgcgctcggccactggtacccggaaacggcggtggcgatgaagccgttcggcgacggcttcgtcaaactgatcaagatggccatcgcgccgatcatcttctgcaccgtggtcaccggcatcgccggcatgcagagcatgaagtcggtcggcaagaccggcggcatggcgctgctgtacttcgaggtcgtctccaccgtggccctgatcatcggcctggtagtggtcaacgtggtccagccgggcgccggcatgcacgtcgacccgaacaccctcgacaccagcaagatcgctgcctacgccgctgccggcgagaagcagagcaccgtcgacttcctgatgaacgtgatccccggcaccgtggtcggcgcgttcgccaacggcgacatcctccaggtcctgttcttctccgtgctcttcggctacgccctgcatcgcctgggcagctacggcaagccggtgttcgagttcatcgagcgcgtctcccacgtgatgttcaacatcatcaacgtgatcatgaaggtcgccccgatcggcgcgttcggcgccatggccttcaccatcggcgcctacggcgtgggttcgctggtgcagctcggccaactgatgctgtgcttctacatcacctgcatcctgttcgtgctcatcgtcctcggcggcatcgcccgcgcccacggcttcagcatcctgcgcttcatcaggtacatccgcgaggaactgctgatcgtgctgggcacctcgtcttccgagtcggctctgccgcggatgatcgacaagatggagaagctcggctgcaacaagtcggtggtcggcctggtgattcccaccggttactccttcaacctcgacggcacctcgatctacctgaccatggccgcggtgttcatcgcccaggccaccgatacgccgatggacatcacccaccagatcaccctgctgctggtgctgctgatcgcttccaagggcgccgccggcgtcaccggcagcggcttcatcgtgctcgccgcgaccctttccgccgtcggccacctgccggtcgccggcctggcgctgatcctcggcatcgaccgcttcatgtccgaagcccgcgcgctgaccaacctggtcggcaacggcgtggccacggtagtggtttccaagtggtgcaagcagctcgacgagggcaccttgcagcgcgaactggccggcgagggcaacgcttcgtcgcctgccagcgatattccggtgggcggccgcgaagcggtctaa

SEQ ID NO: 30074 - DNA, 1419 bp, Pseudomonas aeruginosa
atggccgattcggacaagggaaaactggggctgccggcgctgaccgcgctggtggtgggcggcatcatcggcagcggcatcttcagcctgccgcagaacatggccgaaggcgcaggcgccggcgcgatcctgatcgcctgggcgatcaccttcgtcggcatgctgaccctgacgcggatattccagtggctgtcgaccacccgccccgaactggacgacggcgtctacggctacgcccgcgaaggcttcggcgaatacctggggttcaatgccgcctggggctactggatttccgcctgggtcggcaacgccggctacctggtggtgctgttcagcgccctcggctcgttcggcgcgctggccttcttcggcgacggaaccacctggccggcgctgctcggcgaattgacggtgctctggctgatgcatgccttcgtcctccacggcgtgcacaacgcggcgatcaccaacgccatcgtgaccctcgccaaggtggtgccgatcgccctgttcatcctctgcgtagccctggccttccgcatcgagacctttcacctggacttctggggcagcccggccctgggcagcgtcacccgccaggtggaaaccaccatgctctacaccgtctgggtattcctcggcatcgagagcgccacggtctatgccagccacgcgcggcacgcggccgatgtcagccgcgcaaccctgctcggcttcgtggtcaccctgctgttgctggtctgcgtctcggtgctgtcgctgggcgtggtgccgcagcacgaactggcgcagatgaagaacccctcgatggcccaggtgatggccgcggcggtgggcccctggggcgccacgctgatcaacgtcgggctgatcgtctcggtcggcggcgcgctgctggcctggaccatgctcgcggtggaaatgctctacctggccagccgtggcccaacgcacaccgcgccggcactgttcggccgcaccaatgcggtggaaaccccggcgccggcactgtggctgaccagcacgctgatctctgcgctgctgctggtggccttcctcaacgcctcgggctacaacgcgctgatccagttggccacctcgatggcgctgatcccctacctgctctgcgccggcttctgcctgaagctggtggcgcgccgcccgcactcgggcgcgatgctggcgctggcgctgttggggacgctctacggggtctggctgatctacgccgccgggctgaaatacctgctgctgtcgatgatcctctacgcgccaggcctgggcttcttcctgcatgcccgtcgccagcgcggcctgccggcgttcggcaatcgcgccgaaggcagcgtcgcggcgctggtgctggtcctcgcgctggcggcgctatggatgatcggcagcggtcggctgaccctctag

SEQ ID NO: 30075 - DNA, 1230 bp, Pseudomonas aeruginosa
gtgagcgacaacaccttcagcgtgcaacgcttccgcgccctgccgacggaaatccacgtgatgctcgtcggtacgctgctgacccgcggcgcctacttcatggtctggccgttcctggcattgctgctgtggcgcgagttccggctgtccgccagcgccatcggcctgctgctggcgctggcgaccgtctgcggcgcgctcagcggcatctacaccggctggctgtcggaccgtttcgggcgcaagcgcctgatcttcttcggcaccagcctcagcgggctttccttcgtgttgctgggcttcagcggccagccgctgtcctacggactggcgatctccggggtgagcatcggctgcgccctgctcgaatccagttgcaaggcgctgatcggcgaccgcgtcgaggatcgccgctcgcgggaactggcgctctactgccggtacttcctgatcaacctcggcgccgccctcggcccgctgatcggcctgactctcggcgtcgccgcccaggccggcaccttcctggtcaccgcgctggtctacttctgctacggcctgctgctctggcgcctgctgcaccacctcgaacttaagcggcgcagccttgccccgcgatcctcgacggggttcctcgaagcctgcctgagcatgggccggcatcgcgccttcaccctgctgttgctgtgcaacatgctggccgcgctgatctacgccaccttcgattcgaccctcgtgcagtacctcacccgcagcggtctgcccgacgtggtcaacagcatcgccctgctggtgaccatcaacgcgctgaccatagtggtcgcccagtttcccctcctccgcctgctggaaaacaccggcaccggcggccgcctgatgctcggcatgctgctcatgctcctggcccagctaggcttcgcctggaccccggtgaccctgttcgccggcctggcgctggccacggtggtactcagcctcggcgaactgatcgtgttcccgaccttcagcgtggaggtcgaccaactgacccccgacgacttgcgcggcagctatttcggcgcggccaatctctacagcctcggcaccgcgctggcaccgctgtacggcgggatcatgctcgaccatgccggcagccaggcgctgtacctcggcctggccgcgctgtgcggggtgatcatgctgctgcaggtcggcgcggtcggcctgcgccaggccgagcgggccggcggatga

SEQ ID NO: 30076 - DNA, 198 bp, Pseudomonas aeruginosa
gtgccctgcatgctgagcgaagtctccgtttccggcctctacgtgccgccattgttcctctacctgtgcctggcgatgccgctctacctgctgctggagcgcctcgcctggcgctggctggaatgcgcctggcatcccggcctgctgcgtttcttcctgtcgttcatcgtgctgtccgtgctggtgctgaagttctga

SEQ ID NO: 30077 - DNA, 1005 bp, Pseudomonas aeruginosa
gtgatccgaatgacgctggacgaggtccgcgagctggccgtgcgcatcctgcgccggcacgctttcagcgaagcccatgtacaggcggtggccgataccctggtggcgggggagcgtgacgaatgcgcgtcccacggtatctggcggttgctcggctgcatcgccaccctgaaggccggcaaggtatccgccgacgccgagccggaactgcacgacatcgctcccggcctgctgcgggtcgacgcccatggcgggttctcccagtgcgcattccggctggggctgccgcatctgctggagaaggcccgcagccagggtatcgcggcgatggcggtgaaccgctgtgtgcatttctccgcgctatgggttgaggtcgaggcactcaccgaggcgggcctggtggccctggcgaccacgccgagtcatgcctgggtggcgccggcgggcggacgcaagccgatcttcggcaccaacccgatcgcctttggctggccgcgtccggacggcccgccgttcgtcttcgacttcgccaccagcgccgtggcgcgtggcgagatccagttgcacgaacgcgccggcaagccgatcccgctgggctggggggtggacgagcagggcgagccgaccaccgatgccagcgccgcgttgcgaggcgccatgcttactttcggcgggcacaagggctcggccctggcggcgatggtcgaactgctcgccggtccgctgatcggcgacctgaccagtgccgagtcgctggcctacgacgagggcagccgttcttctccctacggtggcgaactgctgatcgccatcgatccgcggcgcatgctcggcgcctcggcggaggagcacctggcgcgcgccgagacgctgttcgaaggcatcgtcgaacagggcgcgcgcttgccctcgcagcgacgcttcgaagcgcgcgaacgcagcgccagggacggcgtgacgattcccgaggcgttgcaccgggagctgctggcgttgctggagtga

SEQ ID NO: 30078 - DNA, 1473 bp, Pseudomonas aeruginosa
atgagtgatcgcgggcggaccctgatggtccagggcaccacctcggacgccggcaagagcaccctggtgaccgcgctgtgccgctggctggcccggcgcggcgtcgcggtggtgccgttcaagccgcagaacatggcgctgaacagcgcggtcaccgccgacggcggcgagatcggccgcgcccaggcggtccaggcccaggcctgtcggctggcgccgcacaccgacatgaacccggtgctgctcaagccgaacaccgacatcggcgcccaggtgatcatccatggccgcgcggtgaccagcatggacgccgccgcctaccacgactacaagcgcgtggcgatggaagcggtgctggcttcccatgggcggctcgccgccgcctaccgggtggtgatggtggagggcgccggctcgccggcggagatcaacctgcgcgccaacgacatcgccaacatgggcttcgccgaagcggtggattgcccggtgatcctggtcgccgatatcgaccgcggcggggtcttcgcccacctggtcggcaccctggaactgctctccgactcggagcgggagcgggtcaagggcttcgtcatcaatcgcttccgcggcgacatcgccctgctgcaacccggcctcgactggctggaggcgcgcaccggcaagccggtgctcggcgtgctgccctatgtcagcgacctgcacctggaggcggaggacgccatcgacacgcgccaggcggccaaggtcgggccgcgcctgaaggtggtggtgccggtgctgccgaggatcagcaaccacaccgatttcgatccgctgcgcctgcacccccaggtcgagttgagcttcgtcggccccggccaggcgctgccgtcggcggacctgatcgtcctgcccggctcgaagagcgtgcgcgccgacctcgcggcgctgcgcgagcgtggctgggacgaggcgatcctccgtcacctgcgctacggcggtcgcctgctggggatctgcggcggcctgcagatgctcggcgagcgcctgcacgatccgctcggcctggaaggcgcggccggcagcagcgctggcctcggcctgctggcgttggaaacgaccctggaggcggacaagcaattgcgcaacgtacagggccgcctgagcctggaggatgcgccgctgtcgggctacgagatccatgccggagtcacccgtggcgaagccctggcgcggccggcggtggtgctcgacgatggccgcgcggatggtgcccgcagcgtcgacgggaacgtcatgggcacctacctgcacggcctgttcgaatccaccgcggcctgttcggcgctgctgcgctgggccggcctgcgcgaggtccaggcggtggactaccaggccttgcgcgaacgcgacatcgagcggctcgccgacctggtcgagcgccacctggataccgggcgattgctcgccctctgcggagaaccccatgcgtga

SEQ ID NO: 30079 - DNA, 585 bp, Pseudomonas aeruginosa
atgagcctgcgcctggacctcctgcggcatggcgaaaccgagtccggcggcggtttccgcggcagcctcgacgacgccttgaccgcgcgtggctgggcgcagatgcgcacggcggtggaaggcggacgctgggacctgctggtcagctcgccattgcaacgttgccgcgccttcgccgaggaactggcgcagcgccaggggatcgagctggaactggaaaacgatctgcgcgaactgcatttcggcgcttgggaggggcgctcggcggccgccctgatggacggccacagcgaggcgctcggccgcttctgggccgatccctacgcctttaccccgccgggcggcgagccgctgtccgagttcgaggcgcgggtgctggccgcccagcgacgcctgcgccagcgtcatgccggccgtcgtgtgctgctggtgacccatggcggcgtcatccgtctgttgctcgctcgcgcccgtggcctgccgcgcgagcacttgctgcaggtggacgtcggtcatggcgcactgttcggcctgcgcgccggagagggcgatgatcgctggcacgaatgccgggaaggggaatag

SEQ ID NO: 30080 - DNA, 1275 bp, Pseudomonas aeruginosa
atgaaaacaatatggtttaaaacctctctcgcactgaccattagcgctgtctccacctacaccctcgccaacggcatcgccatcaacgaacagagcgccagcggcgccggcaccgcctacgccggccgcgcctcgtccgcgctcgatgccagcaccatctacggcaacccggccggcctgtccaagctgaaacgcaccgaagtcagcggcggtctggccatcgtcaaggccaaggacgacatcagccaggcccacagcaccgcccagggcagcaacaagggcgactcggtaccgctggccgccgtaccgttcggctacttctccacgccgatcaacgaagatttcactttcggcctgggcatctacgtgccctacggcatcatcaacgattacgaaaacggcttcatgggcagctcccacggctcctatagcaaggtgcaggtgatcaccgtgcagccgaccatcgcctggaagatcaacgacaaggtttccgtcggcttcggtccgaccttcaaccgcatcgacggccagttgaagaacaccctggccaccaatggcctgctcggcagcaacggcgataccaagatcaacatcaagggcgacgacaccgccatcggctacaacgtcggcgtgatggtcgacctgaccgacgacaccacctggggcctgacctaccactccaaggtcaagtaccacctgggcggcaacaccgaagtgaagaacgctccgggtgccctgggcctgaacggcaagtacgatgccaagctggacatcaccctgccggaatcggtggatacctccatcacccacaagttcgacgacaagtggacgggctacctgggcgccgtctggacccgctggagccgcctggagaagatcgaggtgcgcaacagcggcgtaccggcgctcggccaggccctgggcttcaacaccatcggcgaagacctgaactggcgcgacacctggtccttctcggtaggtacctcctaccaggccaccccggagtgggtgctgcgcaccggctttgcctacgagccgtcgccgacctccaacgaggaccgcaacgtgcgcatcccggtgggcgaccgcaaggtcttcaccgtcggtgccggctggtcgccgaaccaggacctgaccgtcgacgtggcctacgcctacctgtgggaaaccaccgccggcgtcaaccaggaaggcagcgccctgcagccggcctacagcgccaagtacgacaacagcgcgcatggcctgaccgcccaggtcacctatcgcttctga

SEQ ID NO: 30081 - DNA, 294 bp, Pseudomonas aeruginosa
atgaaacgaatctgttccgtctacaagagcccgcgcaagagcgagatgtacctctatgtcgacaagcgcgaggcgttgagccgcgtgcccgaggccctgctggtgccgttcggcgcgccgcaacatgtcttcgacctgctgctcacccccgagcgccaactggcccgcgaggatgtcgccaaggtcctggagaacatcgagaagcagggcttccacttgcagatgccgccgggcgaagaagagtacatcgagcatctcccggaagagttgctgcgcatgaacgacccgctctga

SEQ ID NO: 30082 - DNA, 276 bp, Pseudomonas aeruginosa
gtggcccataccatccatgggaagaagaagctcctggcgcgggtgcgccgcatcgccgggcagacccgggcgctggagcaggcgctggaagagggcagcgaatgcgcggcggtgctgcaacagatcgcggcgatccgcggtgcggtgaacggcctgatgaacgaagtgctggaggggcacatccgcgaacacctcggcgccgagcaggcgagcgcggagcagcgtcgcgaagacctggaactggtggtgaccgcgctgcgttcctacctgaagtag

SEQ ID NO: 30083 - DNA, 540 bp, Pseudomonas aeruginosa
atgggcctgctcgccgcgatcatgctggccgtctacctggcgaatccgttcggcaccgccagtctcgacccgcgcgcacggctcctcggcgtggcgctgtacaagatcccttcgcgctcgatggaaccgaccttgcaacagggcgacttcatcctcgccaacgccgcgcgctacgccttcgccgacccgcaggtcggcgacctggtggtgttccgcttcccgccgcagcgcagcatcgcctatgtgaagcgcatcgccgggatacccggcgatcgcgtgcggatcgatggcggccggctctacgtcaatgagcgcccggtgacggagccctacctggcgcaacaggcgctgcgccagccggaatccctgcgcatggccgagcggaccgtccccgccggccaatacttcatgctcggcgacaaccgcgacaactccaacgacagccgctactggggctacgtaccgcgcgccgacctggtcggccgggtgttcgccgtctggtatgccgaggacacccggcgcatcggttcggtgcgctga

SEQ ID NO: 30084 - DNA, 1116 bp, Pseudomonas aeruginosa
atgagcactgccgaacgcgcacccatcctgctgacccccggtccgctgaccacctcctaccgtacccgtcgggcgatgatggtcgactggggctcctgggacagcgatttcaacgaactcaccgccagcgtctgccagcgcctgctgaagatcgtcggcggcgaaggcagccacacctgcgtaccgttgcagggcagcggcaccttcgccgtggaagcggcgatcggcaccctggtgccgcgcgacggcaaggtcctggtgttgatcaacggtgcctacggcaagcgcctggcgaagatctgcgaggttctgcaacggcccttcagcaccttagagaccgaagagaacgtgccgaccaccgccgctgacgtagagcgtctgctggccgccgatccggcgatcagccatgtggcgctgatccactgcgagaccagcaccggcatcctcaatccgctcgaggccatcgccaaggtcgtcgagcgtcacggcaagcgcctgatcgtcgatgccatgagctccttcggggcgatcgggatcgatgctcggaaagttccgttcgatgccttgatcgccgcctccggcaagtgcctggagggcgtccccgggatgggcttcgtcttcgcccgcagcgccgccctggaagccagcgccggcaactgccactccctggccatggacctgcaggaccagcacgcctatatgcgcaagaccgggcagtggcgcttcaccccgccgacccatgtggtcgccgccctgcacgaagcgctcagccagtacgaagaggagggcggcctgccggcgcgccagcggcgctacgcgagcaattgcgaaacgctgctcggcgagatggcccggctcggtttccgcagcttcctgccggcggaaatccaggcgccgatcatcgttaccttccacgcgccgcgcgatccgcgctaccgcttcgccgacttctaccaacgcgtgcgggagaagggcttcatcctctatccgggcaagttgacccaggtggaaaccttccgcgtcggctgcatcggccacgtcgacgccgcggagatgcggcaggcggtcgccgccatcggcgaggcgctgcgcgaactggaagtcctcgagatctga

SEQ ID NO: 30085 - DNA, 1542 bp, Pseudomonas aeruginosa
atgaacccttcgcgtcgtgtcgccctggtcgccgccatttacctgggaaccttcatcgcctcgctcgacatcagcatcgtcaacctcgccctgccgacgctgcagtacgccctggataccgacctggccggcctgcagtgggtggtcgacgcctatgcgctgtgcctgagcgccttcatgctgtcttccggaccgctgagcgaccgctacggtcgcaagctgacctggctgctcggggtcggcctgttcagcttcggttcgctgctctgcgcgctggccacctcgctgccgctgctgctgttcggacgcgcggtccagggcatcgccggggcgctgttgatacccggcgcgctgtcgatccttacccaggctttccacgatcccggccagcgcgcccaggtgatcggcggctggacctccttcagcgcgctgtcgctgatcctcggcccgctgctcggcggcctgctggtggagcacgccggctggcagagcatcttcctgatcaacctgccgctcggcctgctggcgctcgccctgggcctgtggggcatcgaggaaaccgcgcaccccgagcacgccgccttcgatcccctggggcagctgctcagcgtggtctggctgggggcgttgacctacgccctgatcgccgcgggagagggcggctggttgtctcccacggcctggccggcgctgctcctggccggggtcggcctgcttggcttcctcttcgtcgagcggcggaccgcccgaccgctgctgcccctggggttgttccgccaggccgggttcgccgtctgcaacctggcctcgttcgtcctcgggttttccggctacgccagcctgttcttcctctccctgttcttccagcaggtgcagggtgcctcggcgcagcaggccggcttctacctggcgccgcagttcctcgccatgggcgcactgtccatgctgttcggccggttgcagcggcacgtaccgctgcgacgcctgctggtgctgggctacctggtgatcggcctggccatgctggcgctggccgcttgcggtacgggaaccgcgtatccctgggtcggcctgttgctggtggcgctcggcctgggcatgggcctggccgttcccggcaccggtctggcggtcatggcgagcgtggcccgcgagcgttccgggatggcctcggcgaccatgaataccctgcgccaggccggcatggccgtcggcatcgcgttgctgggagcgctgctgagcgggcgggcgatcgtcgtcctgggcgatcggctggaggggctggggattgccgatgcgcaacggctcgccacccaggcggtcacggcccatcgcttgcctggttccctggcggggctcgacgccgagctgccggccgcgctggccgagggcttccgtctggctatgctggtggccggagccagcgccctgctggccgccgcgctgctctggcgcctgcgcgttagcgccggcccggcggcggatacagttggcgcatctggacgaacggcaggggtacagttgcaggccgatagacactga

SEQ ID NO: 30086 - DNA, 996 bp, Pseudomonas aeruginosa
atgaccaaagcaaacccgtttgccgcattgaaatggctttccctggcgcccgcgctgctgctcggcggctgcgacatgaccctgttcaacccgaaagggcaggtgggcatggacgagcgcaccctgatcattaccgcgaccctgctgatgctgatcgtggtcatcccggtgatcgtgatgaccctggcgttcgcctggaagtaccgcgcctcgaatacccaggccgagtacaagccggactggcaccactccaaccgcatcgaggcggtggtctggctggtgccctgcgtgatcatcgcgatcctcggctggatcacctgggaaagcacccacaagctcgacccgtaccgtccgctggactccgaggtcaagccggtcaccatccaggccgtttcgctggactggaagtggttgttcatctacccggagcagggtatcgccacggtcaacgagatcgccttcccgaaagacaccccggtgaatttccagatcacctcggattcggtgatgaactcgttcttcatcccgcagctgggcagccagatctactcgatggccgggatgatgaccaagctgcacctgatcgccaacgaagaaggcgtattcgacggtatctccgcgaactacagcggcggcggtttctccggcatgcgcttcaaggccatcgccacctccgagcagggcttccaggactgggtcgccaaggtcaaggcggcaccggccagcctgtcgatcggcacctatccggaactggtcaagccgagcgagaacgttccgccgacctacttctcttcggtcagcccggaactgtttggccacatcctcaccaagtacgagcaccacggcgacgccaagggtgccgcgcacggcgagcacgccggggctgagcacgaagccgccatgaccggtcacgacatgcaggacatggacatgcaagccatgcagggcatgaaagacatgaaggacatgcacatgcaaccgagtacccaggagtaa

SEQ ID NO: 30087 - DNA, 1977 bp, Pseudomonas aeruginosa
atgttcgggaaactgacactctcggccgtgccttaccacgagcccatcgtcatggtcacactggccgtcgtcgccctgctgggcctcggcgtggtcggtgcgatcacctactaccgcaagtggacctacctgtggaccgagtggctgacctcggtcgaccacaagaagatcggcgtgatgtacatcgtcgtcgccctggtcatgctggtccgcggcttcgccgacgcgatcatgatgcgcggccagctggccctggccgaaggcgccaaccacggctacctgccgccggagcactacgaccagatcttcaccgcgcatggcgtgatcatgatcatcttcatggccatgccgttcatgaccggcctgatgaacctggccgtgccgctgcagatcggcgcgcgcgacgtggcgttccccttcctcaactcgctgagcttctggctgctcgtggtcagcgccatgctggtcaacgtgtcgctgggcctgggcgaattcgcccgtaccggctgggtggcctatccgccgctgtcggagctggcctatagccccggggtaggggtggactactacatctgggcgctacagatatccgggatgggcacgttgctcacggggatcaacttcctggtcaccgtgttcaagatgcgtaccccgggcatgaagctgatgcagatgccgatcttcacctggacctgcaccttcgccaacatcctgatcgtcgcctcgttcccgatcctcaccgctgcgctgggcctgctgtcgctcgaccgctacctggacatgcacttcttcaccaacgagctcggcggcaacgccatgatgtacatcaacctcttctgggcctggggccatcccgaggtgtacatcctgatcctgccggccttcggtatcttctccgaggtcaccgcgaccttcgccggcaagcgcatgttcggctacaagtcgatggtctgggccagcgccgcgatcaccttcctcggcttcaccgtgtggctgcaccacttcttcaccatgggttcgggcggtgacgtcaacggcttcttcggcgtggccaccatgctgatctcgatccccaccggggtgaagctgttcaactggctgttcaccatctacaagggccgcctgcgcttcagcacgccgatcctgtggaccctgggcttcatggtgaccttcaccatcggcggcatgaccggcgtcctgctggccatcccgggcgcggacttcctgctgcacaacagcctgttcctgatcgcccacttccacaacaccatcatcggcggcgcggtattcggctacctggccggcttcgccttctggttcccgaaagcgttcggcttcaccctcgacgagaagtggggcaagcgttccttctggtgctggctggtgggcttctacatggccttcatgccgctctacatcctcggcttcatgggcatgacccgtcgcctgaaccactacgacaacccgctgtggaagccctacctggtggtcgcgttcttcggcgccgtgctgatcttctgcggcatcgcctgccaactgatccagctgttcgtctcggtccgcaaccgcaagcaactggccgacgtcaatggcgacccgtgggaaggccgcaccctggaatgggccacttcctcgccgccgccgttctacaacttcgccgagctgccgaaggtacaggacgtggatgccttccacgacatgaagaaggccggcaccgcctaccgcaagctgccggcctaccagccgatccacatgccgaagaacaccgccgcgggcttctccatcgccgtgttcgccttcgtcttcggcttcgccgccatctggcatatctggtggctcatggcggtcggcttcgtcggcatgatcggctccttcatcgtgcgcagctacaaccaggacgtcgactactacgtccagcccgaagagatcgagaagatcgaaagcgcccgtttccagcaactcgccaagcaggtctga

SEQ ID NO: 30088 - DNA, 1674 bp, Pseudomonas aeruginosa
atgcaacctgtgctcttcagaaccctgtccctcggcgtcgccattgccgccgcatcctcctcggccttcgccgccacgctcgacggcggcgccgtcgccgcgcccgacgagtacggcgccaaggtcgccgcgcagatcctcaaggccggcggcaacgcggtggacgccgcggtggccaccgccttcaccctggcggtcacctaccccgaggccggcaacatcggcggcggcggcttcatgaccctgtacatggacggcaagccgtacttcctcgactaccgcgaggtggcgccgaaggccgcgagcaagaccatgtacctggacgacaagggcgaggtgatcgagaacctcagcctggtcggcgccaaggccgccggcgtgccgggcaccgtgatgggcctctgggaagcccacaagcggttcggcaagctgccctggagcgagctgctgaccccggccatcggctacgcgcaaaagggcttcaaggtcgccgacaagcagttccagtaccgccaggacgccgtcgccctgttcaacggcaagaccaacttcggcgactacttcggccacatgaaggccggcgaggcgttcctccagccggacctggcgaagaccctggagcgtatcgccgacaagggcccggacgagttctacaaaggccataccgccgacctgctggtggcacagatgcagcaggacaagggactgatcacccaccaggacctcgccgactacaaggtcaggtggcgcgaaccgatgcgcgtcgactggcagggcaacacgctctataccgcgccgctgccaagctccggcgggatcgccctggcccagttgctgggcatcaaggaaaaccgtgccgccgacttcaagggcgtcgagctgaactccgcgcgctacatccacctgctggcggagatcgagaaacgcgtgttcgccgaccgcgccgactacctcggcgacccggacttctccaaggtcccggtggcgcgcctgaccgatccggcatacctgaagcagcgtgccgccgaggtcaatccgacggcgatctcgccgaccgagaaggtccgtcccggcctggagccgcaccagaccacgcacttctccatcgtcgacgccgacggcaacgcggtgagcaacacctacaccctcaactgggacttcggcagcggcgtggtggtcaagggcgccggcttcctgctcaacgacgagatggacgactttagcgccaaaccgggcgtggccaacgccttcggcgtggtcggcagcgacgccaacgccatcgagccgggcaagcgcatgctctcctcgatgagcccgagcatcgtcacccgcgacggcaaggtcagcctggtggtcggcactcccggcggctcgcggatcttcacctcgatcttccaggtgctgaacaacatctacgacttccacctgccgctggagaaggccgtggccgcgcagcgcgtgcaccaccagttgctgcccaaggacacgatctactacgacgcctacgcgccgctcgccggcaaggtcgccgaggagctgaaggcgatgggctacaccctggaggaccagggctggaacatgggcgatatccaggccatccgcgtcgacggcaaggccctggagaccgcctccgatccccgtggccgcggcgtcggcctggtggtgaaaccctga

SEQ ID NO: 30089 - DNA, 909 bp, Pseudomonas aeruginosa
atgcgtatcgctcccagtctgctgagcaccgccatcgtggccgctctgttgtccgctccggtcgtcgctgacgagctcaccggcacgctgaagaagatcaaggaaaccggcaccatcaccctcggtcaccgtgacgcttcgattcccttctcctacctcggcaccgagccgggcaagccgatcggctactcccacgacctgcaactgaaagtggtcgaggcggtgaagaaggaactcaacctccccgagctgaaggtccgctataacctggtcacctcgcagacccgcatcccgctggtgcagaacggcaccgtggacatcgagtgcggctccaccaccaacaacgaagagcgccagaagcaggtcgacttctccgtcggcatcttcgaggtcggcacccgcctgctgtcgaagaagaccgccaacatcaaggacttcgacgacctcaagggcaagaacgtggtgaccaccgccggcaccacctccgagcgcctgctcaaggccatgaacgcggacaagaagatgggcatgaacatcatctccgccaaggaccacggcgagtccttcatgatgctcgaatccggccgcgcggtggccttcatgatggacgacgcgctgctctacggcgaaatggccaaggccaagaagccggacgactgggtcgtcggcggcaccccgcagtccttcgagatctacggctgcatggtgcgcaagggcgacgcggcgttcaagaaagtggtcgacaaggccatcaccgatacctacgcctccggcgaggtcaacaagatctacgacaagtggttcacccagccgatcccgccgaagggcctgaacctcaacttccccatgagcgaagagctgaagaagctgatcgccagcccgaccgacaaggccgccgagcagatgtaa

SEQ ID NO: 30090 - DNA, 771 bp, Pseudomonas aeruginosa
atgagtttcgatccctttggtgacttcgaaacgactggctacctgcgcaacagcttgggtctgaaagatccggcggaagtgaaggaaaacgaacacttctccttcgaaatggggctcgatgaagccctttcctatctcgaacgcacaaagaacctgaactaccaggcccttttgcaggtacacaggttgttgttcgagaaattctacccctgggccgggcgtgaccgtctcgagctggtccctcatctttctgtctggaaaggtcccaagggcgctcccagacgtaccttcttcgaaagtcccgcgatgatcgaacgcgcggtggactatgccctgagcctggcgagcaagaagcagggattcatgcagaagcccggtgaggtcatgggacttctttgctttgcgcatccctttctagacggcaacggacgctcgattctgctgttctacatggagctcagttatcgagccggctttgccatcgactgggccagcacacgcaaggacgactatctccaggccctggacgatgagattcacaatcctggcaagggtcacctggaccgctaccttgtcccattcgttgtgcctatccacagccgtgatcagtggcctgagatcatcgggcaaatcaacggactcgatggtatggatggtgagaacattacctacgaaaacctcgatgatcccgaggttcagaaagtctatgcggcgtatcacgccgagcatccctacccagccaaagatggcacacccgactccgaaccctaa

SEQ ID NO: 30091 - DNA, 1143 bp, Pseudomonas aeruginosa
atgcgtattctcgccgatgaaaacattcccgtggtcgacgccttcttcgccgaccagggctccattcgccgcttgcccgggcgcgccatcgaccgcgcggcgctggccgaggtcgacgtgctgctggtgcgctcggtcaccgaggtcagccgcgcggcgctggccggctcgccggtgcgcttcgtcggcacctgcaccatcggcaccgaccacctcgacctcgactacttcgccgaggccggcatcgcctggtccagcgcacccggctgcaacgcccgcggggtggtggactacgtgctcggctgcctgctggcgatggccgaggtgcgcggcgccgacctggccgaacgcacctatggggtggtcggcgccgggcaggtcggcgggcggctggtggaggtgctgcgcgggctgggctggaaagtgctggtctgcgatccgccgcgccaggcacgcgagccggacggcgaattcgtctcgctggaacggctgctggccgaggccgacgtgatcagcctgcacactccgctgaaccgcgacggcgaacacccgacccgccacctgctggatgagccccgcctggccgccctgcgtcccggcacctggctggtcaacgccagccgtggcgcggtggtcgacaaccaggccctgcgccgcctgctcgaaggcggcgccgacctggaagtggcgctggacgtctgggaaggcgaaccgcaggccgaccccgaactggccgcgcgctgcctgatcgccacgccgcacatcgccggctacagcctggaaggcaagctgcgcggcaccgcacagatctaccaggcctactgcgcctggcgcggcatcgccgaacgcgtgagcctgcaagacgtgctgccggaaacctggctcgccggcctgcaactcaaccccggctgcgacccggcctgggcgctggccacgctgtgccgcgcggtgtacgacccgcgcagcgacgacgccgccttccgccgcagcctgaccggcgacagcgccacccgccgcgccgccttcgacgccctgcgcaaacactacccgccgcgccgcgagatcaccggcctgcgcgtcgccaccggtggacaggcggagttgcagcgggtggtgcgggcgctgggggcgcagttggtctag

SEQ ID NO: 30092 - DNA, 1806 bp, Pseudomonas aeruginosa
atgctcaaaagaacactactcagcgccgctgtagcttcggcactgtttgctggagtcgcgaacgctgccggagtggttgctattgccacaagccccactctggaggcgaactcgcctggtgcaaccgagcagtacggaccaggacaggccaactatgtcgtcggcaagagtgtggaaaatggtgccaacctcgacagcaaggcggccaacatcaccctggctcaggagattttcggcaacaagtccgaagaaactacctttgacctacccagcgttacctacaccatcgatccagtgaaggctggaaatgccgctgcgggccacaccatcaagctgacccttggtcgtaccgtcgtgcgcttcgccaaggccgtgaccgccaaccagatcaagatcggcgccctggcggcgggtagcggcttcgtcatcaccagcggcactggcgccactgacaacacgcttgagctgcgcctcgaccaggcgggtgccgacatgatcaagcagaccgcgaccggcggcaacgtggtgttcttcaacttccgcgagccgagcagccaggacagccagcctgccaaggtcaccaacatgcgcgctccgcttcagggcgatgccaccttcgtggctggaagctggaatccgaaagtgagcctgcagaacgacccgctgaacgaattgcgtttccaggtcacggtttccgcccagttcgataccaccactggcgccgatgccggcaaccctgcgaataacgattctgcaccgcccctgaccattttcacttcgctgcccgcggtttactgggacgttctcaacaccaaccagtatgggcagaatcgcgtcctgcatccgttgaacctgaacaatcaggatcgctccttcgataccacggtgtccgtcggtggcgataacaccgattattatggtgccaactatgcgcgtctgggcgccgtacggctcggcatcaatacggatgtgctcaacgaagcgggtcgaaccgtgtttggtttcgccggtggcgacaaggtgaccagcaccctgtcgggtaacttcaacgggatcagcgacatcggcctgaccaccgggaactgctccgcctttgccgccaatccggggtctgccgccaagctctggaattctgccgccatcgaaggtgtagtggatgcgcagggcaacggtactttgccggtatcgttcgacaactcgaatatcaaccagacctacaacgtctgcgtgaaggcttccggcaccgtgccgatgcaggcgctgcaacgtttcgacgtgggtgatctgaaggtcgacttcgagaacgtacgctatgtcgaccgtaccattgcaggcaaccgtctcgacgagttctggaagaacagttgcgtcgccagtctgttcaatctgcctggctccaatgtttccgaccagttcttcattcgtctgaccaacaccagcgacgatggtcgggacggcaaggtgcgcggggtactgttcgaccagaacggtaagcgttatccggcgactggcagcacctacctgaccgactcgagcgggaagaccgccctgaaagcgcacgaaaccggtgtgtacaccgtaaccgaagtagccaaggccttcggtatcgacggcaccaactggaacggtgccaacggtcgcgcacgtctggtcctggaaggcgagttcccaacctgcgaggcgctcggcctgatccgctctgccaatggcaccatcaccaacatgacctccaccacccaaggcaacttcaacgaagatggctcgtccacctcggagaaccacaaggctggtaacaaccgcaactaa

SEQ ID NO: 30093 - DNA, 1269 bp, Pseudomonas aeruginosa
atgaagggtaatgcgccggtacttgcggccgtagatataagcaagggttttagagtctacagggctcctcatcaaaggatgttgcaggccatctggggtgagagaaagaaattttattcggaattctgggctctgcggaatgtgagtttccaggtttttcctggggaggttgttggagtaatcggctgcaacggctccgggaagtccaccttgctgcagatacttgcgggtaccttgcgccctacgagtggacaggtggttcgcccagaaagggtagcggcattgttggagctgggggccggtttcaacatggagtacaccggcagggaaaacataatcttcaatgccatgcttcttggattgggcgagcaggagatttctgaacgcctcgacgagataatccagtttgccgatatcggtgagttcatcgatcgtccggttagaacatattcgagcggtatgttcgtgcgtttggctttctccattgcggcatatgtcgatgccgatgtgctgatcgtggacgaggccctggcggtaggtgacgccgcgtttcagttcaaatgcctgaaccggcttgaagaactgctgctgaaaggcatcaccatcctgctggtctcccacgatatacagttgatcaagagttattgtagtcgagcgatctatctatccaaaggtagagtgatattcgatggcgactgtgaaacagccacggaactctatctgcgggacagtatagagacacagcgggcggaagtccgctcaggaagcctgatcgcttctggcgaacacgggaactcggtaattgcatatggaaatgggcagggcaggtttctatccatccgtatgggtgtacttgacgaagcccgggattacttcgattcgggcgaacgtgtctgggtcgaggtacttgtgcaatttgacctacccgtcccggagcacccaaaaatcaccctgactatccgtgaccagcgcggttacaacctctatggcataaacaatttattgctgggcaaggctctgaatgtcgagcctgacgggcgcttgagaacacgtatcagcttcgactgcgacttgcaggctggcgaatacgccttgacgtttcgtctggagaactctttgtcggagtccgtttgcgaactcatggataaaaaggtcaatgcggcgatattcagggtcttcaattcgcccaagtgcttcgatgcagtggtgaatctgcatggagcattcgagccggttccgttctgctgcgagacccgggctacccaatga

SEQ ID NO: 30094 - DNA, 591 bp, Pseudomonas aeruginosa
atgaatcctcgtgaacatggaaaacgatcgatcgataacgagacacgcagtgcgctcaagcgccaacgcccagcggtcatctggctgaccgggttgagtggcgctggaaaatccactattgcgagtgccctggaactagcgcttttcgaacagaagaaacatacgtttctcctggacggcgacgatctccgccttggcctgtgccgaaaccttggctacagcgacgaagatcgcaccgagaacattcgaagaatcgcggaagtggcaaagatcctgctggaagccggccttatcgtgatcgtggcaaccatctcgccattttcgcgagacaggcgcctctctcgggaacttatcggcatcgagcatttcatcgaggtctttgtcgatacgccgctctcggaatgcgagagaagagatcccaaaggcctgtacaggaaagcacgctcgggcaagatcgaaaacttcaccgggatcgactcgatctacgaaacgcccgcacagccgaacataacgatcgatacactttcagaagaccccgacctggcggtgaagcgaatcatttcctacctggagacgaaccagccagcctga

SEQ ID NO: 30095 - DNA, 960 bp, Pseudomonas aeruginosa
gtggacaagaatctccaccagcccctgggcggcaatgaaatgccccgcttcggcggcatcgccaccatgatgcgcctgccccatgtccagtcccccgccgaactcgacgccctcgatgccgccttcgtcggcgtgcccctcgacatcggcacctccctgcgctccggtacccgcttcggcccccgcgagatccgcgccgaatcggtgatgatccgtccctacaacatggccaccggcgccgcccccttcgactcgctgaacgtggcggacatcggcgacgtcgcgatcaacaccttcaacctgctggaagccgtgcgcatcatcgagcaggaatacgaccgcatcctcggtcacggcatcctcccgctgaccctcggcggcgaccacaccatcaccctgccgatcctccgcgcgatcaagaagaagcacggcaaggtcggcctggtccacgtcgacgcccacgccgacgtcaacgaccacatgttcggcgagaagatcgcccacggcaccaccttccgccgcgcggtggaagaagacctgctggattgcgaccgtgttgtgcagatcggcctgcgcgcccagggctacaccgccgaggacttcaactggagccgcaagcagggcttccgcgtggtgcaggccgaggagtgctggcacaagtcgctggagccgctgatggccgaggtccgcgagaaggtcggcggcggccccgtctacctgagcttcgacatcgacggcatcgacccggcctgggcgcccggcaccggcaccccggaaatcggcggcctgaccaccatccaggcgatggaaatcatccgcggctgccagggcctggacctgatcggctgcgacctggtcgaagtctcgccgccctacgacaccaccggcaacacttcgttgctgggcgccaacctgctctatgaaatgctctgcgtcctcccgggcgtggtgcgtcgctga

SEQ ID NO: 30096 - DNA, 1953 bp, Pseudomonas aeruginosa
atgtcactgctcaagcaattgttcctcgccatctgcctgttcctcgtcgtcgccttcagcggcagcttcgtcagcagcgtggagaactcccgcgagcagttgcgcggccagttgcgctcccacgcccaggacgccgccaccgccctcggcctgtccctgacgccacacgtggacgacccggcgatggtgcaactgatggtcagctcgatcttcgacagcggctacttcgccagcatccgggtgatcgacatcaagagcggcaagccgctggtcgagcgcgtgcaggcgcatgccgagcgtacggtgcccggctggttcgaacgcctggtggatctccagccccagggtggcgacgcgctgatcatgcgcggctgggaacaggcggcgcgggtcgaggtggtcagccatccgcaattcgccctggcgcgcctgtgggacagcgccctgggcagcctctactggttgctggcctgcggcgcggcgagcctgctgcttggcggctggctgctgcgccgccaactgcgcccgctcgaccagatggtgcgccaggcccatgccatcagccggcgggaattcctcagcctgcccaggctgccgcgcacgccggagctgcgccgcgtggtgcaggcgatgaaccagatggtggagaaacttcgcacgctgttcgccgaggaggctgcgcgtagcgacaagctacgcgcccaggcctaccaggacagtctcaccggcctgcccaaccggcgcctgttcgacgcccgcctcaacgaacagctgggtgccggcgagcacgagcatgccgggcagctcctgctgctgcgcctgaacgacctgaacgggctgaaccagcgtctcggcgggcaacgcacggatgaattgatccaggcggtcgcccgcttgctggtcgactcctgcggccagcaagggcgcgccgactggctgctggcccgcagccgcggcggcgagttcgccgtgctggctcccggttgctcccgcgagcaggccgaacgcctggccgaggaactctgcgaaggcctggagaaccttgcccgcaccggtgccagcgatctcacgccggtcgcctatctcggtatcagcgcgttcgccgaaggcgactcgcccgcggatctcctggcccgtgccgaccaggccctggcccaggccgaaagccagcccgcccagccctgggcgagccaggacggcaccgcgctcgcggcgctcaacgatagccaggactggcacgactggatcgaccaggccctgacggagcgccgcctgctgctctatttccagccggtggtggactgcctggacacccagcgcgtcctccaccacaaggtcctcgcgcgtctgctcgacccgcaggccacggccatcgccgccgggcgcttcctgccctggatagaacgtttcggctgggccgcgcgcatggacctggcgatgctcgaacagagcctggagcacctgcggcgccatccacggccgctggcgctgagcctgtcggccgccagtgtccgcaatgcgcagacgtttgccccgctactggccctgctcaaggcgcatccgcaggaggcgcgccagctgaccctggaactggacgagcggcacctgccagccgcggccgaactggaacgcctcagccaggtcctgcgcgaactgggctgcggtctcggcctgcagcatttcggcggccgcttcagcctgatcggcaaccttacccatctggggctggcctacctcaagctggacggctgctacctgcacgccgtcgaccgggaaggcgacaagcggttgttcatcgaagcggtctatcgcaccacccacagcatcgatctaccgttgatcgcggaacaggtggaaaccctcggtgaactcgaagtactgcgggaaatgggtttgcgtggcgccatgggacgcctgttcggcagcccggcgccctggtccggggatgcctga

SEQ ID NO: 30097 - DNA, 1137 bp, Pseudomonas aeruginosa
atggccgagagcgagagcgggcaggacaagacagaggaacccacggagaaacgccgccgcgaggcgcgcgagaaagggcagttgccgcgttcgcgggagctgaacaccctggccatcctcatggccggcgccggcggcctgctgatctacggcgccgacctggcgggcgccctgttgcgcctgatgcgcagcaatttcgagctgtcccgggaaaccgcgatgaataccgagagcatgctgcaattgctcggcgcttcggcctacctggctgcccaggggctctggccgatcctgctgatgctgctggtggcggcgatcgtcgggccgatcgccctcggcggctggctgttctcgatggacgccctgcaacccaagttcagccggctcaacccgctgtcggggctgaagcggatgttttccgccaagtcgctgctcgaactgagcaaggcgctgatcaagttcctggtggtgctggcggtggccctgctggtgctctccgccgaccgcgacgccctcctggcgctggcgcaccagccgctcgagcaggcgatcctgcacagcgtgcgggtggtcggctggagcgccttctggatggcctgcagcctgctgctgatcgccgcggtggacgtgccctaccagatctgggacaaccgccagaagctgctgatgaccaagcaggaagtccgcgacgaatacaaggactccgagggcaagcccgaggtcaagtcgaagatccgccagatgcagcgcgagatggcgcagagacggatgatggcggcggtgccggaggccgacgtggtgatcaccaacccgacccacttcgccgtagccctgaagtacgacccggcgggcggcggggcgccgctgctgctggccaagggcaacgatttcctggccctgaagatccgcgaggtggcccaggagcacaaggtgatggtcatggagtcgccggcgctggcgcgagcggtgtactactccaccgagctggatcaggagattcccgccgggctctatctcgccgtggcccaggtgctggcctatgtctaccagctcaagcagtaccaggccggcaagggcaagcggccgagcccgttgaaggacctgccgatcccgccggacctgcgtcgcgacgagtga

SEQ ID NO: 30098 - DNA, 1344 bp, Pseudomonas aeruginosa
atgtctgcaatcacgcgttatctcgccatgcttcgcctgttcggcatgctgctctgcgccgccgcgattccctccgttgccaccgcgacggtgccggtcaccgtcgcggtggcagcgtccgatgtcgaggaggaggccgtggaggcatcggcggtcggcgccgaggccgaggcagcgcgcgatgcgggctacgagtccgcggaggttccagcgctggcgcggcgggtgaccgaccttaccgcgaccctcgacgccgccgagcgtgcccgcctggaagcttcgctggccgcgctggaggcccggaagggtgcccaggtagcgatcctgatggtgcccagcacctatccggacagcatcgaggcctatgcgacgcgggtcttcgaggcgtggaagctggggcgcaaggggatcgatgacggcgtcctggtgctggtggcgaaggacgaccggcgcatgcgcatcgaagtcggctatggcctggaaggaacgatcaccgacatcgatgccgggcggatcatccgcgaatacatgacccctgcgttccgtcagcaagactacgccggcggcctggaagcggcggcgcagcgcctggtacgactgatcgacggcgaggcgttgccgccgccgccgcgcgacccgctggagcccggcgcggtacggcagaccctggctatcgcattcctgctcggcgctctcggcggggtggcgctgctggtacgtccgcgcgcctggtactggaccctgggggcggtagtggcgctcgctgcggcgctggcactggggcggcactggccggcaggggcgatggtggcgctggcggagatggtggcggtcctgggcgtcggcttcggcgcgttgctcaagtattcgcgcggtgcccgctggttcttcgccattcttgtgctctatgcgctggggctgttctgggcctaccgccgttatggcctgccggtgctccattacggattggccgtgccgctttcgctgggactgagcctgctgatgctggccggtgcctggcaggggctgcgcagaggacggcgctgggcctacctgccgggcctgctcggcctgctgctgaccctggccctggagtgcctgctgttgctggtggacgacccgctgaacagcatcgaggcgctgatcatcctgcccgccgcttgcctgccgctgctcatcggttgcaatttcagcgccggcggctcggggggagggcgtcgacgcggcggcgattacgctagctcatcgggttcctcgtcgtcgagttcgtccagttcgtcttcggactcgttctccggcggcggaggctcgagtggcggcggtggcgcctccggtagttggtga

SEQ ID NO: 30099 - DNA, 375 bp, Pseudomonas aeruginosa
atgaaaattctcatcgtggacgacttttccacgatgagacgcatcatcaagaacctcttgcgggacttgggcttcaccaataccgccgaggccgacgacggcaccacggcgctgccgatgctgcacagcggcaatttcgactttctcgtcaccgactggaacatgccgggcatgaccggcatcgatctgctgcgcgcggttcgcgccgacgagcgcctcaagcacctgccggtgctgatggtcaccgccgaggccaagcgcgaccagatcatcgaagcggcccaggccggggtcaacggctatgtggtcaaacccttcaccgctcaggtcctgaaggaaaagatcgagaagattttcgagcgggtcaacggctga

SEQ ID NO: 30100 - DNA, 789 bp, Pseudomonas aeruginosa
atggtgcttggtaacgattccacgggcgacgaattcgaatcgaccctgaaaaaacatgcgcgcgaactggtggactgtctcgaacgggggcacttccagcaggcggtgcaattgatccaggagctcagccaggccagggaccgtggcctctaccaggaagtgggcaagctgacccgcgaactgcacaacgccatcgtcgatttccagatcgacccgcattccccccacgcgcaggaaatgtcgcagatcgccgatgccaccgatcgtctttcctacgtagtggaaatgaccgagaaggccgccaaccggaccatggacctggtggagcagagcgccccgctggtcaaccagttgggcgacgattcgcgggagctgcaccaggagtggcaacgcttcatgcgccgggaaatcgacgctgacggcttccgcgagctggccaagcgcatcgaacagttcctcgtgcgcagcggcgagaacgccggccagttgtcctcgcagctcaatgacatcctgctggcgcaggattaccaggacctgaccggccaggtgatcaagcgtgtcaccaagctggtcaccgaggtcgagagcaacctcgtgaagctggtctggatggccggccaggtggaccgttacgccgggatcgagcacgaccacgtgagcatgcgccaccaggccgcgctggagcgttcggccaagggcgaggggccgcaggtcgccgcggaaaaacgagaggatgtggtgtccgggcaggatgacgtggacgatctgctgtccagcctgggtttctga

SEQ ID NO: 30101 - DNA, 672 bp, Pseudomonas aeruginosa
atgagcaacgtcttcagcctgctcctggcgcgcgaggcgcgcctgctgttccgccgaccggcggagctggccaatccgctggtgttcttcgccatcgtcatcgccctgttccccctggcggtcgggccggagagccaattgctacaaaccttgtcgcccggcctggtctgggtggcggcgctattggccgtgctgctctcgctggaagggctgttccgcagcgatttcgaggacggttctatggagcagtgggtcctttcgccgcaccccctggctcttctggtgctggccaaggtgctggcacactggctgttttccgggctggccctggtcctgatgtcgccgctgttcgcgctgatgctgggcctgccggcccgttgcataccggtgctgctgctttccctgttgctcggtacgccggtgctgagcctgctcggcgccgtcggcgcggccttgaccgtgggcctcaagcgcggcggcctgttgctggcgctgctgatcctgccgctgtacatcccggtgctgattctcggtagcggggcgctgcaggcttcgctgcagggactgcctagcagcggacatttattgtggctggcgagcctgacggcgctagcattgacactcacgccattcgccatcgctgccggcctgaagatcagcgtaggcgagtga

SEQ ID NO: 30102 - DNA, 1236 bp, Pseudomonas aeruginosa
atggccgagttcggaaactatgtgatttacctgatcatgctgggtgcggtacttggcgcgctggcttccatcctgcgcccggaaagcggtctgggccgcgagttcgtcaacggcatccacgccatcggtccggtgttcctcgcccaggccggcatcatggtagccattccctatctgtcgaaggcgatttcccatgccctcggcccgttcttccagaccctcggttccgacgtatccatcgccgcgctgtcgatcatcgcggtggacatgggcggctaccagttggccgatgccctgaccgccaaccgcgacatgtggattactgccatgctggtgggctacacctccggcgcgaccatcgtctacctgatcccggtcggcctgaccatgctcgagcgcaaggaccacaagtacctggcgctgggggcgatggccgggttgatcagcattccgttcgcggtgctggcggcgttgctgctgattaccctcaaccacatcccggtgcgcgaactggtatcgaccggttcgccggccctgcactacctgtcgctggacttcctcgacatgcttcggctgctggcgccgctgttcgtcttctgcttcctgctggccgccggcctgaagtaccgggcgacggcgatggtcaccgggttcctggtattcggcaaggtgatggacgcgttcatcaagatggccctggcgctttccatcgtccagcacttcaccggagtcttcaccaaggtcttcggcggctggggcttcgacccgatgttcgccgacgagaaagagttgttccgcgccatcgagatcgctggctacatcggcatcatgctggccgggaccttccccatctgctacctgttccagcgctactgcaagcgcccgatggcggtcctcggccgttacctggggctgtcccagccgggcgccaccgcctttgtcatggtactggcgaacatcatcgccacctaccacctgttcaaatacatgaatgctcgcgacaaggtgctttgcgtggccctgggcgtctgcgcccaggccaccatcggcgatcacctggcattcaccgccaacttccagccgacgctgatcctaccgatcctgctcggcaaattgttcggcggcctgctggcggtattcatcgccatccgcatctcggtgcctgccgccgagcgctatgcgcggcaggagcaggagcatgacgaggcggaaaaaagcgccctgcacgcagcctga

SEQ ID NO: 30103 - DNA, 852 bp, Pseudomonas aeruginosa
atgagcgcacccgacagctggcgcgaacgcctctacatcgtcatcttccagaccgacacccgcgacggccggcgcttcgacagcgcgctgctgctggtgatcctggccagcctgctggtagtgatgatcgacagcatcgacgaaatccaccaggactacggcgacctgctggcctacatcgaatggggcttcaccggcatcttcctggtggaatacctgctgcgcctgtactgctcgcccaagccgctgcgctatgccttcagcttctacggcctggtcgacctgctggcgatcctccccggcttcctcgccctgctctaccccgacgcccagtacctgctgatcgtccgggtgatacgcatgctgcggatcttccgcgtgctcaagctacgccagtacctgagccaggccaatttcctgctcaccgccctgcgcggcagcaagcagaagatcatcgtgttcttcctcaccgtgatgaccctggtcaccgtgttcggcgcgctgatgtacgtggtcgaaggcccggagcacggtttcaccagcatcccccgcggcatctactgggcgatcgtcaccctgaccacggtcggcttcggcgacatcaccccgaagaccccgctcggccaggccatcgccagcctggtgatgctcaccggctactcgatcatcgcggtgcccaccgggatcttcaccgccgaactcgccaccgcgatgcgccaggacccggccaacctgttgcagcgggattgcccggtgtgccgcaaggcgacccacgaagtgcaggcggcattctgctgccgctgcggcaacccgttgttccctcgcgaggaaggcagccatgggaagtcttga

SEQ ID NO: 30104 - DNA, 1434 bp, Pseudomonas aeruginosa
atgacagccgacaagaaagccaagatcctcgccaccctcggcccggccacccgcagccgcgacgatatccgtgccctggtggaggccggcgccaacctgctccgcctgaacttcagccacggcgactatgccgatcacgcgcagcgcttcgcctgggtgcgcgaggtggaagcggagctgaactacccgatcggcgtgctcatggacctgcagggtccgaagctgcgggtcggccgcttcgccgccggtgccgtgcaattgcagcgtgggcagaccttcaccctcgacctcagcgacgcccccggcgacgagcggcgggtcaacctgccgcatccggagatcatccatgccctggaaccgggcatgagcctgctgctggacgacggcaagatccgcctggaagtggtcaactgccacagcgacgccatcgagacccgcgtggcggtgggtggcgagctgtccgatcgcaagggcgtcaacgtgccggaagcggtgctgcaactcagcccgctgaccgacaaggaccgccgcgatctggccttcggcctggaactgggggtcgactgggtggcgctgtccttcgtgcaacgcccggaggacatcgacgaggcccgtgggctgatcggcgacaaggccttcctcatggccaagatcgagaagcccagcgcggtgagcgccatcgaggcgatcgccgagcgcgccgacgcgatcatggtggcgcgcggcgacctcggcgtagaggtgccggcggagagcgtgccaggcatccagaaacgcatcgtccaggtctgccgccagctcggcaagccggtggtggtggccacccagatgctcgagtcgatgcgcttctcccccgccccgacccgcgccgaggtgaccgacgtagccaccgcggtgggcgccggcgccgacgcggtgatgctctcggcggaaaccgcttccggacaataccctcgcgaggcggtagagatgatggcgaagatcgtccgccaggtggaggccgagccggactaccacgtccagctcgaggtcaaccgtccgcagcccgacgctaccgtctccgatgcgatcagctgcgcgatccgccgggtcagccggatcctcccggtggcggtgctggtgaactacaccgagtcgggcaactcgaccctgcgcgccgcccgcgagcggcccaaggcgccgatcctcagcctgaccccgaacctgcgtaccgcgcggcgactgaccgtggcctggggcgtgtattcggtggtcaacgagcaactggcgcacgtcgacgagatctgctcgaccgccctcgacatcgccctggcccagcgcatggcgcgccgcggcgacaccgtggtggtcaccgccggcgtaccgttcggtcgccccggctcgaccaacatgctgcgcatcgagaccgtggcgccgccgctgggagatctctga

SEQ ID NO: 30105 - DNA, 891 bp, Pseudomonas aeruginosa
atggccaagatcggattcatcggcaccggaatcatgggcaagcccatggcgcagaacctgcagaaggccggccacagcctgttcctttccacccaccacgacgccgctccggccgacctgctggaggccggcgccattgccctggccaacccgaaggaagtggcccaggaagccgagttcatcatcgtcatggtgccggacaccccgcaggtcgaggatgtgctgttccgcaaggacggtatcgccgaaggcgccggcccgaacaaggtggtgatcgacatgagttcgatctcccccaccgccaccaagggcttcgccgagaagatcaaggctaccggcgcgcagtacctggacgccccggtctccggcggcgaggtcggcgccaaggcggcgaccctgagcatcatggtcggcggctgcccgaacaccttcgaacgcgccctgccgctgttccaggcgatgggcaagaacatcacccgcgtcggcggcaacggcgacggccagaccgccaaggtggccaaccagatcatcgtcgcgctgaacatccaggcggtcgccgaggccctgctgttcgccgcccgcaacggcgccgatccggccaaggtgcgcgaggcgctgatgggtggcttcgcctcctcgcggatcctcgaggtacacggcgaacgcatggtcaagggcaccttcgacccgggcttccgcatcagcctgcaccagaaggacctaaacctggccctggccggcgcccgcgagctgaacctgaacctacccaacaccgccaacgcccagcaggtgttcagcacctgcgcggccatcggcggcagtaactgggaccactcggcgctgatcaagggcctggagcacatggccaacttctcgatccgcgacgagtga

SEQ ID NO: 30106 - DNA, 783 bp, Pseudomonas aeruginosa
atgccccgtttctgcgccaacctgtccatgctgttcaccgaggtggatttcctcgaacgcttcgacgccgccgccaaggccggcttcgccggcgtcgagtacctcttcccctatgacgtcgaggccgaggcgatcaaggcccgcctggaagccaacggcctggagcaggtgctgttcaacctgccggccggcgactgggccaagggcgagcgcggcatcgcctgccacccggatcgggtccaggagttccgcgagggggtcgacaaggccatcgcctacgccagggtgctgggcaaccgccaggtgaactgcctcgccgggatccggccgcaggggcacgactgcgccagcgtcgagaagaccttcgtcgacaacctgcgctacgccgccgacaagctggaagccgcaggcatccgcctggtcatggagatgatcaacaccctcgacatccccggcttctacctgcagaacacccgccaggccctggagatccgcgacaaggtcggcagcgccaacctgttcctgcaatacgacatctatcacatgcagatcatggaaggcgacctggcccgcaccctggaaaaccagttggcggcgatcaaccacgtgcaactcgccgacaaccccggccgccacgaaccgggcaccggcgagatcaactaccgcttcctcttcgagcacctggaccgcatcggctaccagggctggatcggctgcgagtacaagccggccaccaccaccgaagccggcctcggctggatgaagacgcacaacgtcgtctga

SEQ ID NO: 30107 - DNA, 996 bp, Pseudomonas aeruginosa
atgtccgattcccgcctggtcgatcccttcggccgtcgcatcacctacctgcgcctgtcggtgacggatcgctgcgacttccgctgcacctactgcatgagcgaagacatgcagttccttccccgcgaccaggtcctcagcctggaagaactgtacgcggtggccgacgccttcatcggcctcggcgtgcggcgcattcgtatcaccggcggcgagccgctggtgcgcaagggcatcaccggcctgctggcacgcctggggcagcgtgcggaactggaagacctggcgatcaccaccaacggttcgcaactgcgcgagcgcgccgccgagctgaaggccgccggcgtccgccgcctcaacgtcagcctcgactcgctgcagcgcgaacgcttcgccgccttcacccgtagcgatcgcctggagcaggtgctggacggcatccaggcggcgcgcgaagccggtttcgagcggatcaagctgaactgcgtggtacagaagggccgcaacgacgacgagatcctcgacctggtcgagtacgccctggccaaccagttggacatcagtttcatcgaggaaatgccgctgggcagcatcaccagccaccgtcgcgaactgactctctgcaccagcgacgaagtccgcgcgatcatcgagcgccgctggccgctgaccccgagcctggcgcgcagcggcgggccgtcgcggtattaccagatcggcgacgagcccagccggatcggcttcatctcacctcacagcaataatttctgcggcgactgcaaccgcgtgcgcgtcaccgccgagggcaagctggtgctctgcctcggccacgagggggcgctcgacctgcgcgaactgctgcgcagtcatcccggcgaccgcgagcgcctgagcgcggcactggtggcggcgctgaacctgaagccggagcggcatcacttcgacgcccaggagcaggtccaggtgctgcgtttcatgagcatgaccggcggctga

SEQ ID NO: 30108 - DNA, 1305 bp, Pseudomonas aeruginosa
atgacccgcaacgccaaagcctaccgcgccgccatcctgcacagcatcgccgaccccgcggaggtcggcgtcgaacgctcctacgaatacttcgaggacggcctgttgctggtggaggacggcaaggtcgctcgcctcggtgacgccgaaaccctgctcggcgagatcggcgaggtcgaggtcttcgagtaccgcgacgcgctgatcacccccggcttcatcgatacccacatccatttcccgcagaccgggatgatcgcctcctacggcgaacaactgctggactggctgaacacctataccttccccaccgagcgccaattcggcgaccaggcccatgccgaccaggtcgccgagatcttcctgcaggaactgctgcgcaacggcaccaccaccgccctggtcttcggcagcgtgcaccggcaatcggtggaatcgctgttcgaggccgcccggcgcctggacctgcgcctgatcgccggcaaggtgatgatggaccgcaacgcgccggactacctgaccgacaccgccgagagcagctaccgcgacagcaaggcgctgatcgagcgctggcacggccagggccgtctgctctacgcggtgaccccgcgcttcgccccgaccagcaccgcggaacagctggacatggcggcgcggctgctgcgcgagcatcccggcgtatacctgcacacccatctgtcggagaacctcaaggaaatcgagtgggtgaaggagctgttccccgagcgcagcggctacctggacgtctacgaccaccacggcctgctcgggccgcgctcggtgttcgcccatggcgtgcacctgtgcgacggcgaatgccagcgcctggcggagactggctcggcggtggcgttctgcccgacctccaacctgttcctcggcagcggtctgttcgacctgccgaagctggagcgctacaaggtcaaggtcggcctcggcaccgatgtcggcgccggcaccagcttctcccagctgcagtccctgaacgaggcgtacaaggtcatgcagttgcagggcgcccgcctcgatccgttcaagtcgctctacctcgccaccctcggcggcgcccgtgcgctggagctggacgaccggatcggcagcttcgccaccagcaacgaggcggacttcgtggtcctcgactaccacgccaccccgctgctctcctaccgcctgagccaggccggcagcctggccgaacggctgttcgcgctgaccatcctcggcgacgaccgcacggtgaaggaaaccttcgccgccggtcgctcggtgcatcgccgcgactga

SEQ ID NO: 30109 - DNA, 2400 bp, Pseudomonas aeruginosa
atgtctaaccatcgcaagccgcacaagagccaggaagagctggccgacctgttccgcgccgagttgaccaccggagtcggccgcagcgtcaagcacgaaagcgcccccaagcacgtcagcggcgaggcgatctacatcgacgatcgcctggagtttcccaaccagttgcacgtctatgcgcgcctgagcgagcgcgcccacgcccgcatcacccgcctcgacgtgacgccctgctaccagttccccggcgtcgccatcgccctcaccgccgccgacgttcccggccagctcgacatcggcccggtggtggccggcgacccactgctggccgatggcaaggtggagtatgtcggacagatggtcctggcggtcgccgccgacagcctggaaaccgcgcgcaaggcggccatggcggcgatcgtcgagtacgaagacctggaaccggtgctcgacgtggtcgaggccctgcgcaagcgccatttcgtcctcgacagccaccagcaccgcatcggcgactccgccgccgcgctggccggcgcgccgcatcgcctgcaaggcacgctgcacatcggcggccaggagcatttctacctggagacgcagatttcctcggtaatgcccagcgaagacggcggcatgatcgtctattgctcgacccagaaccccaccgaagtgcagaagctggtggccgaggtcctcggggtttccttcaaccgcatcgtcatcgacatgcgccgcatgggcggcggcttcggcggcaaggaaacccaggccgcggcgccggcctgcctgtgcgcggtggtcgcctaccacaccgggcgtccggcgaagatgcgcctaccgcgcatggaggacatgcagatcaccggcaagcgtcacccgttctacgtcgaatacgacgtcggcttcgacgacgatggccgcctgcacggcatccagatcgacctggccggcaactgcggctattcgccggacctctccggctcgatcgtcgaccgcgccatgttccactcggacaacgcctacttcctcggcaacgccaccatcaacggccaccgttgcaagaccaacaccgcctcgaacaccgcctaccgcggtttcggcgggccccagggaatggtcgccatcgaggagatcatggacgccgtggcccgcagcctgggcaaggatccgctggaggtgcgcaagctcaactactacggcaaggacgagcgcaacgtcacccattaccaccagaccgtcgagcacaacctgttggcggagatgaccgccgagctggaagcgagcagcgagtacgcccgccgccgcgaggaaatccgtgccttcaatgccgccagcccggtcctgaagaaaggcctggcgctgaccccggtgaagttcggcatttcgttcaccgcgaccttcctcaaccaggcaggtgcgctgatccacatctataccgacggcagcatccacctgaaccatggcggcaccgagatgggccagggcctcaataccaaggtcgcccaggtggtcgccgaggtcttccaggtcgacgtggagcgcatccagatcaccgccaccaataccgacaaggtgcccaatacctcgcccaccgccgcctcctcgggcaccgacctgaacggcaaggccgcgcagaatgccgccgaaaccatcaagcggcgcctggtggagttcgccgcgcggcactggaaggtcagcgaggaagacatcgagttccgcaacaaccaggtgcgtatccgcgagctgatcctgccgttcgaggaactgatccagcaggcctacttcggccaggtctcgttgtccagcaccggcttctaccgcacgccgaagatcttctacgaccgcgagcaggcccgtggccggcccttctattatttcgcctacggcgccgcctgctcggaggtgatagtcgataccctcaccggcgaataccgcatgctgcgcaccgacatcctgcatgacgtcggcgactcgctgaacccggccatcgacatcggccaggtcgaaggcggcttcgtccagggcatgggctggctgaccatggaggaactggtctggaacgccaagggcaagctgatgaccagcggcccggccagctacaagattcccgccgtcgccgacatgccgctggacctgcgggtgaaactgctggagaaccgcaagaatccggagcagaccgtgttccattccaaggccgtgggcgagccgccgttcatgctcggcatctcggtctggtgcgcgatcaaggacgccgtggccagcctcgccgactaccgcgcgcaacccgccatcgacgcgccggcgacgcccgagcgggtgctctggggcgtggaacagatgcgccggctgaaggccgcccaggcgcaagcggcggacgccgcggtcgaaccggcctga

SEQ ID NO: 30110 - DNA, 3489 bp, Pseudomonas aeruginosa
atgcgcctgaagagcatcaagctggcggggttcaagtccttcgtcgatccgaccacggtgaacttccccagcaacatggcggcagtggtagggccgaacggctgcggcaagtcgaacatcatcgacgcggtgcgctgggtgatgggcgaaagctcggcgaagaacctgcgcggcgagtcgatgaccgatgtcatcttcaacggctcgaatacccgcaagccggtgagccaggcgagcatcgagctgatcttcgacaacgccgagaccaccctggtgggcgaatacgcccagtacgccgagatatccattcgccggcgggtctcgcgggatgggcagaacacctatttcctcaacggcaccaagtgccggcggcgcgacatcaccgacatcttcctcggcaccggcctggggccgcgcagctactcgatcatcgaacagggcatgatctccaagctgatcgaggcgcgtccggaagacctgcgcaacttcatcgaggaagccgcgggcatttccaagtacaaggagcgccgccgcgaaaccgaaagccgcatccgtcggacccaggaaaacctggcacgcctcaccgacctgcgcgaagagctggggcggcaactggaacgcctgcaccggcaggcccagtcggcggaaaaataccaggaacacaaggccgaggagcgccagctcaaggcccagctgggtgccgtgcgctggcgcgacctgaacgagcaggtcggtcagcgcgagcgggtcatcggcgaccaggagatcgccttcgaggccctggtggccgagcagcgtggtgccgatgccggcatcgaacggctgcgcgacggccatcacgagttgtccgaacgcttcaaccaggtgcaggcacgcttctattcggtcggcggcgacatcgcccgggtcgagcagagcatccagcatggccagcagcgccagcgccagttgcaggacgacttgcgcgaagccgaacggacccgccaggaaaccgaatcgcacctcgggcatgaccgtaccttgctcgcgaccctggccgaggaaatggccatgctcgcaccggaacaggaactcagcgcggccgccgcggaagaagcgggcatcgccctggaacaggccgagcagggcatgcaggcctggcagcagcagtgggatgccttcaaccagcagagcgccgaaccccgccgccaggccgaggtgcagcagtcgcgcatccagcacctggagcagagcctggagcgcctgcaggatcgcgagcggcgcctgcaggaggagcgtggccagttggcggccgaccccgaggacgcggcgatcctcgaactcaacgaacaggtggcgatcgccgaactggccctggaagaactgcaattgcaggagcagggccaagccgagcgactcgaacaattgcgccaggaattgcagcagctggccgccgaacagcaccaggcgcagggcgagttgcagcgcctgaacgggcgcatcgcttcgctggaggccctgcagcaggccgctctcgatcccggacagggcgccttggagtggttgcgcgagcagggcctggaacaacgtccgcgcctcgccgaaggcttgcgtgtcgagccgggttgggagctggcggtggagaccgtgctcggcgcggatctgcaggcggtcttgctggacggcttcgacgggctcgccctggccggcttcggcaagggcgagctgcgcctgctcagccccgctcgcggagccgcgacggcggccggttcgctgctggacaaggtccgcgccgacgccgacctgagtccctggttggcccgggtgaaaccggtggagaccctggaacaggcgctcgcccagcgcggcgccctggacgacggcgagagcctgatcagtcgcgatggctactgggtcggccggcacttcctgcgggtccggcgcagcgacgaggcccagggcggcatgctcgcccgcgcccaggaactggaggcgttgcaggagcggcgggaggccctggaaacccgtgtcgccgaaggcgaggagcgtctggctgcggcccgcgacgagcagcgcgagctggaaggcgcgcgggagcaggtgcggcgccaggtccaggaggaggggcgccggcacggcgagctgaaggcgcagttgtccgcgcagcaggccaaggtcgagcaactggtactgcgtcgccgccgtctcgacgaagaagtggcggaactggccgagcagcgcgcgctggaacaggagcaactgagcgaggcgcgcctgaccctgcaggaagcgctggatagcatggcgctggacaccgagcgccgggaatccctgctggcggagcgtgacgccctgcgcgaacggctcgaccggattcgccaggatgcccgcacccacaaggaccatgcgcaccagttggcggtgcgggtcggctcgctgaaggcgcagcacaattccacccagcaggccctggagcgcctcgaccagcagtcggcgcgcctcaacgagcgttgcgaacagctcaacctcaatctggaggagggggcggcaccgctggaagagctgcgcatgaagctcgaggagttgctggagcggcggatggccgtcgaggacgaactcaagcaggcgcggctggccctggaagacgccgatcgcgaactgcgcgaggtggagaagcgccgcggccaggccgagcagcaatcgcaactgctgcgtggccagctggagcagcagcgcctggagtggcaggggctggtggtgcggcgcaaagccttgcaggagcagctcgccgaagacggctacgacctgcatacggtactggccaacctgcccctggatgccagcgaacgcgattgggaggagcgtctcgagagtctcgcggcgcgcatccagcgtctggggccgatcaacctggcggcgatcgaggagtaccagcagcagtccgagcgcaagcgctacctggactcgcagaacgacgacctggccgaagcgctggagacgctggaaaacgtcatccgcaagatcgaccgggaaacccgcaatcgtttcaaggaaaccttcgaccagatcaatgctggccttcaggcattgttcccgaaggtattcggcggcggtacggcatatctggaacttaccggcgaagatctactcgataccggtgtggcgatcatggcgcgcccgccgggcaagaagaacagcaccatccacttgttgtccggcggggaaaaggcgctgaccgcgctggcgctggtattcgccatcttccagttgaacccggcgccgttctgcatgctcgacgaagtcgatgcgccattggacgatgccaacgtcggacgttatgcgcgattggtgaaggagatgtcggaaaaggtgcagttcatctatatcacccacaacaagatcgccatggaaatggccgatcagttgatgggcgtgaccatgcatgagccgggctgttcacggcttgttgcagttgacgtggaagaggcggtcgcattggctgaagcctga

SEQ ID NO: 30111 - DNA, 870 bp, Pseudomonas aeruginosa
atggatatcggtctgcgcgaatggcttatcgttatcgggcttatcgtgatcgccggcattctcttcgacggttggcggcggatgcggggcggcaagggcaagttgaagttcaagctcgaccgcagtttcgccaatctgccggacgacgacggcgactcggctgaactgctggggccggcgcgcgtggtcgagcatcgcgagccatccttcgacgaacaggacctgcccagcgtcagcgcccgcgaagccaaggaacgcaagggcggcaagcgccaggaagagccgcgccagggcgatctggacctcgacgaggggctggccctggaggcggacccgagcgatgccgccgagacggtggagccgcgcaagggcaagtcgaagggccgcaaggagaaagagcgggagaaagcccctgcggttgctgccgaacctgccccggtcgacgaggtgctgatcatcaacgtcatcgcccgcgacgagagcggcttcaaggggccggcattgttgcagaacatcctcgagagcggcctgcgcttcggcgacatggacatcttccatcgccacgaaagcatggccggcaatggcgagatcctgttctccatggccaatgcggtgaaaccgggcactttcgacctggacgacatcgacaacttcagcacccgcgccgtgagcttcttcctcggcctgccggggccgcgccatccgaagcaggccttcgacgtgatggttgccgccgcgcgcaagctggcccacgagctgaacggcgagctgaaggacgagcagcgcagcgtgttgaccgcccagaccatcgagcactaccgccagcgcatcatcgaccatgagcgtcgcagcctgatgcagaagcgctga

SEQ ID NO: 30112 - DNA, 2385 bp, Pseudomonas aeruginosa
atgaccgacacccaggctgccgccgaacgcatcgcgcaactgcgaaccgaactggacacccacaattaccgttactacgtgctcgacgaaccgagcattcccgacgccgaatacgatcgcctgttccgcgagttgcaggcgctggaggccgagtacccgcaactgctgacgcccgactcgccgacccagcgggtcagcggcacgccggcctcggcgttcggcgaagtgcgccatgagatccccatgctcagcctcggcaacgccttcgaggagcaggacctgctggacttcgaccgccgcgtacgcgaaggactggccgacctgttgcctggcggcgacctgctcggcggtggcgcggaggtcgagtacagttgcgagccgaagctggacggcctggccgtcagcctgctctacgaacgcggccaactggtgcgcggcgccacccgtggcgatggcagcaccggcgaggacatcaccagcaacgtacgcaccattcgcaacgtaccgctgaagctgcacggcgaaggctggccggagatcctcgaagtgcgcggcgaggtgttcatgtccaaggccggtttcgaggcgctcaacgccaaggccgtggaaaccggcggcaaaaccttcgccaacccgcgcaacgcggcggccggcagcctgcgccagctggattcaaagatcaccgccagtcgcccgctggaattctgtgcctacggcttcggccaggtcagcgggacgctgccggacacccaggtgggcatcctcgaggcgttccgcggctggggtatccccatcagtcgcgagctgcgcctggtcaagggcgcccaggcctgccgcgactactacgacgacatcggtcgccgacgcgatgcgctggcctacgagatcgacggcgtggtgttcaaggtcaaccgcatcgccttccagcgcgaactgggcttccgcgcgcgcgagccgcgttgggcgatcgcccacaagttccccgcgcgcgaggagttgaccgagctgctgggtgtcgagttccaggtcggccgcaccggcgccgtgaccccggtggcacgcctcaagccggtgcaggtggccggcgtcacggtgtccaatgcgaccctgcacaacatggatgaagtcgcccgcctgggcctgcgcatcggtgatacggtggtgatccgccgtgctggcgatgtgattccgcaggtcatgcaggtggtgctcgagcgccgcccggcggatgcgcaggctatcgaggtgcccgagcattgcccggtctgcggctcggccgtggagcggacccagttggtcaagcgcagcaagggcaaggagtcgatcagcgagggcgccatctatcgctgcgtcggccgcctctcctgtcaggcgcagttgaagcaggcgatcatccatttcgtatcgcgccgggcaatggatatcgacggtcttggcgacaagatcgtcgagcaactggtggatcgcgggctggtcgcctcgccggcggatctctataccctgacctatgaacaggtgttcgagctggaagggttcgccgagctgtccaccaacaacctgctgacggctatcgccgatagccgcaagccttcgctggcgcgcttcatcttcgctctggggattcccgacgtcggcgaggaaaccgccaagctgctggcgcgttcgctgggttcgctcgagcggatcggcaaggcgctcccggaagtgttgacctacctgccggacgtcggcgccgaggtagcctacgagatccacaacttcttcgccgacgagcacaaccgccaggtgatcgcccagttgcgcgatgccgaacatggcgtgcagttgcaggaagagggcgaggtcgccgcggagttcgccgcctgtgcctcgctggccggtttcatcgacaagctgaacattcccttcatcgccgccaccggcgcggaaaagctggctagccgcttcggttcgctcgacggcatcatccgtgccgactggctcgatctgcgccaggtggagcgtctgcccgagcgagcggcgaaaagcctgcgcgatttcttcgacgagccggccaacgtgcagcgtgccctggccatcgaggcgcagttgcgtgagttcggcatgcattggcagagcgagcgcaaggcggtcgaaggcctgcctctggccgggcagacctgggtgctgaccggcaccctggaggcgatgagccgggacgtggccaaggacaagctggaagggctcggcgccaaggtggccggctcggtgtcggccaagacccactgcgtggtcgccgggcccggcgccggctcgaagctggccaaggccaacgagctgggcgtgaaggtgctcgacgaagacggcctgctgaaactgttcgacgagcacggcgtcgcccgctga

SEQ ID NO: 30113 - DNA, 2046 bp, Pseudomonas aeruginosa
atgagttatcaagttcttgcgcgtaaatggcgtccccgttccttccgtgaaatggtcggccagacccatgtgctcaaggctctgatcaacgccctggacaaccagcggctgcaccatgcctacctgttcaccggtacccgcggggtcggcaagaccaccatcgcgcggatcctggccaagtgcctgaactgcgagaccggggtcagctccacgccgtgcggcgaatgctcggtctgtcgcgaaatcgacgaaggccgcttcgtcgacctgatcgaagtggacgccgcgagccggaccaaggtcgaggatacccgcgagctgctcgacaacgtgcagtactcgccgacccgcggacgctacaaggtctacctgatcgacgaagtgcacatgctctcgtcgcacagtttcaatgcgctgctcaagaccctcgaggagccgccgccgcacgtcaagttcctgctggccaccaccgacccgcagaagttgccggtgaccatcctctcgcgctgtctgcagttctccctgaagaacatgccgccggagcgggtggtcgagcacctgacccacgtgctcggagccgagaacgtgcccttcgaggatgacgccctgtggttgctcgggcgcgccgccgacggctcgatgcgtgacgccatgagcctgaccgaccaggccatcgccttcggcgagggcaaggtgctggccgcagacgtgcgggcgatgctcggtaccctcgatcacggccaggtctatggcgtgctccaggccttgctggagggcgatgcgcgcgccctgctcgaagcggtgcgccacctggccgagcagggcccggactggggcggcgtgcttgccgaaatactcaacgtgctgcaccgcgtcgcgatcgcccaggccctgccggaagcgatcgacaatggccagggcgaccgcgagcgggtgctggccctggcccaggcgttgccggcggaagacgtacagttctattaccagatgggcctgatcggccgccgcgacctgccgctggcgcccgatccgcgtagcggcttcgagatggtgttgctgcggatgctcgcgttccgcccggcggacgccgacggcgtgccgaggacgccgctaaaggacctggggatcagcaaggccacgactgatcccgccaactcccccgtggccggcgcggcctcgcctgcgccggtcgctaccgttgctcccgcgcctgtcgtggctgcgcccgtcgaagccccggctgccccgccggcagcgccatccgcgccgccggcggcggtcgaggcgcgcgtcacggaagcggttgtcgaagagcccgccgccgcagcagaggtcgtcgacttgccctgggaagagccggcgccgagcctcgctgccgagcccgagcccgagcccgagcccgagccgctagccgtggaggctccctcggtccctccggcagtggcggtcgaggcggtggtggaaaccgttctggaagccctgccggctgcgttgccggtagcacctgacgagcaggacgagcaggacgacgagccaccgcccgcggacgactattacgaagtcgatatggataccctggcctacctggatgccacgcccgagcctgacgtggtcgtggtggaggagccgctgccggcggcgaagccggccaccggcctggccgcggagtggctggagctgttcccgcggctcggcctcggcggcctgaccgccagcatcggtgccaactgtacgctggtagctgccgacgacgaccactggcatctgcatctcgatccgggccagagcgcgctgttcaacgccacccagcagcggcggctgaacgatgcgctgaaccagcacctggggcgcaccctcaaactggaggtgaccctgcagaagcctgagcaggagaccccggcccaggcagcggcacgccggcgtgccgagcgccagcgggcggccgaggcatcgatcgatgccgacccgttggtccggcagttgcgcgagcagttcgccgcggtggtccgtgacggtaccatcgaacctttggaagccaaggcctga

SEQ ID NO: 30114 - DNA, 327 bp, Pseudomonas aeruginosa
atgatgaaaggtggcatggccggcctgatgaagcaggcgcagcagatgcaggaaaagatgcagaagatgcaggaagaactggccaacgccgaagtgaccgggcaatccggcgccggtctggtcagtgtggtgatgaccgggcgccacgacgtcaagcgcgtcagcctggacgacagcctgatgcaggaagacaaggaaatcctcgaagacctgatcgcggccgcggtcaacgatgcggtgcgcaagatcgagcagaacaaccaggaaaagatgtccggcttcacctcgggcatgcaactgccgcccggcttcaagatgcccttctga

SEQ ID NO: 30115 - DNA, 597 bp, Pseudomonas aeruginosa
atgagtttcagcccgctgatccgccaactgatcgagtccctgcgcattcttcccggtgtcgggcagaagtcggcccagcgcatggcgctgatgctgctggagcgcgatcgcagcggcggcctgaagctggcccaggcgttgaccgccgcgatggaaggggtcggtcattgccggcagtgccgtaccctcagcgaggaggagttgtgcccgcagtgcgccgacccgcgacgcgacgactcgctgctctgcgtggtggaaggcccgctggacgtattcgcggtggagcagaccggctaccgcggccgctatttcgtgctcaagggacacctgtcgccgctcgacggcctggggccggaggcgatcggcattcccgaactggaagcgcggatcagggacggagccttcagcgaggtgatcctcgccaccaaccccaccgtcgaaggcgaggccaccgcccactatatcgcccagctactggccggccgcggcctgaccttgtcgcgtatcgcccatggcgtgccgctgggcggcgagctggagctggtcgatggcggcaccttggcccacgccctggccggacggcggccgatctcctga

SEQ ID NO: 30116 - DNA, 1428 bp, Pseudomonas aeruginosa
atgagcacagcaatcagtcagactgcttataactataaggtggtccgccagttcgccgttatgacggtggtctggggggtcattggaatgggtctcggtgtcctgatcgccgcccaactggtatggcccgaattgaacttcgacctgccgtggacgagcttcggccgccttcgccccctgcacaccaacgcggtgatcttcgccttcggtgggtgcgccctcttcgccacctcgtactacgtggtgcaacgtacctcgcaagcccgactgatttcagacacgctggcggccttcaccttctggggttggcaggccgtgatcgtgggcgccgtgctgaccctgccgcagggtttcaccacctccaaggaatacgccgaactggaatggccgctggccatcctcctggcgatcgtctggatcacctacgcgatcgtgttcttcggcaccatcgtcaagcgcaaggtcaagcacatctatgtgggcaactggttctacggtgccttcatcctggtgacggcgatgctgcacatcgtcaaccacatgtcgctgccggtgagctggttcaagtcctactccgcctactccggcgccaccgatgcgatggtccagtggtggtacgggcacaacgccgtgggcttcttcctgaccaccggcttcctcggcatgatgtactacttcgtgcccaagcaggccgagcgtccggtctattcctatcgcctgtccatcgtccacttctgggcgctgatctccctgtacatctgggccggcccgcaccacctgcactacaccgcgctgccggactgggcgcagtcgctgggcatggtgatgtcgctgatcctcctggcaccgagctggggcggcatgatcaacggcatgatgaccctctccggcgcctggcataagctgcgcaccgacccgatcctgcgcttcctggtggtatccctggccttctacggcatgtccaccttcgaaggcccgatgatggcgatcaagaccgtcaacgccctctcccactacaccgactggaccatcggccacgtgcacgccggcgccctcggctgggtggcgatgatctccatcggctcgctctaccacctgatcccgaaagtcttcggccgtccgcagatgcacagcatcggtctgatcaacgcgcacttctggctggccaccatcggtaccgtgctgtacatcgcttcgatgtgggtcaacggcatcacccagggcctgatgtggcgcgcggtcaacgaggacggcaccctgacctactccttcgttgaagcactggtcgcaagccacccgggcttcatcgtgcgcatgatcggcggtggtttcttcctcaccggcatgctgctgatggcctacaacacctggcgcaccgtgcgtgctgccaagccggccgaatacgaagccgccgcgcagatcgcctga

SEQ ID NO: 30117 - DNA, 867 bp, Pseudomonas aeruginosa
atgactgcggtcgcatttctcggcctgggcacgatgggctacccgatggccgggcacctgcaacgagagggctacgacgtctgtgtctacaatcgctcgtcggccaaggcgctgcgctgggtcgaggagtacgccggacggcgcgccgatacgccgcgcgaggcctgtgctggcgccgagctggtgttctgttgcgtcggtaacgacgacgacctgcgtgccgtggcgctgggcgagcagggcgccttcgccggaatggcgccgggcagcctgttcgtcgaccacaccaccgcttcggcggaagtcgcccgcgagctgtcgctgctggctgccgagcgtgagctgggctttctcgacgcgccggtctccggcggccaggcaggcgcggtcaacggcgccctgacggtgatggtcggtggcgaggaggccttctatcgacgcgccgaaccgctgttgcgcagctatgcgcggatggtccggcgaatgggcgacgtgggtagcgggcaattgaccaagatggtcaaccagatctgcgtcgcggggctgctccagggcctggccgaggcgctgcacttcgcccggtgcgccggtctcgatggcgaggcggcgatgcaggtgatcggcaagggcgcggcccagtcctggcaactggaaaaccgccaccagagcatgctggccggagagttcgacttcggcttcgccgtggactggatgcgcaaggacctgtcgatcctgctcgccgaggcgcggcgcaacggcgcgcagttgccggtcacggcgctggtcgaccagttctacgccgaagtgcaggcgatgggcggcggtcgttgggatacctccagcctgatcgcccggctgcgttcgtga

SEQ ID NO: 30118 - DNA, 1287 bp, Pseudomonas aeruginosa
atggctgacaaaaaagcgcagttgatcatcgagggctcagcccccgtcgaactgcccgtcctatccggtaccatgggtcccgatgtagtggatgtacggggcctcaccgccacgggccacttcaccttcgatcctggcttcatgtcgaccgcctcctgcgagtcgaagatcacctatatcgacggcgacaaaggcgtcctcctccatcgcggctaccccatcgagcaactggcagagaaatccgactacctggaaacctgctacctgctgctgaacggcgagctgcccaccgccgcgcagaaggaacagttcgtcggcaccatcaagaaccacaccatggttcacgagcagttgaagaccttcttcaacggcttccgccgcgacgcccacccgatggccgtgatgtgcggcgtgatcggcgccctctcggccttctaccacgactccctggacatcaataacccgaagcatcgcgaagtctccgcgcatcgcctgatcgccaagatgccgaccatcgccgccatggtgtacaagtactccaagggcgagccgatgatgtatccgcgtaacgacctgaactacgcggaaaacttcctgcacatgatgttcaacaccccctgcgagaccaagccgatcagccccgtgctggccaaggccatggaccgcatcttcattctccacgccgaccacgagcagaacgcctccacctccacggtgcgtctggccggctcctccggcgccaatccgttcgcctgcatcgcctccggcatcgccgccctgtggggaccggcccatggcggcgcgaacgaagcggtgctgcgcatgctcgacgagatcggcgacgtgtccaacatcgacaagttcgtcgagaaggccaaggacaagaacgatccgttcaagctgatgggcttcggccatcgtgtctacaagaacttcgacccgcgcgccaaggtcatgaagcagacctgcgacgaggtcctccaggagctgggcatcaacgacccgcaactggaactggcgatgaagctagaagaaatcgcccgccacgacccctacttcgtggaacgcaacctgtacccgaacgtcgacttctactcggggatcatcctcaaggcgatcggcattccgaccagcatgttcaccgtgatcttcgccctggcgcgtaccgtcggctggatctcgcactggcaggaaatgctctccggcccctacaagatcggccgcccgcgccagctctataccggccacacccagcgcgacttcaccgccctcaaggatcgcggctga

SEQ ID NO: 30119 - DNA, 1773 bp, Pseudomonas aeruginosa
atggctagcattcgtacactttcctttgacgccatcatcgtcggtggcggtggcgccggcatgcgtgccgcgctgcaactggcccagggcggccacaagaccgccgtggtgaccaaggtcttcccgacccgttcccacaccgtatccgcacagggtggcatcacctgcgcgatcgcttcggccgacccgaacgacgattggcgttggcacatgtacgacaccgtcaagggttccgactacatcggtgaccaggacgcgatcgaatacatgtgttccgtcggtcccgaggccgtgttcgagctcgagcacatgggcctgccgttctcccgtaccgaaaccggccgcatctaccagcgtccgttcggcggccagtccaaggacttcggcaagggtggccaggccgcccgtacctgcgccgccgccgaccgtaccggccacgcgctgctgcacaccctgtaccaggccaacctgaagaatggcacctcgttcctcaacgagtggtacgcggtcgacctggtgaagaaccaggacggcgcggtggtcggcatcatcgccatctgcatcgagaccggcgagaccgtctacatccgttccaaggccgtggtcctggccactggtggtgccggccgtatctacgcctccaccaccaacgcgctgatcaacaccggtgacggcgtgggcatggccctgcgtgccggcgtgccggtgcaggacatcgagatgtggcagttccacccgaccggcatcgccggcgccggtgtactggtcaccgaaggttgccgcggcgaaggcggttacctgatcaacgcccacggcgagcgcttcatggagcgttatgcgccgaacgcgaaggacctggccggtcgcgacgtggtcgcccgttccatggtcaaggaagttctggccggcaacggcgtgggtccgaacaaggaccacgtgctgctgaaactcgaccacctcggcgaggaagtcctgcacagccgtctgcccggcatctgcgagctgtccaagaccttcgcccacgtcgacccggtcgttgcgccgatcccggtgatcccgacctgccactacatgatgggcggcgttgccaccaacatccatggccaggccatcacccaggacgccaacggcaacgaccagatcgtcgaaggcctgttcgccgtgggcgaagtggcctgcgtatcggtacacggcgccaaccgcctgggcggcaactcgctgctcgacctggtggtattcggccgtgccgccggtctgcacctggaaaaagcgctgaaagagggcatcgacgcccgcggcgcttccgagagcgacctggaagcctccttcaagcgcctgaacggcgtgaacgagcgcaccagcggcgaagaagtcgctccgctcaagcgcgagctgcaaagctgcatgcagaactacttcggtgtgttccgcaccggcgagtacatgcagaagggcatcgcccagctggccgacctgcgcgagcgtatcgccaacgtcaagatcaacgacaagagccaggcattcaacaccgcgcgcatcgaagcgctggaactgcaaaacctcctcgaggtggccgaggccaccgcgatcgcggccgagcaccgcaaggagtcccgtggcgcccacgcccgtgaagacttcgaggagcgcgacgacgagaactggctgtgccacaccctgtacttcccgggtgagaagcgcgtatccaagcgttccgtcaacttcgcgccgaagaccgttccggcattcgaacccaaggttcggacttactaa

SEQ ID NO: 30120 - DNA, 2832 bp, Pseudomonas aeruginosa
atgcacgaaagcgtaatgcagcggatgtggaacagtgcccatctatccggtggtaacgctgcctacgtcgaagagctctacgagctctacctgcacgaccctaacgctgtgccagaagagtggcgcacgtatttccagaagcttcccgccgatggcaatcccgcccccgacgtctcgcactccacagtgcgcgatcatttcgtcctgctggccaagaaccagcgccgtgcccagccggtttccgccggtagcgtgagcagcgagcacgagaagaagcaggtcgaagtccttcgtctcattcacgcttaccgtctccgcggccaccaggcttccaccctcgacccgctcggcctgtggcagcgtcccgcgcctgccgacctgtcgatcgaccactacggtctgacgggtgccgacctggacaccactttccgcaccggtgagctttacatcggcaaggaagaggcgaccctgcgtgaaatcgtcgacagcctgaagagcacctactgcggtaccttcggcgccgagttcatgcacatcgtcgattccgagcagcgcaagtggttcctccagcgtctggaaagcgtgcgtggtcgtcccggcttctccgccgaggcgcgtgcgcacctgctcgagcgcctgaccgcggccgaaggcctggagaagtacctgggcaccaagtacccgggcaccaagcgtttcggcctggaaggcggcgaaagcctgatcccgatggtcgacgagatcatccagcgctgcggttcctacggcgccaaggaaatcgtcatcggcatggcccaccgcggtcgcctgaacgtcctggtcaacaccctgggcaagaacccgcgcgacctgttcgacgagttcgaaggcaagaagatcgtcgagctgggctccggtgacgtgaagtaccaccagggcttctcctcgaacgtgatgaccagcggtggcgaagtccacctggcgctggcgttcaacccgtcccacctggaaatcgtttccccggtggtcgagggttccgttcgtgctcgccaggaccgccgcaaggacagctccggcgacaaggtggtaccgatttccatccacggcgatgccgccttcgcggggcagggcgtggtcatggaaaccttccagatgtcgcagacccgcgcctacaagaccggtggcaccatccacctggtgatcaacaaccaggtcggtttcaccaccagccgccaggacgatgcgcgttccaccgagtacgccaccgacgtggcgaagatgattcaggcgccgatcttccacgtcaacggcgacgatcccgaagccgtgctgttcgtcacccaactggccgtcgactaccgcatgcagttcaagcgtgacgtggtcatcgacctggtctgctaccgtcgccgcggccacaacgaggcggacgagccgagcggcacccagccgctgatgtaccagcagatcgccaagcagcgtactacccgcgagctgtacgccgatgccctggtgaatgccggcgtgctcagcgccgagcaggttcagtcgaagatcgacgactaccgcgacgcccttgacaacggcctgcacgtggtgaagagcctggtcaaggaacccaacaaggaactgttcgtcgactggcgtccgtacctgggtcatgcctggaccgcgcgtcacgacacccgcttcgacctgaagaccctgcaggaactgtccagcaagatgctggaagtgccggaaggcttcgtggttcagcgccaggtttcgaagatctacgaagatcgccagaagatggcggccggtggcctgccgatcaactggggcttcgccgagaccctggcctacgcgaccctgctgttcgaaggccatccggtacggatgaccggccaggacgtcggccgtggcaccttctcgcaccgtcacgcggtgctgcacaaccagaaggatgactcggtctacgtaccgctggccaatctgttcgacggccagccgcgcctggatatctacgattccttcctttcggaagaggccgtgctggcgttcgaatacggtttcgccaccaccacgccgaactcgctggtgatctgggaagcccagttcggcgacttcgccaacggcgcccaggtggtcatcgaccagttcatcaccagtggcgaaagcaaatggggccgactctgcggcctgaccatgctgctgccgcacggctatgaggggcagggcccggagcactcctccgcgcgcctggagcgctacctgcagctctgtgccgagcagaacatccaggtctgcgtgccgaccaccccggctcaggtctaccacatgctccgccgtcaggtgatccgcccgctgcgcaagccgctggtggtgatgacgccgaagtccctgctgcgtcacaagctcgccatctcgaccctggaagatctggccaacggttccttccagactgtgatcccggaaatcgacagcctggatccgaagaaggtcgaccgcgtcgtgctgtgcagcggcaaggtgtactacgacctgctggagaagcgtcgcgcggaaggccgcgaagataccgcgatcgtccgtatcgagcagctgtatccgttcccggaagacgacctggcggaagttctggctccgtacaagaacctcaagcacatcgtctggtgccaggaagagccgatgaaccagggcgcctggttctgcagccagcatcacatgcgtcgtgtcatcgccgcgcacaagaagggcctcaatctcgagtacgccggccgcgaaggctccgctgctccggcttgcggctacgcctcgatgcacgccgagcagcaggaaaaactgctgcaagacgcctttactgtttaa

SEQ ID NO: 30121 - DNA, 1437 bp, Pseudomonas aeruginosa
atgagccagaaattcgacgtggtagtgattggtgccggccccggcggttacgttgccgccatccgcgctgcccagctgggcctgaagaccgcctgcatcgagaagtacatcggcaaggaaggcaaggtggcgctcggcggtacctgcctgaacgttggctgcatcccgtccaaggcgctgctggacagctcctacaagtaccatgaggccaaagaggccttcaaagtccatggtatcgaagccaagggcgtcaccatcgacgttccggcgatggttgcgcgcaaggccaacatcgtcaagaacctgaccggcggcatcgctaccctgttcaaggccaacggcgtgacctccttcgaaggccacggcaagctgctggccaacaagcaggtggaagtgaccggcctggacggcaagacccaggtcctggaagccgagaacgtgatcatcgcttccggctcccgcccggtggagatcccgccggccccgctgaccgacgacatcatcgtcgactccaccggcgccctggaattccaggccgtgccgaagaagctgggtgtgatcggcgccggcgtcatcggcctggagctgggttcggtatgggcccgcctgggtgccgaggtgaccgtgctggaagccctggacaagttcctcccggctgccgacgagcagatcgccaaggaagccctgaaggtcctgaccaagcaaggcctgaacattcgcctgggcgcccgcgtgaccgcttcggaagtgaagaagaagcaggtcaccgtgaccttcaccgatgccaacggcgagcagaaggaaaccttcgacaagctgatcgtcgcggtcggccgtcgcccggtgaccaccgacctgctggccgccgacagcggcgtgaccctggacgagcgtggcttcatctacgtcgacgaccactgcaagaccagcgttccgggcgtcttcgccatcggtgacgtggttcgcggcgcgatgctcgcgcacaaggcctcggaagagggcgtgatggtcgccgagcgcatcgccggccacaaggcgcagatgaactacgacctgattccgtcggtcatctacacccacccggaaatcgcctgggtcggcaagaccgagcagaccctcaaggccgagggcgtcgaagtcaacgtcggcaccttcccgttcgccgccagcggtcgcgcgatggctgccaatgacaccaccggcctggtcaaggtcatcgccgatgcgaagaccgaccgcgtcctgggcgtccacgtgatcggcccgagcgccgccgagctggtacagcaaggcgcgatcggcatggaattcggcaccagcgccgaagacctgggcatgatggtcttctctcacccgacgctgtccgaagccctgcacgaagctgccctggcagtgaatggccatgccatccacatcgccaaccgcaagaagcgctga

SEQ ID NO: 30122 - DNA, 888 bp, Pseudomonas aeruginosa
atgagcgtcctgatcaacaaagacaccaaagtcatctgccaaggcttcaccggtagccagggtaccttccactccgaacaggccatcgcctatggcaccaagatggtcggcggcgtgacccccggcaagggcggcaccacccacctcggcctgccggtgttcaacaccgtcaaggaagccgtggaagccaccggcgccgaagcctcggtcatctacgttccggctccgttctgcaaggactcgatcctggaagcggcattcggcggcatcaagctgatcgtctgcatcaccgaaggcatcccgaccctcgacatgctggacgccaaggtcaagtgcgacgagctgggcgtacgcctgatcggcccgaactgcccgggcgtgatcactcccggcgagtgcaagatcggcatcatgccgggtcacatccacctgccgggcaaggtaggcatcgtgtcgcgttccggcaccctgacctacgaagccgtgaagcagaccaccgacgccggcttcggccagtccacctgcgtgggcatcggcggcgacccgatcccgggctccaacttcatcgacatcctgaagctgttccaggaagatccgcagaccgaagccatcgtcatgatcggcgagatcggtggttccgccgaagaagaagccgcggccttcatcaaggctaacgtgaccaagccggtggtgtcctacatcgctggtgtgactgcccctccgggcaagcgcatgggccacgccggcgccatcatctccggcggcaagggcaccgcggacgagaagttcgccgccctgcaggacgccggtgtgaagaccgtgcgttccctggccgacatcggcaaggccctggccgagctgaccggttgggaagtgaagaaggcctga

SEQ ID NO: 30123 - DNA, 1905 bp, Pseudomonas aeruginosa
atgagcgtggaaacccaaaaagagacactgggctttcagactgaagtgaagcaactgcttcacctgatgattcattctctctattcgaacaaggaaatcttcctccgcgaactgatttccaacgcctcggacgccgccgacaagctgcgtttcgaagccctggccaatcccgagctgctcgagggcggcgccgagctgaagatccgcgtcagcttcgacaaggaagccaacaccgtcaccctggaagacaacggcatcggcatgagccgcgaggatgtggtgactcacctgggcaccatcgccaagtccgggaccgccgacttcctgaagaacttgtctggcgaccagaagaaggattcgcacctgatcggccagttcggcgtcggtttctacagcgccttcatcgtcgccgacaaggtcgatgtctactcccgtcgcgccggccagccggccagcgaaggcgtgcactggtcgtcgaagggcgagggcgagttcgacgtcgccaccatcgacaagcccgagcgcggcacccgcatcgtcctccacctgaaaaagggcgaggaggagttcgccgatggctggcgcctgcgcaacgtgatcaagaaatactccgatcacatcgctttgccgatcgagctacccaaggaattccacggcgaagaggccgacaagccggccgagccggaatgggaaacggtcaaccgcgccagcgcgctgtggacccgtccgcgcgccgaggtgaaggacgaggaataccaggagttctacaagcacgtcgcccatgacttcgagaacccgctgagctggagccacaacaaggtcgaaggcaagctggaatacacctcgctgctctacgtgccgggccgcgcgccgttcgacctgtaccatcgcgaagcgccgcggggcctgaagctgtacgtacagcgcgtgttcatcatggaccaggccgacgagttcctgccgctgtacctgcgcttcatcaagggtgtggtcgactccaacgacctgtcgctgaacgtctcccgggaaatcctgcagaaggatccggtgatcgactcgatgaagtcggcgttgaccaagcgcgtgctggacatgctggagaagctggcgaagaacgagccggagcagtacaagaccttctggaagaacttcggccaggtcctcaaggaaggcccggcggaagacttcggcaacaaggagaagatcgccggcctgctgcgcttcgcctccaccggcgacgattcgggcgagcagagcgtagcgctggccgactacatcggtcggatgaaggaaggccaggacaagatctactacctcaccggcgagagctactcgcaggtgaagaacagcccgcacctggaagtcttccgcaagaagggcatcgaggtgctgctgctcaccgatcgcatcgacgagtggctgatgagctacctgccggagttcgacggcaagcagttcgtcgatgtcgcccgcggcgacctggacctgggcagcctggactcggaagaggacaagaaggcccaggaagaagtcgccaagagcaaggaaggcctgatcgagcgcctgaagaaggtgctcgacgagcaggtcagcgaagtccgcgtttcccaccgcctgaccgattcgccggcgatcctcgccatcggcgaacaggaccttggcctgcagatgcgccagatcctcgaggccagcgggcagaaagtgccggactcgaagccgatcttcgagatcaacccgcagcatccgctgatcgagaagctggatgcggagccggacgaggaccgcttcggcgagctgtcgcatattctcttcgaccaggccgccctggccgcgggggacagcctcaaggatccgggcgcctacgtacgccgactgaacaagctgctggtggagctgtccgcttaa

SEQ ID NO: 30124 - DNA, 1023 bp, Pseudomonas aeruginosa
atgacagagcagcaaccgattgccgtgctcggcggcggcagtttcggcaccgccatcgccaacctgctggccgagaacggccaggcggtccgccagtggatgcgcgacccggaacaggccgaggcgatccgcacacgacgcgagaacccgcgctacctgaaaggggtcaaggtgcatcccggagtcgacccggtcaccgacctggagcgcaccctggccgattgccaactgatcttcgtcgccttgccctccagcgccctgcgcaaggtgctgcaaccacaccaggcggcattgacggacaagctgctggtgagcctgaccaagggcatcgaggcgcacaccttcaagctgatgagtgagatcctcgaggaaatcgccccgcaagcccgcatcggggtgatttccggcccgaacctggcgcgcgagatcgcagagcacgagctgaccgccacggtggtcgccagcgaggacgacgagctgtgcgcccgcgtccaggcggccctgcacggccgcaccttccgcgtctacgccagccgcgaccgcttcggcgtggaactcggcggtgcgctgaagaacgtctacgcgatcatggccggcctggccgcggcgatggacatgggcgagaacacccgcagcatgctgatcacccgcgcgctggcggaaatgacccggttcgccgtcaagctcggtgccaacccgatgacctttctcggcctcgccggcgtcggcgacctgatcgtcacctgttcctcgccgaagagccgcaactaccaggtcggccacgccctcggcgaggggctcagcctggaggaggcggtatcgcgcatgggcgagaccgcggagggtgtgaacactctcaaggtactcaaggaaaagtccgacgagatgcaggtgtacatgccgctggtcgccggtctccatgcgatcctcttcgaaggccgcaccctggcgcaggtcatccagttgctgatgcgcggcgagccgaagaccgacgtcgatttcattcccaccaccggcttctga

SEQ ID NO: 30125 - DNA, 1068 bp, Pseudomonas aeruginosa
atgttcgataacgatcggctgttgcttcgcgtgctgctgttcggtctgctcggtgccagtctctgggtgctggcgccattctggtcggcgctgttctgggccgcggtgctggctttcgccagttggccgctgatgcgcatgctcacgcgcctgctcggtggccgcgagtcgctggcggcgggcctgctgaccctgggctggatcgtcctggtggcattgccgctgatctggctcggcttcggcctggcggacaacgttcgctcgctgatggagctgctgaagaatctccaggtcgagggcctgccgccgccgccttcgtggatggccggcgtaccgctgatcggcgaccgcctgatcggctggtgggactccatcgaccaacagggcgtggcgttcttctacgtgctcaagccctatgtcggcgaggtcggcaactggctgctggcgcgcagcgcgaagatcggcggagggatcctggaactggtcctcagcctgatcctgatcttcttcttctaccgcgacgggccgcgcctggagtccatcgtccaccgtgccctggagcgcctgatcggcaaccgcgcggagcactatcgcgaccttgtcgccggcaccgtacagcgggtggtcaacggggtgatcggtaccgccgcggcgcaagccctgctggcctggatcggcttcatgatcgccggcgtaccgggagccatgctgctcggcttgctgaccttcgcctgcagcctactgatggtcccgccgctggtctggggtccggccaccgcctggctgttcttcaagggcgactatggccacggggtgttcctcggcctgtggggcttcttcatcatcagcggggtggacaacatcctcaaaccctacctgatcagccgtggcggcaacctgccgctggtggtggtgctgctcggggtattcggcggcctgctggcgttcggcttcatgggcctgttcctcggcccgatcctgctggcagtggcctacaacctgctcagcgactggatcgccagcacgccgcggacgccgcccggcgaagggcgcggcccggatgcctga

SEQ ID NO: 30126 - DNA, 1530 bp, Pseudomonas aeruginosa
atgcccgatattcgttgtatcgccgtggtcggtaccggtgcgatgggcaccgggatcgcccagatagccgcccaggccggcctgaccgtatggctgttcgacagccgcgccgaggccgccgccgaggcacgccagcgcctgcggcagaccttcgagagcctgtgcggcaaaggcaagctgagcgccgccgacgccgaggccgcgcaaaaccggctgcgggtggcggaacgcctggaacaactgggcgactgcgaactggtggtggaggccatcgtcgagcgcctggaggccaagcaggaattgctgcgccggctggaagccatagtcgcgccggagagcatcctcgccagcaatacctcgtcgctgtcgatcaccgccatcgccgccgcctgcgagcggccgcagcgggtcgccggttttcacttcttcaacccggtgccgctgatgcgcgtggtcgaggtggtcgacggcctggccagcgctccggaagtcggcgacgccctgctcgccctcgccgcgcgcctgggccaccgcggcgtacggaccaaggacagccccggcttcatcgtcaaccatgccggccgcgcctatggcaccgaggccctgcgcatcctcggcgaaggcgtcgccgaatgcgccgagatcgaccgtgtgctgcgcgagtgcgccggcttccgcatggggccgttcgaactgctcgatcttaccggcctcgacgtgtcgcacccggtaatggaatcgatctaccagcagtactaccaggaaccgcgctaccgcccacacccgctgacccgccagttgctcgccgccggccgtctcgggcgcaagagcggccagggcttctatcgctacgtcgacggccagccgcaggacaagcccggtccgcaaccggtgccgcaggccgccgcccgaccaccggtgtggctgggctgcgaaaacgaggacgaccgccgcacgctcgccgaactgctgcatcgcctcggcgtcgagccggaaaccggcgaacgcccttccgccgcagcgctctgcctgctggccgcctggggcgaggacctgagcagcgccgtgcagcgcttcgcctgtcccgccgagcgcagcgtcggcatcgacctgctctgcgacctcgagcgccggcgctgcctgatgctctcgccgctgaccgccccggccatgcgcgacgcggcacacgcgctactggctggcgacggcgtcggggtcacggtgctgcgcgacagtcccggcttcgtcgtccagcgggtactggcgatgatcgtcaacctcgcctgcgacatcgcccagcagggcattgccagcgtcgaggatatcgaccaggcggtgcacctcggcctcggctatccccacggcccgctggaatggggcgaccgcctcggcccgcggcgcctgctgagcattctccagcgcttgcaggcgcttaccggtgacccgcgctaccggcccagtccctggctgcgccgacgagcgcaactgggcatgtccctgcgcgccggcgaaaccgccgccgtagactga

SEQ ID NO: 30127 - DNA, 1110 bp, Pseudomonas aeruginosa
atgcgcgacaacacccagcactaccgcgaactgtttctcgacgatatccccctgatggatgtgcgcgccccggtggagtaccacaagggcgcctttcccaacactgtcaaccggccgctgatgaacgacatcgagcggcagaaggtcggcaccagctacaagcagcacggccagcaggccgccatcgcccttggccacgaactggtctgcggggcgctcaaggccgaacggctggcggcctggaaagccttcgccgaagccaacccgaacggctacctgtattgcttccgcggcggcctgcgctcgcagatcgtccagcagtggctgaagcaggacgccggcatcgactacccacgggtgatcggcggctacaaggcgttgcgcaacttccttttcgaaaccacccgcgcggcggtcgacgagtgcgatttcgtgctggtcggcggccttactggttgcggcaagaccgaggtgatcgcggcgctggacaacagcctcgatctcgaaggccacgccaaccatcgcggctccagctttggccggcgagccacgccgcagccggcgcagatcgacttcgagaaccgcctggccatcgacatcctgaagaagcgtcatcgtggcgtcggccagttcgtcctcgaggacgaggggcggatcgtcggcagctgctccttgccgctggagctgtaccagggtatgcagggctacccgctggtctggctggaggatgccttcgagcagcgtgtcgagcgtatcctcagggactacgtgatcgatctgcgcagcgagttcgagcgcgtggtgggcgtggaggagggcttcgccgccttctccgcctacctgcagaagagcctcgccggcatcgtcaagcgcctcggcggcgagcgctaccagcggctggcggcgatcctcgtgcaggcgctggaagagcagggccgcgacggctcggtggatacccatcgcggctggatcgaggggctgctcaaggagtactacgacccgatgtacgccttccagcggcagagcaaggaagaccgcgtcgagttccgcggcaaccaggccgaggtgatcggctacctgcgccagcgtcaggcgttgcggccatcgtag

SEQ ID NO: 30128 - DNA, 762 bp, Pseudomonas aeruginosa
atgagcaaacttctttccggccaggtcgcactggtcactggcggtgcggcgggcatcggccgcgctaccgcgctggccttcgccgccgccggggtcaaggtggtggtcgccgacctggacagcgccggcggcgagggcacggtcgaggcgatccgccaggcgggaggcgaagccctcttcattcgctgcgacgtcacccgcgacgccgaggtcaaggcgctggtagagggttgcgcagcggcctacggccgtctcgactatgccttcaacaacgccggtatcgagatcgagcagggcaagctggccgacggcaacgaagccgagttcgacgccatcatggctgtcaacgtgaagggcgtctggttgtgcatgaagcaccagatcccgctgatgctggcccagggcggtggcgcgatcgtcaacaccgcctcggtcgccgggctcggcgcggcgccgaagatgagcatctacgctgcttccaagcacgcggtgatcggcctgaccaaatcggcggcgatcgagtacgcgaagaagggcatccgcgtcaacgccgtgtgtccggcggtgatcgacaccgacatgttccgccgcgcctacgaggccgatccgcgcaaggccgagttcgccgccgcgatgcatccgctgggtcgggtcgggcgggtcgaggaaatcgccgccgcggtgctctatctgtgctgcgacaacgcaggcttcaccaccggtatcgccttgccggtggacggcggggcgacggcgatctga

SEQ ID NO: 30129 - DNA, 477 bp, Pseudomonas aeruginosa
atgcctgacctgaaaaaccacgccgtccagcagcaggccatgatggaagccttcttcttcgcgtaccaggccttcaccaccaagcctgacgagatgctcgcccgccgcggcctgggacgtgtgcaccaccgcgtgctgttcttcatcgcccgctatccgggcctcagcgtgaaggaactgctggccctgctcggcgtgaccaagcaggcgctgaacatcccgctgcgccagttgctggagatgaacctgatcggcagcgccaccgccgacgacgacaagcgcaaacgcctcctcggcctcaccgccgagggcgtgcggttggaaaaggcgctgcgtcgcgagcagtcgcggctgctccaacgctgcttcgaggaagccggcggcgaagcggtctccggctggctggcggtcaatcgcaccctggctcgggcgcatgcaggcagccgcggcgaagcggcgacggaggccgccgactga

SEQ ID NO: 30130 - DNA, 1092 bp, Pseudomonas aeruginosa
atgtccggcaacacctacggcaagctcttcaccgtcaccaccgcaggcgaaagccacggcccggcgctggtcgccatcgtcgatgggtgccccccggggctggaactgtccgcccgggacctgcaacgcgacctcgaccggcgcaagcccggcaccagccggcacaccacccagcgccaggaagccgacgaggtggagattctttccggggtgttcgagggcaagaccaccggcacgccgatcggcctgctgatccgcaacaccgaccagaagtccaaggactactcggcgatcaaggacctgttccgcccggcccatgccgactacacctaccaccacaagtacggcgtgcgcgactaccgcggcggcggccgttcctcggcgcgcgagaccgccatgcgcgtggccgccggggctatcgccaagaaatacctggcgggcctgggcatccaggtgcgcggctacatgagccagctcgggccgatcgagattccgttcaggagctgggacagcgtcgagcagaatgccttcttcagccccgacccggacaaggtgccggagctggaggcctacatggaccaattgcgccgcgaccaggattcggtcggggcgaagatcaccgtggttgccgaaggcgtgccgccgggcctgggcgagccgatcttcgaccgcctggacgccgaactggcgcatgcgctgatgagcatcaacgcggtgaagggcgtggagatcggcgccggcttcgccagcatcgcccagcgcggcaccgagcaccgcgacgaactgaccccgcaaggcttcctgtcgaacaatgccggcggcatcctcggcgggatctcctccggccagccgatcgtcgcccacctggcgctgaagccgacctccagcatcaccactcccgggcgctcgatcgataccgccggcgagccggtggacatgatcaccaagggccgtcacgacccgtgcgtcggcatccgcgccacgccgatcgccgaggcgatgatggccatcgtcctgctcgaccaattgctgcgccagcgtgggcagaacgccgacgtgcgcgtcgacacgccggtcctgccgcagctgtga

SEQ ID NO: 30131 - DNA, 2103 bp, Pseudomonas aeruginosa
atggaccaaacggaagtccgaaccacccaatcgcccccacggctgttccagcccaccatccgcagccacctggcgttcaccgcgctcagcgcgctggtgctgctggtcatgttcagcctgctgcgcctggccttgctgatctacaaccgcgaactgatcggcgcgaccccggcgagcaccttcctcgaggcgttcggcaacggcgtgcgtttcgacctgcgggtcgtcgtctatgccgtggcgccgctggtgctgtcgttgttcgcggtacgcgcgatggccgctcgcggcctgttccgtacatggttgacgctgttcgccagcatcaccctgttcctcggcgtactcgaactggacttctaccgcgagttccaccagcgcctgaacagcctggtcttccagtacatgtcggaagacccgaagaccgtcatgagcatgctctggtacggcttcccggtggtccgctacctgctggcctgggccttcgccacctgggtgctgtaccgggtgttcaaggccatcgacctggtgacccgcccgagccagcgcaagccgcgcgaagacagcgtgatcgcccggccgagcgctgccgcgccctggtacgtgcgcggcgtggtgctgttcctctgcgtgctggtctgcgtcctcgccgcccgcggcaccctgcgccagggcccgccgctgcgctggggcgatgccttcaccaccgagtccatgttcgccaaccagttgggcctgaacggcaccctgaccctggtcaaggcggccaaggagcgcttctccgaagaccgcgcgaacatctggaaggccaccctggacgacaaggtcgccctggagaccacccggcagatgttgctgacccccaacgacaagctggtggacgccgatgaggccgcggtgcgccgcgagttcaccccgccggcggcgaataccctgccgatccgcaacgtggtggtggtcctgctggaaagcttcgccggccactatgtcggcgccctgggcgcgccgggcaacatcacgccgtatttcgacaagctgtcgaaggaaggcctgctgttcacccagttcttctccaacggcacccatacccaccagggcatgttcgccaccatggcctgcttccccaacctgccgggcttcgaatacctgatgcaaaccccggagggcggccacaagttctccggcctgccgcagttgctcagcgcccgccagtacgaggacgtctacgtctacaacggcgatttcgcctgggacaaccagtccggcttcttcagcaaccagggcatgaccaccttcatcggccgcaacgactatgtcgacccggtgttctccgatccgacctggggcgtctccgaccaggacatgttcgcccgtggcaacgaggaactggacaagctggcgagcaccggcaagccgttctatgcgctgttgcagagcctctccaaccacgtgccctatgcgttgccgaaggacctgccggtggagcgcgtgaccggctacggttcgctcgacgagcacctgaccgccatgcgctattccgactgggcgctgggccagttcttcgagaaggcgaagaagtcgccgtactacaaggacacccttttcgtggtggtcggcgaccatggcttcggcagccccgagcagctcaccgagatggacctgcaccgcttcaacgtgccgctgctgctgatcgcccccggcatccaggagaagttcggtacccacctgccgaccgtcggtacccaggtcgacatcgtgccgaccatcatgggcctgctcggcggcgagaccgtccaccagtgctggggccgcgacctgctgaacctgccggaaggcgacacgggcttcggcgtgatcaagccgtcgggcagcgagcagaacgtcgccatcgtctccggcaaccgcatcctggtgcggccgaaggacggtgacgtgcgcgtctacgattaccaactgggcggcgatgccaaggcggtgatcaccaaggaagtgccggaccaggccgagctgcagaagaagctggagtcgttcatccagaccgcgaccaagagcctgctggagaataccgcgggcgtggtacacgggatcccggacaaggactga

SEQ ID NO: 30132 - DNA, 504 bp, Pseudomonas aeruginosa
atgaaccagccgaccccttccgacaccgaccagcaacaggcgctggaggccttcctgcgcgacggcggcaccctggcgatgcttcgcggactcagcgaggacaccctggagcagctctatgcgctgggcttcaaccagtaccaggcgggcaagtgggacgacgcgcagaagatcttccaggcactgtgcatgctcgaccactacgacgcccgctactttctcggcctgggcgcctgccgccagtccctcggtctctatgaacaggccctgcagagctacagctacggcgcgctgatggacatcaacgagccgcgctttcccttccatgccgccgagtgccacctgcaactgggtgatctcgacggagccgagagtggcttctactcggcccgggccctggccgcggcacagccggcgcacgaggccctggccgcgcgtgccggcgccatgttggaagccgtaaccgcgagaaaggatcgagcatatgaatccgataacgcttga

SEQ ID NO: 30133 - DNA, 2295 bp, Pseudomonas aeruginosa
atgaacaggctgtgtgtactggggcttctcatcgggctgagcgggagcccggcactggcggctggccagggcgaatccggcaatccgccggccaccgacaaggagcgtttcatcgccagcctgatggctcgcatgagcaacgcggaaaagatcggccagctacgcctggtcagcgtcggcgccgaccatcccaaggaagcgctgatggcggatatccgcgccggcaaggtcggcgccatattcaataccgtgacccgcccggacattcgcgccatgcaggaccaggtccgccatagccgcctgaagatcccgctgttccatgcctacgacgtggcccacgggcaccgcaccatctttcccatcagcctcggcctggccgccagctgggaccccgaggtggtcgcccgcagcgcgcggatctccgccctcgaagccagcgccgacgggctcgacatgagcttctcgcctatggtcgacatcacccgcgacgcgcgctgggggcgggtctcggaaggcttcggcgaagacacctacctgacctcgctgctgtccggcgtgatggtccgtgcctaccagggctccaacctggccgccccggacagcatcatggcggcggtcaagcacttcgccctgtacggcgcggccgaaggcggccgcgactacaacaccgtggacatgagcctgccgcgcatgttccaggactacctgccgccctacaaggccgcggtggacgccggcgccggcgcggtgatggtctcgctgaacaccatcaacggcgtgcccgccaccgccaaccgctggctgctgaccgacctgttgcgccagcagtggggcttcaaggggctgaccatcagtgaccacggcgcggtgaaggaactgatcaagcacggcctcgccggcaacgagcgggacgccacgcgcctggcgatccaggccggtgtcgacatgaacatgaacgacgatctctactcgacctggctaccgaagctgctggcggccggcgagatcgaccaggccgacatcgatcgcgcctgccgcgacgtgctggcggcgaagtacgacctcggcctgttcgccgatccctaccggcgcctgggcaagccggacgacccgccgttcgacaccaacgccgagagccgcctgcaccgccaggccgcccgcgaggtggctcgcgaaggactggtcctgctgaagaaccgcgacggtctgctgccgctgaagaaacaggggcggatcgccgtgatcggccccctggccaagagccagcgcgacgtcatcggcagttggtcggcagccggcgtgccacgccaggcggtaaccgtctaccagggcctggccaatgccgtcggcgagcgtgccaccctgctctacgccaagggtgccaacgtcagtggcgaccaggcgatcctcgactacctgaacagctacaacccggaagtcgaggtcgatccgcgctccgccgaggcgatgctcgaggaggccttgcgcaccgcgcgcgacgccgacctggtggtcgccgtggtcggcgaatcgcagggcatggcccacgaggcctccagtcgcaccgacctgcgcatcccggccagccagcggcggctgctgaaggcactgaaggccaccggcaagccgctggtgctggtgctgatgaacggccgaccgctgtcgctgggctgggagcaggaaaacgccgacgcgatcctggaaacctggttcagtggcaccgaaggcggcaacgccatcgccgacgtgctgttcggcgagcacaaccccagcggcaagctgaccatgtccttcccgcgctcggtgggccaggttccggtttactacaaccacctgaacaccggccggccgatggaccacgacaaccccggcaaatacacctcgcgctatttcgacgaagccaacggcccgctctacccgttcggctacggcctcagctacaccgagttcagtctctcgcccctgcgcctgtccagcgaacggctggcccgcggcgctaccctggaagcgcgggtcacgctcagtaacagcggcaagcgcgccggcgccacggtggtccagctttatctgcaggacccggtcgccagcctcagccgtccggtgaaggaactgcgcgggttccgcaaggtgatgctggagcccggcgaatcgcgggagatcgtcttccgcctcggcgaggcagacctaaagttctacgacagccagctcaggcacacggccgagccgggcgagttcaaggtcttcgtcggcctggattcggcgcaaaccgaaagccgcagcttcaccctgctctga

SEQ ID NO: 30134 - DNA, 915 bp, Pseudomonas aeruginosa
atgaagaagcccgatctcgccggtctcgccgccttcgtcgccatcgctcgcgaacgcagtttccgccgcgccgccgccaccctcggcgtaaccccgccgacgctcagccacaccctgcgcgaactggaaacccagctcggcatccgcctgctcaaccgcaccactcgcaacgtctcgccgaccgaggccggcgagcacctgctggcacacctggacccggcgttcgaagacatcgccgccgcgctggacagccttaaccgctttcgcgaaacgcctcacggcctggtacgaatcaacgcaccgcgaaacgccatcggtctcgtcctcgcaccacgtttcggcgaactggcccgcgactatcccggcatcaccctggaagtggtggcggacgaaggtttcgccaatatcgtcgaagccggtttcgacgccggcatccgcctcggcgaagacctccagcacggcatgcgcgccgtgcgggtcggcccggacctgcgcttggccatcgtcgcgaccccggcttacttccgacggcaaggcaggccgggtagcccggaggaactgctcggccaccgttgcatcggctggcgcaaggtgtcttccggagagctgtacaaatggcaattcagcaagggcacgaaagcgctttcggtggccatgagcggaccgctggtcctcgacgacccgcgcctgatgctacaggcggcgctggccgatgtcgggattgccttcgccatcgaggaggaagtcgccgagcacctcgccgccggccgcctggaacgggtcctggcggattggtgcgccccctttcccggtttccatctctattatccgaaccgccgcaaccacccggcggcgttgagcgccgtgatcaacctgctgcgctaccccggcgaggaacacccaggtcccgcgtag

SEQ ID NO: 30135 - DNA, 1362 bp, Pseudomonas aeruginosa
atgcccagttgtcatgttcaccccctgccctaccatagcgacccaagctgtctctttgccatcatccatgaggcgcccggtgcggtgatgctcgattcgggtcgccccatcgctacccgtggacgctatgaccttatgagcgcctggccattggcagaactggcgccgctgcccgacgaatcggccaaccgcttcttcgcccgcctacgcgaagcggccggaagcctgggccccgcgcagctgccagcgccgtacgaactgcccttcgccggcggtctgctgggctatttatcctacgacctgggtcggcgcatcgagcgcatcggcgaacacgcccgcgatgacctgggcctgccgctggcctccgtcggcctgtatgcctgggcgctgatcagcgaccaccaggccggcaccagccaactggtattccacccgcgattggacgagcgcgaacgccagcgcctgatcgccctgttcagcgaggaagcgcaaggcacggccggcaacttcaagcttctgggaaaattccgacggagcatcagcgcatccgactatcggcaggcgatccgccgcatccaggactacatccaggcaggcgactgctaccaggtgaactatagccagcgcttccaggccgcttgcagcggctcgccgtggccggcctatcgcgccctgcgcgaggcctgcccgacgccgttctccggctacctgcgactggccgacggcgcgatcctcagcctgtcgccggagcgcttcctcaagctcggcaagggcaaggtggaaacccggccgatcaagggcacccgcccgcgcggcaagacccccgaggaggacatggcgctggcggcgtcgctgctggccagccccaaggaccgcgcggaaaacctgatgatcgtcgacctgctgcgcaacgacatcggacgcagttgccaacctggcagcgtacgggtaccggagctgtttgccctggaaagctatcccaacgtgcatcacctggtgagcagcgtcaccggcgaactggcgccgggcaaggacgccctcgacctgctggaaggcagcttccccggcggctcgatcaccggcgcgccgaagattcgcgccatgcagatcatcgacgagctggaaccgagccgacgcggcatctactgcggcagcctgttctacctcgacgtgcgcggcgagatggacagctcgatcgccatccgcaccctgctggtcagggacggccaggtcagttgctggggcggcggcggcatcgtcgccgactcgcactgggaggacgagtaccaggaaaccctggacaaggtccgggtgctgctggaaaccctggaaggaatggccgggacagcgtccccggaatag

SEQ ID NO: 30136 - DNA, 825 bp, Pseudomonas aeruginosa
gtgcaaatgaaacgaaccgcattcttcatctcggacggcaccggtatcaccgccgaaaccctgggccaaagccttctggcacagttcgagaacatcagcttcgtcaaactgacgagaccgtacatcgataccgaagaaaaagcgcgcgccatggtacagcaaatcaataatgctgccgagtcggacggggcccgcccgatcatcttcgataccatcgtgaaccgcgacatccgggcggtcctggcgcaatccaacggtttcatgatcgatatcttcgccacctttctttcgcctctggaacaggagctttcggccgactcgtcctattcggtcggcaagtcccactccatcggccacaactccaactacatggatcgcatcgaggcggtgaacttcgccctcgacaacgacgacggcgcccgcacccactactacgacaaggccgacctgatcctggtcggcgtctcgcgctgcggcaagacgcccacctgcctgtacatggccctgcagtatggcatccgcgccgccaactacccgttgacggaagaggacatggagcgcctgcaactgccgaacgccctcaagcagtacaagcacaagctgttcggcctgaccatcgaccccgatcgcctcaccgcgattcgcaacgagcgcaagcccaacagtcgctacgccagcttcgcccagtgcgaattcgaggtacgcgaggtcgaaagcctgttccgccgcgaaaacatcgcctacatcaactccacgcatttctcggtggaggagatttccgcaaagatcctcgtcgaaaaaggcgtggaacggcgcttcaaataa

SEQ ID NO: 30137 - DNA, 2727 bp, Pseudomonas aeruginosa
atgtcgacagattccccgctgcgcaccaccgcttcgacctgctgctactgcggcgtgggttgtggcgtcctgatcgaacacgacggcgaacgcatcctcggcgtgcaaggcgatccgcggcacccggccaacttcggcagactctgcagcaaaggcgccagcctgcacctgaccggcgacctccaggcccgcgcgctgtacccccaactgcgcctcggcaagcaactggcgcgggctcgcagcgactgggagagtgccctggaacatgccgccgggcgtttcgccgagaccattcgcgaacacgggccggacagcgtggccttctatatatccggccagttgctgaccgaggactactacgccttcaacaagctggcgcgggccctggtcggcaccaacaacatcgacagcaattcgcgcctgtgcatgtcctcggcggtggtcggctacaagcgcagcctgggcgccgacgcaccgccgtgcagctacgaagacctcgactgcgccgattgcgtgctgatcgccggcagcaacatggccttcgcccacccggtcctgttccgtcgcctggaggccgccaaggccgctcggccggagatgcgcatcgtcgtgatcgacccgcggcgcaccgacacctgcgagctggccgacctgcacctggcgctgctgcccggcaccgacgtcgcactgttccacggcatcctgcatatcctgctctgggaggactggatcgaccgttcgttcatcgccgagcataccgagggtttcgccgacctgaaggaactggtgcgcgactacaccccggccgccgtcgccgacatctgcggcatcgaccgcgccgacctgcagcgctgcgccgaatggatcggccgttcgccgcgcttcctttcgctctggtgcatggggctcaaccagtccagcgccggcagcgccaagaacagcgcgctgatcaacctgcacctggccaccggcaagatcggccgcgccggatgcgggccgttttccctcaccggccagccgaacgccatgggcggtcgcgagaccggcagcctggccaacctgctgcccggccaccgcgaagccgccgatcccggccatcgcgccgaggtggcgcactactggggtgtggaacagttgcccacgtcccccggtctcagcgccatcgagctgttcgatgcggtccacgacggtcggatcaaggcgctctggatcgcctgtaccaaccccgcgcaatcgctgccggaccagcgcaagatccacgaggcccttgcccgctgtcccttcgtggtggtccaggaagccttcgccggcacggaaacctgccaatacgccgaccttttgcttccagccgcatcctggggagaaaaggaaggctccgtgaccaattcggaacggcggatcagtcatgtccgtcgggccgttccgccccccggtgaagcgcgccaggactggaacatcgtctgcgacttcgcgcgccgcctggaagggcacctgcggcccgctaaacccggcctgttcgcctttgccgacagccgcagcctgttcgacgaatacaagctgctcaccgccgggcgcgacctcgatctttccggcctcagctacgcactgctcgaccgcctggggccgcagcaatggccatttcccactggcgcggagcaaggcaccgcacggctctatgcagacggccgcttccctaccgcctcgggacgcgcgcaactggtcgccgaaccctaccgcgccgcccaggaaaaacgcgacgcgcgctacccgctgaccctcaataccggacgcttgcgcgaccagtggcacggcatgagccggaccggcacctgcgcacgcctgttcggccatgaagaggaggccctggtgcacctgcatcccgaggaactgcgccgccgccaactgctggacgggcagctcgtgcgcctgaagagccggcgtggcgccctggtcctgccggtgagcgcagacgactcggtgcgccccggccaggccttcctgccgatgcactggggcgatcgcttcctcaagggcctgggctgcaatgtcctgaccctgccggcgttcgaccccctgtcgaaacaacccgaactcaagcacgccggggttcaggtcgagtccgtcgaactgccctggcgcctgttcgcgctggtggaaaccgatatccaggcgcgtttcgaggccctccgtgcgctgtgcgaagtcttcgaccacgccagcttcagtctcgccggacgcgagcgccccgccctgctggtcagcgccgcacaccatgaggcacctggcgcagacctgctggagcggatagatcgccaactcgaattgctcgacgggccgatcctcgcctacgacgacccacggcgggccatcggcaagcgcgtgcgcctcgaagacgggcgcatcgtcgccgtccggctcgccggcgaaaccctcgcccgtgactggttgaaagagctctggcttaccggccgggccgatagcgagctacgccgctggctgctcgccccactcggcgcggcaccgggacgacccagccagggtgcgggcggcaagaccctgtgcagttgccagaacgtcagccagcaaacggtgctcggcggcatcgcccgcggattggacctggacggattgaagcgcgagttcggctgcggcaccggctgcggctcctgcgtaccggaaatcaagagactgctggcggccccccggcccatggcagcgaatgcctga

SEQ ID NO: 30138 - DNA, 327 bp, Pseudomonas aeruginosa
atgaactggctggatatctgctccctcgatgaaatcaacccgctgggctcgcgcgtggtcgccggcccgaaaggcgacatcgccatcttccgcgccgccgacgaccaggtcttcgccctcgatgaccgctgcccgcacaagggcggcccgctgtcccagggcctgatctacggcaagcgagtggcctgtccgttgcacaactggcagattgaactggagagcggcgaagccgtggccccggaccagggctgcgcccatcgccacccggtgcgggtggagaacggacgggtgctgctcggcctggacagcgtggcgctgtgcgcctga

SEQ ID NO: 30139 - DNA, 2451 bp, Pseudomonas aeruginosa
atgaagaagatcaagctggtgatggtcggcaacggcatggccggggtccgtaccctggaagaactgctcaagctcaactcggacttctacgacatcacggtgttcggcgccgagccccatcccaactacaaccgcatcctgctgtccccggtgctggccggcgagcagaccttcgaggaaatcgtcctcaacgacctcaactggtatgcggaaaacggcatcaagctcctcctcgaccgcaaggtggtgcagatcgaccggcttcgccgcagggtggtcgccgcggacggcagcgaggccgagtacgaccgcctgctgctggccaccggctcgctccccttcatcctgccgatacccggcaatcgcctgcagggcgtgatcggctaccgcgacatcgccgacacccaggccatgatcgactgcgcccggacccacagccacgcggtggtgatcggcggcggcctgctcggcctggaggcggccaacggcctcaagcaacgcggcatggacgtgaccgtcgtgcacctctccgactggctgctggaacgccaactggaccgcaccgccggcaaactcctgcaaggcgcgctggaagcccgcggcatccgcttccgcctgaacacccagacccaggaactgatggacaacggcagcggccgggtctgtgccgtgcagttcaacgacggcgacgtgattcccgccgacctggtggtaatggccgccggcatccgccccaataccgagctggccgaaagcgcgggcatcccctgcaaccgcggcatcctggtcaacgacaccctgcagacctacgacccacgcatctatgcggtcggcgaatgcgccaaccaccgtggcatcgcctacggcctggttgcgccgctgttcgagcaggccaaggtctgcgccaaccacctggctcatctcggctacgcccgctaccagggctcggtgacctcgaccaagctcaaggtgaccggtatcgacctgttctccgccggcgacttcatcggcggcgaaggcagcgagaccatcaccctttccgaccccatcggcggcgtctacaagaagctggtgatcaaggacgatgtactggtcggcgcctgtctctacggcgacaccgccgacggcggctggtacttccggcagatccgcgagaaccacaacgtcgcgcagatccgcgaccacctgatgttcggcgagaacgccctcggcgatgtcggccaccagggccagaacagcgccgcgagcatgcccgacacggccgaagtatgtggctgcaacggcgtctgcaagggcaccatcgtcaaggccatacaagaacacggcctgttcagcgtcgacgaagtcaagaaacacaccaaggccgccagctcctgcggctcctgcgcgggattggtggaacagatcctgatcagcaccgtcggcggcgccgccgacgtcaagccgaagagcgagaaggccatctgcggctgcagcgacctcaaccacgggcagatccgcaaggccattcgcgaacaccggctgaccagtctcgacgccgccatgcgcttcatggactggaagaccccgaacggctgtgccacctgccgcccggccctgaactactacctgatctcgacctggccgggagaagccaaggacgatccgcagtcgcgcctgatcaacgaacgcgcccacgccaacatccagaaggacggcacctactcggtggtaccgcggatgtggggcggcgtgaccaacgccgccgagttgcggcgcatcgccgacgtcgccgacaagtaccaggtgccgatggtcaaggtcaccggcggccagcgcatcgacctgctgggggtgaagaaggacgacctgccggccatctggaaagacctcgacatgccctccggacatgcctacggcaaatccatccgcaccgtgaagacctgtgtcggcagcgaattctgccgcttcggcacgcagaactcgacgcagctgggcatcgatctggaacacgacctgttcaacatgtggtcgccgcacaaggtcaagctggcggtctccggctgcccgcgcaattgcgccgaggccgggatcaaggacgtcggcatcatcggcgtggactccggctgggagatgtacatcggcggcaacggcgggatcaagaccgaggtcgcggagttcttcgtcaagctcaagaccgccgaagaggtgcgcgaatacaacggcgccttcctccagctctaccgcgaggaagccttctacctggagcgcacggtgcattatctgcagcgggtcggcatggagcacatccgcaaggcggtggtcgaggacgcggaaaaccgcaaggcgctcaacgaccgcctgcaattcgccctgtccttcgagcaggacccatggaagcagcgcatcgaacagccgcaattgaagaaggagttcgaacggatttcgctcaagcaactggaaaacgtctga

SEQ ID NO: 30140 - DNA, 2610 bp, Pseudomonas aeruginosa
gtgcttgaagcctaccgcaaacacgtagaagagcgtgccgcccagggtgtcgtgccccaaccgctgaacgccgaacagaccgcaggcctggtcgagctgctgaagaacccgccggccggcgaagaagaattcctccttgacctgatcaccaaccgcgtaccgccgggcgtcgacgaagccgcctacgtcaaggccggattcctttccgccatcgtcaagggcgaagccacctccccccttatcgacaagcaacgtgccgccgagctgctgggcaccatgcagggcggctacaacatcgccaccctggtcgaactgctggacgacgccgaactggccaacaccgccgccgaacagctgaagcacaccctgctgatgttcgacgccttccacgacgtcgccgagcgcgccaagaagggcaatgccgcggccaagtccgtgctgcaatcctgggccgatggcgagtggttcaaggccaagccggaagtcccggaaaagctgactctcaccgtattcaaggtccccggcgaaaccaacaccgacgacctctccccggcccccgacgcctggtcgcgcccggacatcccgctgcacgccctggccatgctgaagatggcccgcgacggcatcgagccggtccagccgggttcggtcggtccgctgaagcagatcgaagcggtcaaggccaagggcttcccggtcgcctacgtcggcgacgtggtcggcaccggttcctcgcgcaaatccgccaccaactcggtgctgtggttcttcggcgacgacattccgttcgtgccgaacaagcgtgccggcggcttctgcttcggcaccaagatcgcaccgatcttctacaacaccatggaagatgccggcgccctgccgatcgagttcgactgcaccaacctggccatgggcgacgtcatcgacgtatacccctatgaaggcaaggtcgttcgccacgacagcggcgaagtggtcaccaccttcgagctgaagaccccggtcctgctcgacgaagtccgcgccggcggccgtatcccgctgatcgtcggccgtggcctgaccgagaaggcccgcgccgagctgggcctgggcgcctccgacctgttccgcaagccggaagcaccggccgatagcggcaagggcttcaccctggcgcagaaaatggtcggccgcgcctgcggtctgccggaaggccagggcgtgcgcccgggcacctactgcgaaccgaagatgaccaccgtcggttcccaggacaccaccggcccgatgacccgcgacgaactgaaggacctcgcctgcctcggcttctccgccgacctggtgatgcagtccttctgccacaccgcggcctatccgaagccgatcgacgtcaagacccaccacaccctgcccgacttcatcatgacccgtggcggcgtgtcgctgcgtccgggcgacggcatcatccacagctggctgaaccgcatgctgctgcccgataccgttggtaccggcggcgactcgcacacccgcttcccgatcggcatctcgttcccggccggctccggcctggtggccttcgccgccgccaccggcgtgatgccgctggacatgccggagtcggtgctggtgcgcttcaagggcaagctgcaaccgggcatcaccctgcgtgacctggtccatgcgatcccttactacgcgatccagcagggcctgctgaccgtcgagaagaagggcaagaagaacatcttctccggccgcatcctcgagatcgaaggcctcaacgacctgaccgtggagcaggccttcgagctgtccgacgcctcggccgagcgttccgccgccggctgcaccatcaagctgccggaacaggcgatcgccgagtacctgaagtccaacatcaccctgctgcgctggatgatcggcgaaggctacggcgacccgcgcaccctggagcgtcgcgcccaggcgatggaagcctggctggccaagccggagctgctggaagccgacaaggacgccgagtacgccgcggtgatcgagatcgacctggccgacgtcaaggagccagtgctctgcgcgccgaacgatccggacgacgcgcgtctgctgtcgagcgtacagggccgcaagatcgatgaagtgttcatcggctcctgcatgaccaacatcggtcacttccgcgccgccggcaagctgctggacaaggtcaagggcggcatcccgacccgtctgtggctggctccgccgaccaagatggacgcccaccagctgaccgaggaaggctactacggcatctacggcaaggctggcgcgcgcatggaaatgccgggctgctcgctgtgcatgggcaaccaggctcgcgtccagaccggttccaccgtggtctccacttcgacccgtaacttcccgaaccgtctgggcgatgccaccgatgtgttcctggcatcggccgagctggcggcggtctcctcgatcctcggcaaactgccgaccgtggaggagtacatggcctacgcgaaggacatcgacagcatggctgccgacgtctaccgctacctgagcttcgaccagatcgccgagttccgcgaagcggctgcgaacgccaagatcccggtcgtccaggcctga

SEQ ID NO: 30141 - DNA, 1671 bp, Pseudomonas aeruginosa
atgagcaagccagagaccaccgccgccccgaacttcctgcgccagatcgttcaagccgacctggatgccggcaagcacgcgaagatcgtcacccgtttccccccggagcccaacggttacctgcacatcggccacgccaagtcgatctgcctgaacttcggcctggcccaggaattcgctggcgattgccatctgcgcttcgatgacaccaacccggccaaggaagaccaggagtacatcgatgccatcgaggccgacatcaagtggctgggcttccagtggtccggcgaggtctgctatgcctccaactatttcgaccagctgcatgcctgggccgtcgagctgatcaaggccggcaaggcgttcgtctgcgacctcggtcccgaggaaatgcgcgaataccgcggcaccctcaccgagccgggccgcaacagcccttaccgtgaccgttcggtggaggagaacctcgacctgttcgcccgcatgaaggccggtgagttccccgacggcgcccgttcgctgcgggcgaagatcgacatgggttcgccgaacatgaacctgcgcgatccgatcctgtaccgcatccgccatgcgcatcaccaccagaccggcgacaagtggtgcatctacccgagctacgacttcacccacggtcagtcggacgccatcgagggcatcacccattcgatctgcaccctggaattcgaagaccatcgtccgctctacgagtggttcctggccaacctgccggtacctgcgcaaccgcgccagtacgaattctcccggctcaacctgaactacaccgtgaccagcaagcgcaagctcaagcaattggtcgacgaaggccatgtcagcggctgggacgatccgcgcatgtcgaccctgtccggctatcgccgccgcggctacaccccggagtcgatccgcaacttctgcgagatgatcggggtgaaccgcgccagcggcgtggtcgacatcggcatgctcgagttcagcatccgcgaccacctggacgccaccgcgccgcgtgccatgtgcgtgctgaaaccgctcaaggtggtgatcaccaactaccccgaagggcaggtggagaacctcgagttgccgcgtcatccgaaggaagacatgggagtgcgcgtactgccgttcggtcgcgagctgttcatcgatgccggtgacttcgaggaagtcccgccggccggctacaagcgcctgatccccggtggcgaggtgcgtctgcgcggcagctacgtgatccgtgccgacgaagcgatcaaggatgccgacggcaatatcgtcgaactgcgctgcagctacgatccggacaccctgggcaagaacccggaaggccgcaaggtcaagggcgtgatccactgggtgccggccgagggcagcgtcgagtgcgaagtgcgcctgtacgatcggctgttccgctcggccaatccggagaaggcggaagagggcggcagcttcctcgacaacatcaacgccgactccctgcaggtactggccggctgtcgcgccgagccgtcgctgggccaggcgaacccggaggatcgcttccagttcgagcgcgaaggctatttcgtcgccgacctgaaggactccaggccgggcaagccggtgttcaaccgtaccgtcaccctgcgtgactcctggggacagggctga

SEQ ID NO: 30142 - DNA, 1383 bp, Pseudomonas aeruginosa
gtgctgcagatctacaacacgctgagcaagaccaaagaagtcttcacgccgctggtcggcaaccaggtgcgcatgtacgtgtgcggcatgaccgtgtacgactactgccatctgggccacggccgcagcatggtggcgttcgacgtgatcacccgctggttgcgccaccgtggctacgacctgacgtacgtgcgcaacatcaccgatatcgatgacaagatcatcaatcgcgccaacgagaacggcgaaccgttcgatgtgctgaccgagcgcatgatcgcggcgatgcacgaggacgaggcccggctgaacatcctcaagccggaccaggagccgcgtgccaccgatcacatcgccggcatgcacgcgatgatccagaccctgatcgacaagggctatgcctacgcgccgggcaacggtgacgtgtactaccgggtcggcaagttcgctggctacggcaagttgtcgcggcggcgggtcgaggacctgcgcatcggtgcgcggatcgaaccgggcgaagcgaaggaggatccgctcgatttcgtgctctggaagggcgccaagccgggcgagccgagctggtcgtcgccctggggcgaggggcgcccgggctggcacatcgaatgctcggtgatgtccacctgctgcctgggcgattccttcgacatccatggcggtggcaacgacctggagttccctcaccacgagaacgagatcgcccagagcgaggccgcgaccggcaagccctacgccaagtcctggctgcactgcgggatgatcaccatcaacggcgagaagatgtccaagtcgctgggcaatttcttcaccatccgcgaagtgctggagaaatatcaccccgaagtggtgcgttacctgctgatcgccagccattaccgcagtccgatcaactactcggaggagaacctgcgcgaggccaaggcggccctggaccgtttctacaacgcgctcaaggggctgcccgaggcggcgccggcggaagcggcggagtatgtcgagcgcttcgccgcggcgatggacgacgacttcaataccgcgggtgcctgctcggtgctgttcgagctggcgcgggaggtcaatcgtctgcgcgaaagcgacctgtcggcggcggccgcgctggccgcgcgcctgaagcagttggctggcctgctgggggtgctgcaactggagccggaagccttcctgcaggcgggcgccgagggcaaggtcgatgcggccgaggtcgaggcgctgatccaggcgcgcctggaggcgcgggcggcgaagaactgggcggagtccgaccggattcgcgatcagctcaccgccatgggcgtagtgctggaggatggcaagggcggcactacctggcgcctggccgactga

SEQ ID NO: 30143 - DNA, 1281 bp, Pseudomonas aeruginosa
atgactgatacccgcaacggcgaggacaacggcaagctgctgtattgctccttctgcggcaagagccagcacgaagtgcgcaagttgattgccggcccctcggtctttatctgcgacgagtgtgtcgacctgtgcaatgacatcatccgcgaggaggtgcaggaagcgcaggcggaaagtagtgggcacaaacttccggcgccgaaagagatccgcaccatcctcgatcagtacgtgatcgggcaggagcgggccaagaaggttctggcggtagcggtatacaaccactacaagcgcctcaaccagcgtgacaagaaggacgatatcgagctcggcaagagcaacattctgatgatcggcccaaccggctcgggcaagaccctgctggccgagaccctcgcacgtctgctgaacgtgccgttcaccatcgccgatgcgaccacgctgacggaagcgggctacgtgggcgaggatgtcgagaacatcatccagaaactcttgcagaagtgcgattacgatgtggagaaggcccagatgggcatcgtctacatcgacgagatcgacaagatttcccggaaatcggacaacccctccatcactcgcgacgtctccggcgagggtgtgcagcaggccctgctgaagctcatcgagggtaccgttgcctcggtaccgccgcagggcggtcgcaagcatccgcagcaggagttcctgcaggtcgatacgcgcaacatcctgttcatctgcggcggcgctttcgccggtctggagcgggtcatccagaaccgttccgcgcgcggcggcatcggtttcaatgccgaagtgcgcagtcaggagatgggcaagaaggtcggcgaggcgttcaaggaagtcgaaccggaagatctcgtcaagttcggtcttattcccgagtttgtagggcgtttgccggtgatcgcgactcttgatgagctcgacgaggctgcgctcatgcagatcctgaccgagccgaagaacgctctcaccaagcagtacgccaagctgttcgaaatggaaggcgtcgatctcgaattccgtccggacgcactcaaggcggttgcccgcaaggcgctcgaacgcaagaccggtgcacgtggcttgcgttcaattctcgaaggtatccttctcgataccatgtacgagattccctcccagcaggatgtcagcaaggtggtcatcgatgagagtgtcatcgatggctcgtcgcaacccctgatgatctacgagaacagcgaaaagccagccaaggctgcgcctgaggcatga

SEQ ID NO: 30144 - DNA, 2397 bp, Pseudomonas aeruginosa
atgaaaacactcgtcgaattgcccttgctgccgctacgtgacgtggtggtgtacccgcacatggtcatcccgttgttcgtcggtcgggaaaagtccatcgaggccctggaggcagcgatgaccggcgacaagcaaatcctcctgctggcgcagaaaaaccccgcggacgatgatccgggcgaagatggcctgtaccgcatgggtacggtcgctaccgtgctgcagttgctcaagctgccggatggcaccgtcaaggtgctggtcgaaggcgagcagcgcggccaggtcgagcgcttcatcgaggaagaagggcacattcgtgccgcggtccaggccatcgacgacgccaatgtcggcgagcgcgaggccgaggtcttcactcgcagcctgctgagccagttcgagcaatacgtccagttgggcaagaaagtccccgccgaggtgctttcctcgctgaacagcatcgacgagccgagcaggctggtcgataccatggccgcgcacatggcgctgaagatcgagcagaagcaggacatcctggagatcaccgacctgtcgtcgcgggtcgagcatgtcctggcgctgctggatgccgagatcgacctgctgcaggtggaaaagcgtatccgcggccgggtcaagaagcagatggagcgcagccagcgcgagtactacctgaatgagcagatgaaggccattcagaaggaactcggcgatatcgacgaagggcacaacgaagtcgaggagctgaagaagcgcatcgacgctgccggcctgaccaaggaggcgcacaccaaggccactgccgagctgaacaagctcaagcagatgtcgccgatgtcggcggaagccaccgtggtgcgttcctacatagactggctgctgaacgtgccgtggaaggccgagagcaaggtgcgccatgatctcgccaaggcggaagacatcctcgatgccgaccattatggcctggaagaggtcaaggagcgcattctcgagtatctcgccgtgcaaaagcgggtgaagaagctcaagggcccggtcctttgcctggtgggaccgcccggcgtgggcaagacctccctggccgaatccatcgcccgcgccaccaatcgcaagttcgtgcgcatggcgctcggcggcgtgcgtgacgaggccgagatccgcggtcaccgtcgtacctatatcggctccatgccgggccgcctgatccagaagatgaccaaggtcggcgtgcgcaacccgctgttcctcctcgacgaaatcgacaagatgggcagcgacatgcgcggggatcccgcctcggcgctgctcgaggtgctcgacccggagcagaaccacaacttcaacgatcactacctggaagtcgactacgacctgtccgacgtgatgttcctctgcaccgcgaactcgatgaacatcccggcgcccctgctggatcggatggaagtcatccgcctgccgggctacaccgaggacgagaaggtcaatatcgccgccaagtacctgattccgaagcaggtccaggccaacggcctgaagaagggcgagctgaccttcgaggaaggcgccctgcgcgacatcattcgctactacacccgcgaagccggggtgcgcagcctcgagcggcagatcgccaaggtctgccgcaaggcggtgaaggagcatgccaagctcaagcgtatccaggcggtggtgtccagcgagacgctggagaactacctcggcgtgcgcaagttccgttatggcctcgccgaacagcaggaccagatcggccaggtgaccgggctggcctggacccaggtcggcggcgagctgcttaccatcgaggcggccgtggtacccggcaagggccagttgaccaagaccggatcgctgggcgacgtgatggcggaatcgatcaccgcggcgttgaccgtggtgcgcagccgcgcccagagcctaggaatcgcggcggacttccacgagaagcgtgacatccatatccacgttccggaaggcgctacgccgaaggatggcccgagcgcaggcatcggcatgtgcacggcgctggtttcggcgatcacgcagatcccggtgcgcgccgacgtggcaatgaccggggagatcaccctgcgtgggcaggtgctggcgatcggcgggctgaaagaaaaacttttggcggcgcaccgcggcgggatcaagacggtgatcattcccgaggaaaatgttcgcgacctgaaggaaattccggacaatattaagagtgatctggttattaaaccggttaaatggattgacgaagtcctgcaaattgcgctgcaatacgccccggagcccttgcccgatgcggctccggagatggttgcaaaggatgaaaaacgcgagcctgattccaaggagcgaattagcacgcattag

SEQ ID NO: 30145 - DNA, 273 bp, Pseudomonas aeruginosa
gtgaacaagtcggaactgatcgatgcaattgccgcatctgctgatatcccgaaagctgttgccggtcgcgcactggacgcagtgatcgagtccgtcactggcgccctgaaggctggtgactccgtcgtgctggttggtttcggcaccttcgctgtcaaagagcgcgctgctcgcaccggtcgcaacccgcaaactggcaagccgatcaagatcgccgctgccaagatcccgggcttcaaagccggtaaagccctgaaggatgctgtcaactaa

SEQ ID NO: 30146 - DNA, 798 bp, Pseudomonas aeruginosa
atgggatttctcacaggaaaacgcgccctgatcgtcggagtcgccagcaagctctccatcgcttccggcatcgccgccgccatgcaccgggaaggcgccgaactggccttcacctaccagaacgacaagctcaggggccgggtggaggagttcgccagtggctggggctcgcggccggagctgtgcttcccctgtgacgtggccgacgacagccagatcgaagcggtgttcgccgccctgggcaagcactgggacggcctggacatcatcgtccactccgtcggattcgctccaggcgatcagctcgacggcgacttcaccgcggtgaccacccgcgagggcttccgcatcgcccacgacatcagcgcctacagcttcatcgccctggccaaggccggacgggaaatgatgaagggccgcaacggcagcctgctgaccctctcctacctgggcgccgaacggaccatgccgaactacaacgtaatgggcatggccaaggccagcctggaggccggggtccgctacctggccggcagcctgggcgcggaaggcacccgggtcaatgcggtttccgccgggccgatccgaacgctcgccgcctccgggatcaagagtttccgcaaaatgctggccgccaacgagcggcagacgccgctgcggcgcaacgtcaccatcgaggaagtcggcaatgccggcgccttcctctgttcggacctggccagcggtatcagtggcgagatcctctacgtcgatggcggcttcaacactaccgccatgggcccgctggacgacgactga

SEQ ID NO: 30147 - DNA, 1611 bp, Pseudomonas aeruginosa
atgagcgagaacattctggaaatccgcgacctcgccgtcgaattcctctccggcgagcaacgccagcgggtggtcgaaggcgtcagcttcgacatccgccagggcgagaccctggccctggtcggcgaaagcggctcgggcaagtcggtgaccgcccactccatcctgcgcctgctgccctactccgtcgccagccacccagcaggcagcatccactaccagggcgaggatctgctcaagctcccggaacggcgcctgcgcgggatccgcggcaaccgcatcgccatggtcttccaggaacccatgacctcgctcaatccgctgcataccatcgagaagcagctcgccgaggtcctcgccctgcacaagggcctgggcggcgccaaggccagcgcgagaattctcgaactgctcgagctggtcggcatccccgagccggccaagcgcctgaaagcctatccacacgaactctccggcggccagcggcagcgcgtgatgatcgccatggccctggcctgcgagccgcaactgctgatcgccgacgaaccgaccaccgcgctcgacgtcaccgtccagttgaagatcctcgatctgctcaaggacctgcaggcacgcctgggcatgtccctgctgctgatcacccacgacctcaacctggtccggcgcatcgcccaccgcgtctgcgtcatgcaacaagggcggatcgtcgagcaggcttcctgccaggaactcttcgcagccccgcgacacccctatacccgcgagctgctcaacgccgagcccagcggtgcgccggcaagcaacccgcccggtgaaaccctgttggcggtggacgacctgcgggtctggttcccgatccgcaaaggcgtgttccgccgcaccgtggaccacgtcaaggcggtcgacggggtcaatttcgaactaccccgcgggcagacgctgggcatcgttggcgaaagcggctcgggcaagtcgacccttggcctggcaatcctgcggctgctggaaagccagggcggcatccgcttcgaaggcacccggctggacggtctcgcgcaacatgacgtgcgcccgctgcgccgcgagatgcaggtggtgttccaggacccgtatggcagcctcagcccacgcatgtgtgtcggcgagatcgtcggcgaaggcctgcgcatccataggatcggcagcgaggccgaacaggagcaggcgatcatcgacgcgctggtggaggtcgggctcgatccgcagacccgctaccgttacccccacgaattctccggcggccagcgccagcgcatcgccatcgcccgggcactggtgctgaaaccggcactgatcctgctcgacgaaccgacctcggcgctcgaccgcaccgtgcagcgccaggtcgtggaattgctgcggcaactgcagggcaagtacaacctcacctacctgttcatcagccacgacctggcggtggtcaaggcgctcagccaccagctgatggtggttcgacatggcaaggtagtggaacagggcagcgccgaagcggttttcgcctcgccgcaacatccctatacgcagcaattgctggaggctgccttcatggccccggcaagcgcggaaaactga

SEQ ID NO: 30148 - DNA, 1848 bp, Pseudomonas aeruginosa
atgatccgtccccgcttcacccctctgctggcagccctgctgctcggctgctgcggcccgctcctcgccgccccgaaacatgcactgacgctctacgatgagcctccgaagtatcccgccgatttcaagcatttcgactacgtgaatccggatgcgccaaaaggcggcatcctccgccaggccgacttcggcggcttcgacagcctcaacccgttcatcggcaagggcgtctcggccccttcgctgggcctgatctacgacaccctggccttccagtcgcaggacgagccgttcaccgaatacggcctgctcgcggagaagatcgagaaggcaccggacaacagctacgtgcgcttctacctgcgcccccaggcccgtttcagcgatggcacgccggtcaccgccgaagacgtggtgttcaccttcgagacgctggtgagcaagggcgacccgatgtaccgcaactactatgcggacgtcgacaaggtggtcgccgaggacaagcttcgcgtgcgcttcgacttcaagcacgccggcaaccgcgaactgccgctgatcctcgggcagatcgcgatcctgccgaaacactggtgggccgaccgcgacttttccaagaccggcatggaaatcccggtaggcagcggtccctaccgcatcgccaaggtcgatccgggacgctccatcagctacgagcgagtcaaggactggtgggccaaggaccttccggtctcccgcggactctataacttcgacaccatcaccatcgactcctatcgcgacatgtcggtcgccctggaagccttcaaggccggccagtacgacgtcaacctcgaatattcggcgaaggactgggccaccggctacgagtcgccggcattgcgcgacgggcgcttcatcaaggccagcatccacaaccacaacccggtggggatgcagggcttcgccttcaatatccgccgcccggtgttccaggaccgccgggtacgccaggcgatcagcctgctgttcgacttcgaatggtcgaacaagcagctgttcttcagctcctacaagcgcaccaacagctatttcgagaactcggagatggccgcccaccagttgcccagcgaagccgagctgaagatcctcgaaccgctgcgcggcaagattcccgacgaggccttcgaccaggtcttccagaatccggtcaatgacggcagcggggtgatccgcgagcagcggcgcaaggcctaccagttgctcaccgaggccggctacaggatcgagaacaaccgcatggtaggtcccgacggccagccactgagcttcgagttcatgctgttccaggccaacatggaacgggtcatcctgccgttcaagcgcaacctggccgaacttggcatcgacatgcagatccgtcgcgtcgacgtctcgcagttcgtcaaccgcctgcgctcgcgggatttcgacatgacctcggcgacctggccgcaatccaactcgccaggcaacgaacagcgagagttctggcattccagcagcgccgacaaggccggcagccgcaacttcatcggcctcaaggacccggccatcgacagcctggtggaaagcctgatccagtccgactcgcggcaaagcctgatcgaccatacccgcgccctcgaccgcgtactgtcgtggggctactacgtggttcccaactactacgtcgatacctggcgggtcgcctactggaaccgtttcggccggccgaaggtgacgccactctacgactggggcctgatgacctggtggcagaccagcgacaaggcgctgccgagcaaggcgcaagccgaagccacgcaagacgccgagccggaacgggagtaa

SEQ ID NO: 30149 - DNA, 3705 bp, Pseudomonas aeruginosa
atgtccagcccgctcaccgatcgcagcgcccgcctgcaagccctccagcacgccctcagggaacgtatcctgatcctcgatggcggcatgggcaccatgatccagagctacaagctggaagaggccgactaccgcggcgagcgcttcgccgactggccgagcgacgtgaaaggcaacaacgacctcttgctgctgagccgcccggacgtgatccaggccatcgagaaggcctacctcgacgccggcgccgacatcctcgagaccaacaccttcaacgccacccaggtgtcccaggccgactacggcatgcagtcgctggcctacgaactcaacgtcgaaggggcgcgcctggcccgccaggtggcggacgcgaagaccgccgagaccccggacaagccgcgtttcgtcgccggcgtgctcggcccgaccagccgcacctgctcgatttccccggacgtgaacaaccccggctaccgcaacgtcaccttcgacgaactggtggagaactacgtcgaggcgacccgaggcctgatcgaaggcggcgccgacctgatcctgatcgagaccatcttcgacaccctcaacgccaaggcggcgatcttcgccgtccagggcgtgttcgaggaactcggcgtggagctgccgatcatgatctccggaaccatcaccgacgcctccggccgcaccctgtcgggccagaccaccgaggccttctggaactcggtgcggcatgcccggccgatctcggtaggcctgaactgcgccctcggcgccaaggaattgcggccgtacatcgaggaactgtcgaccaaggccgacactcatgtctcggcccaccccaacgccggcctgccgaacgccttcggcgaatacgacgaatcgccggcggaaatggccgtggtggtcgaggaattcgccgccgccggcttcctcaatatcgtcggcggctgctgcggcaccaccccggcgcacatcgaggcgatcgccaaggcagtggccaagtacccgccgcgggccatcccggagattccccgggcctgtcgcctgtccggcctggagccgttcaccatcgaccgcagctcgctgttcgtcaacgtcggcgagcgcaccaacatcaccggttcggccaagttcgcccggctgatccgcgaggaaaactacgcggaagctctcgaggtcgcccagcagcaggtggaagccggcgcccaggtgatcgacatcaacatggacgaaggcatgctggactcgaaggcggccatggtcaccttcctcaacctgatcgcctccgagcccgacatctcgcgcgtgccgatcatgatcgactcctccaagtgggaagtgatcgaggccggcctgaagtgcatccagggcaagggcatcgtcaactcgatctcgatgaaggaaggcgtcgaggccttcaagcaccatgcccgcctgtgcaagcgctacggcgccgcggtggtggtgatggccttcgacgaggacggccaggccgacacccaggcgcgcaaggaagaaatctgcaagcgctcctacgacatcctggtcgacgaagtcggcttcccaccggaagacatcatcttcgatgcgaacatcttcgccatcgccaccggcatcgaggaacacaacaactacgcggtcgatttcatcaacgcctgcgcctacatccgcgacaacctcccctacgccctgagctcgggcggggtgtccaacgtgtccttctcgttccgcggcaacaacccggtacgcgaggcgatccactcggtgttcctctactacgcgatccgcaacggcctgaccatgggcatcgtcaacgccggccagctggaaatctacgacgagattccgaaagcgctgcgcgaccgggtcgaggacgtggtgctcaaccgcacgcccgaggccaccgaggccctgctggcgatcgccgacgactacaagggcggcggcgcggtcaaggaggccgaggacgaggaatggcgcagctacagcgtcgagaagcgcctcgagcatgcgctggtcaagggcatcaccacctggatcgtcgaggacaccgaggaatgccgccagcagtgtgcgcgtcccatcgaggtcatcgaaggtccgctgatgtccgggatgaacgtggtcggcgacctgttcggcgccggcaagatgttcctcccgcaggtggtcaagtccgcgcgagtgatgaagcaggcggtggcccacctgattcccttcatcgaggcggagaaaggcgacaagccggaagccaagggcaagatcctgatggccacggtgaagggcgacgtgcacgacatcggcaagaacatcgtcggcgtggtgctcggctgcaacggctatgacgtggtcgacctcggcgtgatggtgccggcggagaagatcctgcagaccgccatcgccgagaaatgcgacatcatcggcctgtctggcctgatcacgccgtcgctggacgagatggtccacgtcgccaaggaaatgcagcggcagaatttccagttgccgctgatgatcggcggcgccactacctcgaaggcgcataccgcggtgaagatcgatccgcagtacagcaacgacgcggtggtctacgtcaccgacgcctcgcgcgcggtaggcgtggccaccagcctgctgtccaaggagctgaaggccgactacgtggcccgcacccgcgccgactacgcggtggtccgcgaacgcacggccaaccgcagcgcccgcaccgagcggctgagctacgaacaggcgatcgccaacaagccggcgttcgactgggccggctaccaggcgccgacgccttccttcaccggcgtcagggtgctcgacgagatcgacctcgcggtgctcgccgagtacatcgactggacgccgttcttcatttcctgggacctggccggcaagtacccgcgcatcctcaccgacgaggtggtcggcgaggccgccacctcgttgttcaacgacgcccaggcgatgctgaagaagctgatcgacgagaagctgatcaaggcccgcgcggtgttcggcttctggccggccaaccaggtcgagcacgacgacctggaggtctacggcgccgatggcgagaccctcgccaccctgcaccacctgcggcagcagacgatcaagccggacggcaagccgaacctgtcgctggccgatttcgtcgcgccgaaggaaagcggcgtgcgcgactacatcggcggcttcatcaccaccgccgggatcggcgccgaggaagtggccaaggcgtacgaagccaagggcgacgactacaacagcatcatggtcaaggcgctcgccgaccgcctcgccgaagcctgcgccgagtggctgcacgagcgggtgcgcaaggagtactggggctacgcccgcgacgaacacctcgacaacgaggccttgatcaaggagcaatacgtcggcatccgcccggcaccgggctacccggcctgccccgaccataccgagaaaggcactctgttcgaactgctcgatccgcagggcctgtccggcgtcagcctgaccgagcactacgcgatgttcccggccgcggcggtcagcggttggtatttcgcccacccgcaggcgcagtacttcgcggtcggcaagatcgacaaggaccaggtggaacgctacagccagcgcaagggccaggaagccagcgtcagcgagcgctggctggcgccgaaccttggctacgatgactga

SEQ ID NO: 30150 - DNA, 1086 bp, Pseudomonas aeruginosa
atggacggcctgcgcctgcgcttccgccgcgcctaccccggcttcgaactggacatcgacctggctcttcccggtcgtggcgtgaccgctctgttcggccattcaggctccggcaagagcacttgcctgcgctgtatcgccggcctggaaaaggccgccgagggcgaggtgacgatcaacggcgagacctggcaggacagccgccgcaacctcttcgtcgcgccccaccggcgtgccctcggctacgtgttccaggatgccaacctgttccgccacctgacggtgcggcgcaacctggccttcggtctcaagcgcatcgccgccgccgaacgccgcgtcgagctggaacaggcctgcgccctgctgggcatcgagcatctgctggaacgcatgccggaacgcctctccggcggcgagcagcaacgcgtcggcatcgcccgggccctcctcaccagcccgcgcctgctgctgatggacgagcctctggcatccctcgacctgaagcgcaagggcgagatcctgccctatctcgagcgcctgcacgaggaactggacatcccggtgctctatgtcagccactcgccagacgaagtggcgcgcctggccgatcacctggtgctgctggagaacggcaaggtccgcgccagcgggccgatcggcgaaaccctggcgcgagtcgacctgccgctggcgctggacgacgacgccggggtggtgatcgagggcacggtcagcgaccacgacccggcctacggcctgctgaccctggtcctgcccggcagtgcgctgcaaatgcgcgtcgcccacgccccgctggcccccggcaagcgcctgcgcttcaaggtacaggcgcgcgacgtcagcctgaacctgcgcgacgacgcccagagcagcatcctcaaccgcctgccggtacgggtcctggaattggtcgataccgacaccgcggcccacgtcctggtgcgcctggatgccggcggcaatccgctgctggcgcggatcacccgttactcgcgggaccagttgcaactacgacccggccagctgttgtgggcgcagatcaagtcggtggcggtgctcgcctga

SEQ ID NO: 30151 - DNA, 7407 bp, Pseudomonas aeruginosa
atgtcgatccaggcgaaagttacccctatcgatcagagtatttcttctgcggctgccgtcgaggttccggaaaacgggatactcaaactctcccagagcagtaatgtcgcgctcgatgtcgcaccggagtcggtggcgggatactcgaagagcggttcggacctgatcgtccagctgaagaccggggaaagcgtccggatcgccaacttctatgcggaaggccagccttccagccaactgttcctggccgacaaggacaagctggtggcggtagatctgccgccggtcgctgccgacgggccgctgatggccggctacatcccgcaggaaagcctggccggtttcgagtcgctgaccggcgccggtgtgctcggtggcatgagcgcagggactgcgctgctggtcggtgcggcggccatcggcgccggggtggcgatttccaacagcagcggcggcggtggcggcggcggttcttcggtgcccccggacaccactccgccgaaggcggccagcggcctgaagatagcgcctgacggcagcagcatcagcggccaggccgaggccggcgcgagcgtcggcatcgataccaatggcgacggcaagccggacctcaccgtgatcgccgatgccaacggcaatttcaccgctccgctgaacccgccgctgaccaatggccagacggtcaccgtggtggtcaccgacccggctggcaacgccagcccgccggcccaggtcaccgctccggacactaccgccccggcgccggctaccgacgtgcaggtggcgccggacggcagcagcgtcaccggcaaggccgaacccggctcgacggtgggcgtcgataccgacggcgacggccagccggacaccaccgtggtggtcggccccggcggcagcttcgaggttccgctgaacccgccgctgaccaatggcgagacggtgacggtgatcgttaccgacccggccggcaacaacagcaccccggtgaccgtcgaggcgccggacaccaccgccccggcgccggccaccgacgtgcaggtggcgccggacggcagcagcgtcaccggcaacgcagagccgggcgccaccgtcggtgtcgacaccgatggcgacggccagccggacaccaccgtggtggtcggtcccggcggcagcttcgaggttccgctgaacccgccgctgaccaatggcgagacggtgacggtgatcgttaccgacccggccggcaacagcagcaccccggtcaccgccgaagcccccgacttccccgacgcgccccaggtcaatgccagcaacggcagcgtcctcagtggtacggcggaagcgggcgtgaccatcgtgatcaccgacggcaacggcaatccgatcggccagaccagcgccgatgccaacggcaactggagcttcacccccggtagccaactgccggatggcaccgtggtcaatgtggtggccagggacgccgccggcaacagcagcccggcgacctccatcaccgtcgacggcgtggcgccgaacgcgccggtggtcgagccgagcaacggcagcgaactcagcgggactgccgaaccgggcagcagcgtgaccctgaccgacggcaatggcaatccgatcggccagaccaccgccgatgccaacggcaactggtctttcacgccgtccaccccgttgccggacggtaccgtggtcaacgtggtggccagggatgccgccggcaacagcagtccgccggccagcgttaccgtggatgccgtcgcgccggccacgcccaccgtcgatccgagcaacggtacgaccctcagcggcaccgccgagccgggcagtagcgtgaccctgaccgacggcaacggtaacccgatagggcaggtcaccgccgacggcagcggcaactggaccttcaccccgagcacgccgttgcccaacggcacggtggtcaacgccacggctaccgacccgtccggcaacgccagttcgccggccagcgtcaccgtggacgccgtggcaccggccacgccagtggtcaacccgagcaacggcaccacgctcagcggcaccgccgagccgggcgccaccgtgaccctgaccgatggcaacggcaatcccatcgggcaggtcaccgccgatggcagcggcaactggagcttcactccgaccacgccgttgcccaacggcaccgtggtcaacgccacggccaccgacgcctccggcaacaccagtgcgggcagcagtgtcaccgtggactcggtagccccggccacgccagtgatcaaccccagcaacggcaccacgctcagcggcaccgccgagccgggcagcagcgtgactctgaccgatggcaacggcaacccgattggccaggtcaccgccgacggcagcggcaactggagcttcaccccgtccacgccgctggcggatggaaccgtggtcaacgccacggccaccgatccggcgggcaacaccagcggccagggcagcaccaccgtcgatggcgtggcgccgaccacgccgaccgtcaacctgagcaacggcagcagcctcagcggcactgcggaaccgggcagcacggtgatcctcaccgacggcaacggcaatccgatcgccgaggtcaccgccgacggcagcggcaactggacctacaccccgtccacgccgatcgccaacggcaccgtggtcaacgtggtggcccaggacgccgccggcaatagcagcccgggcgccagcgtcaccgtggactcgcaggccccggcggctccggtggtcaacccgagcaacggcactacgctcagcggcaccgccgagccgggcgctaccgtgaccctgaccgacggcaacggcaacccgattggccaggtcaccgccgacggcagcggcaactggagcttcacaccgggcacgccgctggccaacggcaccgtggtcaacgccacggccagcgacccgaccggcaataccagcgctccggccagcaccaccgtggactcggtggcgccggccgcgccggtggtcaatccgagcaacggcgcggagatcagcggcaccgccgaaccgggcgccaccgtgaccctgaccgatggcagcggcaatccgatcgggcaggtcaccgccgacggcagcggcaactggagcttcaccccgtccacgccgctggcggatggaaccgtggtcaacgccaccgctaccgacccggccggcaataccggcggccagggcagcaccaccgtggacgccatcgcgccggccacgccgaccgtcaacctgagcaatggcagcagcctcagcggcaccgccgagccgggcagcacggtgattctcaccgacggcaacggcaatccgatcgccgaggtcaccgccgacggcagcggcaactggacctacaccccgtccacgccgatcgccaacggtactgtggtcaacgtggtggcccaggacgcctccggtaacagcagcccgccggcgacggtgaccgtcgattccagcgcgccgccggcgccggtgatcaacccgagcaacggcgtcgtcatcagcggcaccgccgaggccggtgccacggtgaccctcaccgatgccggcggcaacccgatagggcaggtcaccgccgacggcagcggcaactggagcttcacgccgggcaccccgctggccaacggcacggtgatcgtcgccacggccaccgacccgaccggcaataccggcccgcaggccgccaccacggtggacgcggtggcgccgccggcgccggtgatcgatccgagcaacggcacgaccatcagcggcaccgcggaggccggggccaaggtgatcctcaccgacggcaacggcaacccgatcggcgaaaccaccgccgacggcagcggcaactggagcttcacgcccggcacgccgctggccaacggcacggtggtcaacgccgtggcccaggaccctgcgggcaataccggcccgcagggcagcactaccgtggacgcggtggcgccgaacacgcctgtggtcaatccgagcaacggcaacctgctcaacggtaccgccgagccgggcagcaccgtgaccttgaccgacggcaacggcaacccgatcggccagaccaccgccgatggcagcggcaactggagcttcacgcccggctcgcaactgcccaacggcaccgtggtcaacgtgaccgcgagcgacgccgccggcaataccagccttcccgctaccacgacggtggattcctcgctgccgtcgatcccgcaggtggatccgagcaacggttcggtgatcagcggcaccgcggacgccggcaacaccatcatcatcaccgatggcaacggcaacccgattggccaggtcaccgccgacggcagcggcaactggtccttcactccaggcatcccgctgccggatggcacggtggtcaacgtggtggcgcgcagcccaagcaatgtcgacagtgcgccggcggtgatcactgtggatggcgtggccccggcggcgccggtgatcgatccgagcaacggcaccgagataagcggtaccgcggaggccggcgcgacggtgatcctcaccgatggcggcggcaacccgatcggccaggccaccgccgacggcagcggcaactggacgttcaccccgagcaccccgctggccaacggcaccgtgatcaacgccgtggcccaggacccggccggcaataccagcggtccggccagcgtcaccgtcgatgccatcgccccgccggcgccggtgatcaatccgagcaatggagtcgtcatcagcggtacggcggaagccggggccacggtgatcctcaccgacggcaacggcaacccgatcggccaggtcaccgccgacggcagcggcaactggagcttcacgcccggcacgccgctggccaacggctcggtgatcaatgcgctggcccaggacgccgccggcaacaacagcagtcccaccagcgccaccgtcgactcgctggcgccagcagccccggtgatcgatccgagcaacggtagcgtgatcgccggtaccgccgaggctggtgccacggtgatcctcaccgacggcaacggcaacccgatcggccaggtcaccgccgatggcagcggcaactggagcttcacgcccggcacgccgctgtccaatggcacggtggtcaatgcggtggcccaggacgctgccggcaacaccagcggcccggtcagcaccacggtggacgcggtggccccggccaccccggtgatcgacccgagcaacggtgtcgaactcagcggcaccgccgaacccggcgtccgggtgatcctcaccgatggcaatggcaatccgatcggccagacccttgccgacggcagcggcaactggagcttcacgccgggcacgccgctggccaacggcacggtggtcaatgccgtggcccaggacccggccggcaataccagcggcccggccagcaccacggtggacacggtggctccggccacgccggtgatcaatcccagcaacggcagcgtgatcaccggcaccgccgaggtcggcgccaaggtgatcctcaccgatggcaacggcaacccgatcggcgagaccaccgccgacggcagtggtaactggaccttcacccccggcacgccgctggccaacggtacggtgatcaacgccgtcgccgaggacgccgcgggcaacgccagcggtccggccagcaccacggtggactcggtggcgccgtccgctccgctgctgagcatcagcgccgacggcgcgctgctgaccggcaccgccgagccgaacagccaggtgcgcatcgtggtcaacggcgacaccgccaacccgatcacggtcaccgtcgacggcgccggcaacttcagcctgccgttcgcgccgccgctgatcaccggcgagctgatcgccggggtcgccgtcgacgccgccggcaacgtcagcgggccggccaccatcaacgccccggacctggcgccgccgaccatcagcgtgccggaagccgccgatacctggatcaatgccgcggagatcggcgacggtatccaggtcgatgtgacggtccgtccgaccatgcaggtcggccaggtggtcacggtcaagttcgccgggcagaacggctacgaggccgaggtcagccataccctcaccgccggcgacatcgccgccggcaacctgaccctgaccctgacgcctcccggcggcatgggcccgttcccggagggtgcctcgaccgtcaccgccgacatcaacggcggcaccgcgtcgaccccggtgccgttcaccatcgacaccattccgccggcgaccccggtgctgtccctggtcggcaacatcctgaccatctcggcggagccagggaccgagttgacggtgaccgtcgacgtcggcggggtgaccgccaccgccacggtgaccgccgacaacagcgggctggcgtcgctgaacctgctcaccgacctggacatcgacttcagttgggaccagttgctcaatgcccaggtgtcggtggtcggacgcgacccggccggcaacccgagcaacacggcgagcatcggcgtcggcaccagcatcgagcaaccggtgaccatcggcaacttcggcctcgacgtcagcctcaacccgctgaacccgcgtttcggtttcagcggaaccaccgagcctgactccagcgtggtgatccgggtcatcaccccggcgttgaacgtcgaattgctgccgatccaggcggattcgtccggaaacttctcgctgaacctgctgagcccgaccatcctcacccagttggggctgaacatcaccgacatcctcaacctcggctcgcagatctcgttcaacctggtgtccaccgactccaatggcaacgacagcgccgcctacgggatcaccctgacccccaacggactgtcgctcaatatcggccagatcgatgtcaacggtacttccggcgacgacgtgctgtccggcgccaacggcagttcggagcacatcaacggcggcgacggcagcgacctgatcttcaacgtgggcaccggcgatcacgtggtggccggcaacggcaacgacaccatccagatcaccgcgaccgatttcgtcagcatcgatggcggcgccgggttcgacaccctggtcctggccaacggcatcgacctcgactacaacgccgtcggcgtcggcacgctcagcaacctcgagcgcatcgacctcggcaagggcgattcgggtagcgtgctgaccctgaccgcggcggaggtggatgccatcaccgatgccaacaacacgttgcagatcaccggcgagaacaacgacaccctgaacgtggtgggcgcggtgaataccggtaccacgcaactgatcaacggcattacctacgacgtctacaccttcggcagtaccaccctgctgatcgaggacaacacggtacaggtcgtggtctga

SEQ ID NO: 30152 - DNA, 1170 bp, Pseudomonas aeruginosa
atgattccagacatcgattcccgtctcagccggaacatattgaaatccatctcgtatggcctccccctcgccgaagtggtccccgaccatacctatgcgcaactggaaacgcgcctcggcgaactgaaacgcaggtatctggagctgcgcatctcccacggcgcgcgcgagctgccgttcagcaactacctgttctacctgatcctccagtcgcgccaccaggaattcgacttcaagctgcgccagggcaactcggtggtcaccaacatccaccgattcaagagcaagggacgcatcccgtccctgaccaccctgctcctggccgatgcggtcaacgccaagagcgagctggagctcaagcatccggacatcccgcagctcgaccgccacgctcgcgacatcgagcgctggctggccgccggcaacgtcatgccgcccagcgagcgggccctgcgcggcctggttgaggcgctggagcgcgccgctggcgaaggccgtccgttgcacctggtgagcgcggtatgcccggactactcgcactccagcgatgccgagggcaagccgcgctacaccttcgagcgagtcggcgaccagcccggcctggccggcgccaagctggtcagcgccggccaggcggtggcggagctggccagggcgcgccaggtggaaatccgccacgcgatcctcggcggcgagttcgagtacctatcgttcaaccgcaaccccgccaccggcgagacccgcgagggtttcctcggcaaggtcgagcgccagctcgagcggatcgccggggccctgccctgcccggccgcgacctgctcgttcttcgagatgtgcggcggcgaggacggctggcaccaggcccacggcgagatcgtccagcgcctggaacagggcgactacggccagaccgggctggactacccggccctggaatcgatcttcctgtcgcgcctgccgctctacgagaaatggttcgccagccagtcgcgcgagcagatctgggccagcttcgtctcccaggccgccgagtacgcattgatgggaaaactcttcggcgagcgcttcgacaacttcgtcgtgctggccgtcgatcactaccggatggagccgttctactcgttcttcgcgaccgtcccgacgctctacatccgaaccgactacctgtaa

SEQ ID NO: 30153 - DNA, 624 bp, Pseudomonas aeruginosa
atgagcggcattcccgaaatcaccgcctatcccttgccgaccgcccagcaactgccggccaacctggcgcgctggagcctggagccgcggcgcgcggtgctgctggtgcacgacatgcagcgctacttcctacgcccgctgcccgagagcctgcgcgccggactggtggccaacgccgcgcggctgcgccgctggtgcgtcgagcagggcgtgcagatcgcctacaccgcccagccgggcagcatgaccgaggagcagcgcggtctgctcaaggacttctgggggccgggcatgcgcgccagtccggccgaccgcgaggtggtcgaggagctggcgccggggccggacgactggctgctgaccaagtggcgctacagcgccttcttccactccgacctgctccagcggatgcgcgccgccggccgcgaccagttggtgctgtgcggcgtatacgcccacgtcggggtgctgatctccacggtcgacgcctactccaacgacatccagccgttcctggtggccgacgccatcgccgacttcagcgaggcgcaccaccgcatggccctggaatacgccgccagccgctgcgcgatggtggtcaccaccgacgaggtgctggaatga

SEQ ID NO: 30154 - DNA, 960 bp, Pseudomonas aeruginosa
atgaagcgggtcgcttcccggcgcctgttggctgccgttgtgctgactgcctgttcctcgttcctgcccctgtccgccgtccacgcggaaactcccgagaagcccaggatcgcgctggtgatgaagtcgctggcgaacgagttcttcctgaccatggaggacggcgccaaggcctaccagaaggagcatgccgaccggttcgaactggtttccaacggcatcaaggacgagaccgatacctccagccagatccgcatcgtcgagcagatgatcgtttccggggtcgacgcactggtgatcgcgccggccgattccaaggcgctggtgccggtggtgaagaaagcgctggacgccggcatcgtggtggtcaacatcgacaaccgcttcgacccgcaggtgctgcaggcgaagaagatcggcgtgcccttcgtcgggcccgacaaccgcaagggtgcgcggctggtcggcgagtacctggcgaagcgactgaaggtcggcgacgaggtcggcatcatcgaaggggtctccacgaccaccaatgcccagcagcgcaccgccggtttcaaggatgcgatggacgcggcggggatgaagatcgtctccttgcagtcgggcaactgggaaatcgagaagggcaacgcggtggcctcggcgatgctcaacgagcatcctgacctcaaggcgctgctcgccggcaacgacagcatggccctcggcgcggtatcggcggtgcgcgcggcgggccgcgccgggcaggtgaaggtggtcggctacgacaatatccaggcgatcaagccgatgctcaaggatggccgggtgctggccactgccgaccagttcgccgcgaagcaggcggtgttcggtatccagaccgcgctcaagctgctcgccgggcaaaccccggaacatgagaaggacggcgtggtcgagacgcctgtcgagttggtgaccgcgccctga

SEQ ID NO: 30155 - DNA, 999 bp, Pseudomonas aeruginosa
atgagcgacccgacgtcttccgctaccgccgccgcagcgccaaccctgcgacgcggcaactatttcggcctgggcacctacctcggcctggccggcgcgctgctggcgatgatcgcgctgttctcggcgctgagcagccacttcctcagctatggcaccttcctcgccatcgccaaccagatccccgacctggtggtgctggcggtgggcatgaccttcattctgatcgtcggcggcatcgatctctcggtaggttcggtgctggccctggcggcctcggcggtaagcctggcgacgctcggctggggctggggcgtgctgccggcggcgatgctcgggatggcctgcgcgaccctggccggctgcgtcaccggttcgatcacggtggcctggcggattccctcgttcatcgtgtccctcggggtgctggagatggcccgtgggctggcctaccagatgaccgactcgcgcacggcctatatcggcgacgcctatgcctggctgtccaatccgctggcgttcggcatttcgccggccttcgtgatcgccctgctggtgatgttcgccgcccaggcggtgctcacccgcacggtgttcggccgctacctgatcggcatcggcaccaacgaagaagcggtgcgattggccggtgtgaacccgaaaccctataagattgcagtattcgccctgatggggctgctcgccgggttggccgcgctgttccagatctcgcgtctggaagcggccgatcccaacgccggggtcggcctggaactccaggtcatcgccgcggtggtgatcggcggcaccagcctgatgggcgggcgaggttcggtggtcagcaccttcttcggcgtgctgatcatttccgtattggcggcggggctggcgcagatcggtgcgtcggagccgaccaaacgaatcattaccggggcggtgatcgtggtagcggtggtgctggatacctatcgcagccatcgcgcccgcagacagggctga

SEQ ID NO: 30156 - DNA, 1521 bp, Pseudomonas aeruginosa
atgatctacgcagcgcccggaacccccggtgccgtcgtcaccttcaagcctcgctacggcaactacatcggcggcgagttcgtgcctccggtcaagggccagtacttcaccaacacctcgccggtgaacggccagccgatcgccgagttcccccgttccaccgccgaggacatcgacaaggccctcgacgccgcccacgccgccgccgaggcctggggccgcacctcggtgcaggagcgttcgaacatcctgctgaagatcgccgaccgcatcgagcagaacctggaactgctcgccgtcaccgagacctgggacaacggcaaggccgtgcgcgagaccctcaacgccgacattcccctggccgccgaccacttccgctacttcgccggctgcatccgcgcccaggaaggctccgccgccgagatcaacgacagcaccgtggcctaccacatccatgagccgctgggcgtggtcgggcagatcatcccgtggaacttcccgctgctgatggccgcctggaagctggccccggcgctggccgccggcaactgcgtggtgctcaagccggccgagcagaccccgctgggcatctgcgtgctgctggaactcatcggcgacctgctgccgccgggcgtgctcaacgtcgtccagggcttcggcagggaggccggcgaggccctggccaccagcaagcgcatcgccaagatcgccttcaccggttccaccccggtcggctcgcacatcctcaagtgcgcggcggagaacatcattccctccaccgtcgagctgggcggcaagagcccgaacatctatttcgaagacatcatgcaggccgagccggcgttcatcgagaaggccgccgagggcctggtgctggctttcttcaaccagggcgaggtgtgcacctgcccgtcccgcgcgctggtccaggagtcgatctacccggcgttcatggaagaggtgctgaaaaaggtcagggcgatcaagcgcggcgacccgctggacaccgagaccatggtcggcgcccaggcttcccagcagcagtacgagaagatcctctcctacctcgacatcgcccagcaggaaggcgccgagctgctcgccggcggcagcgtcgagaagctcgaaggcaacctggccagcggctactacatccagccgaccctgctcaaggggcacaacggcatgcgcgtgttccaggaggaaatcttcggcccggtggtcggcgtcaccaccttcaaggacgaagccgaggccctggccatcgccaacgacaccgagtacggcctcggcgccggcctctggacccgcgacatcaaccgcgcctaccgcatgggccgcgggatcaaggccggtcgcgtgtggaccaactgctaccacctgtacccggcccacgccgcgttcggcggctacaagaagtccggcgtcggtcgcgagacgcacaagatgatgctcgaccactaccagcagaccaagaacctgctggtgagctacgacatcaacccgctgggcttcttctga

SEQ ID NO: 30157 - DNA, 1164 bp, Pseudomonas aeruginosa
atgagccacgacctcagccaactgcgtaaattcgtctcgcccgagatcatcttcggcgccggctgccggcacagcgtcgccaactacgtgaagaccttcggtgcgcgcaaggtcctgctggtctccgaccccggcgtgctcgccgccggctgggtcgccgacatccaggcaagcctggaggggcagggcatcgactactgcctgtataccgacgtttcgcccaacccccgggtcgacgaggtgatgctcggcgccgagttctatcgcagcgagggctgcaatgtgatcgtcgcggtgggcggcggcagcccgatggattgcgccaagggcatcggcatcgtcgccgcccatggccgcagcatcctcgagttcgaaggcgtcgaccggctgcgggtgccgagtccgccgctgatcctgatcccgaccaccgccgggacttcggcggacgtctcgcagttcgtgatcatttccaaccaggacgagcgcatgaagttctccgtggtgagcaaggcggttgtgcctgacgtctcgctgatcgacccggaaaccacgttgaccatggatcccttcctttcggcctgtaccggcatcgatgcactggtacacgccatcgaggcgttcgtctccaccggccacgggccgctgaccgatccccacgcgctggaagcgatgcgcctgatcgatggcaatctggtacagatgatcgccaatcccggcgacatcgccctgcgcgagaagatcatgctcgggagcatgcaggccgggctggccttctccaacgccatcctcggcgcggtgcatgccatgtcgcacagcctcggcggctatctcgacctgccccacggcctgtgcaacgcggcgctggtcgaacacgtggtggcgttcaactacagcgccgcgccggaacgcttcaaggtgatcgccgagaccttcggcatcgattgccgcggtctgacccaggggcaggtccgccagcgcctggtggaccacctgatcgccttcaagcacgccgtgggtttccacgagagcctcgccctgcacggggtcggcagctccgacattcctttcctctcgcgccacgcgatgcaggacccgtgcatccttaccaacccgcgcgagtcgagccagcgcgatgtcgaggtggtctatggcgaggccctctga

SEQ ID NO: 30158 - DNA, 1182 bp, Pseudomonas aeruginosa
atgcaagacgtcgtcatcgtcgccgctacccgtaccgccgtcggcagcttccagggctcgctggccggcattcccgcccccgagctgggcgccgcggtaatccgccgcctgctcgaacagaccggtctcgatgccggccaggtcgacgaagtgatcctcggccaggtgctcaccgccgggtccgggcagaacccggcgcgccaggcggcgatcaaggccggcctgccggtcggcgtgccggccatgaccctgaacaaggtctgcggctccggcctcaaggccctgcacctgggcgcccaggcgatccgctgcggcgacgccgaggtgatcgtcgccggcggccaggagaacatgagcctggcgccctacgtcatgcccggcgcccgcaccggcctgcgcatgggccatgcgaagctggtcgacagcatgatcgaggacggcctgtgggacgccttcaacgactaccacatgggcatcaccgccgagaacctggcggagaagtacggcctgacccgcgaggagcaggacgccttcgccgccgcttcgcagcagaaggccatcgccgccatcgagggcgggcgcttccgcgacgagatcacgccgatccaggtcccgcagcgcaagggcgagccgctgggcttcgataccgacgagcagccgcgcgccggcaccaccgtcgaggccctggccaagctcaagccggccttcaggaaggacggcagcgtcaccgccggcaacgcctccagcctcaacgacggcgccgccgcggtattgctgatgagcgcggccaaggccaaggccctgggcctgccggtgctggcgcggatcgccagctacgccagcgccggggtcgacccggcgatcatgggcatcggcccggtctccgccacccgtcgcgcgctcgacaaggccggctggagcctggagcaactggacctgatcgaggccaacgaggccttcgccgcgcagtccctggcggtgggccgggaactgggctgggatgccgccagggtcaacgtcaacggcggcgccatcgcccttggccacccgatcggcgcgtccggctgccgggtgctggtgaccctgctgcacgagatgatccgtcgcgacgcgaagaagggcctcgccaccctgtgcatcggcggcgggcagggcgtcgccctgaccctggcccgcgactga

SEQ ID NO: 30159 - DNA, 840 bp, Pseudomonas aeruginosa
atgatcaagaaatgtcttttcccggccgccggttacggcacccgtttcctccccgccaccaaggccatgcccaaggaaatgctgccggtggtgaacaagccgctgatccagtacgcggtggaggaggcgctggaagccggcctttccgagatcggcatcgtcaccggccgcggcaagcgttcgctggaagaccacttcgacatcagctacgagctggaacaccagatccgcaacaccgacaaggaaaagtacctggtcggcatccgtcggctgatcgacgagtgcaccttcgcctacacccgccaggtggagatgaagggcctcggccacgccatcctcaccggtcgtccgctgatcggcgacgagccgttcgccgtggtcctggccgacgacctgtgcctgaacctcgaaggcgacagcgtgctgaagcagatggtcaagctgtacaaccagttccgctgctccatcgtggcgatccaggaagtgccgccggaagagaccaacaagtacggcgtgatcgccggcgagatgatccgcgacgatatcttccgggtgaacaccatggtcgagaagccgaagccggaagaggcgccgtcgaacctggcgatcatcggccgctacatcctgaccccggacatcttcgacctgatcgagcagactgaaccgggcaagggcggcgagatccagatcaccgatgccctgatgaagcaggcccaggacggctgcgtgctggcctacaagttcaagggcaagcgtttcgactgcggcagcgccgagggttacatcgaggcgaccaacttctgctacgaaaacctctacaagaccggcaaggctcactga

SEQ ID NO: 30160 - DNA, 1356 bp, Pseudomonas aeruginosa
atgtctttcgatttcgatctgttcgtcatcggcgccggctcagggggcgtacgcgccgcccgcttcgccgccggcttcggtgcccgtgtcgcggtggcggagagtcgctacctgggtggcacctgcgtcaacgtcggctgcgtgccgaagaagctgctggtctatggcgcgcatttcagcgaggacttcgagcaggcccgggcctatggctggagcgccggcgaggcgcagttcgactgggcgaccctgatcggcaacaagaaccgcgagatccagcggctcaacgggatctaccgcaacctgctggtgaacagcggggtgaccttgctcgaaggtcacgcccgtctgctcgatgcgcacagcgtcgaggtggacggccagcgcttcagcgccaagcacattctcgtcgccaccggtggctggccgcaggtgccggacattcccggcaaggaacacgcgatcacctccaacgaagcgttcttcctcgagcgcctgccgcgccgcgtgctggtggtcggcggcggctacatcgccgtcgaattcgcctcgatcttcaacgggctcggcgccgagaccaccttgctctaccgtcgcgacctgttcctgcgcggcttcgaccgcagcgtccgcgagcatctgcgcgacgaattgggcaagaagggcctggacctgcagttcaacagcgacattgcccgtatcgacaaacaggccgatggtagcctcgccgcgaccctcaaggacggccgggtgctggaggcggactgcgtgttctacgccaccgggcggcggccgatgctggacgacctgggcctggaaaacacagctgtgaagctgaccgacaagggcttcatcgcggtcgacgagcactaccagaccagcgaaccgtcgatactcgccctcggtgacgtgatcggtcgcgtccagttgacccccgtggcgctggccgagggtatggcggtggcacggcgattgttcaagccggaggagtatcgcccggtggactacaagttgattcccaccgcggtgttcagcctgcccaacatcggcaccgtcggcctgaccgaggaggaggcgctgagcgccgggcacaaggtgaagatcttcgagagccgcttccggccgatgaagctgacccttaccgacgaccaggaaaagaccctgatgaagctggtcgtggatgcccacgacgacagggtgctgggttgccacatggtcggcgccgaggccggcgagatcctccagggtattgcggtggcgatgaaggccggggcgaccaagcaggcgttcgacgagaccatcggcatccacccgaccgcggcggaagagttcgtcaccctgcgcacgccgacgcgctga

SEQ ID NO: 30161 - DNA, 1809 bp, Pseudomonas aeruginosa
atgcccggacgcatcctggtcttcgcctgctgcctgctcgccagcctggcccgcagcgagccgcgccatgccatcacgctctacgacgagccggcgaaatatccgccgggtttccagcacttcgacttcgtcgacccgcaggcgcccaagggcggcagcctgcggcggatggaaagcggcagcttcgacacgctgaaccccttcgccaaccgcggcacgccgatcagcatgacccaggccgcgctgatctacgaaaccctcggcttccagtcactggacgagccgttcaccgaatacggctacctggcgcgctacatcgagaaagccccggacaacagctgggtgcgtttccatatcgatccgcgggcgcgcttcagcgacggcgtggcggtcaccgccgaggacgtgaagttttccttcgatagcctggtcgagcagggcagcccgttctggcgcgcctactacaaggaggtccgcgagccggtggtggaggatcgcctgcgcatccgcttcgatttccgtcatgccggcaaccgcgagctgccgctggtgctggcccagctctacgtgctgcccaggcattggtggcagggacgcgacttcaaccgcagcagcatgcagccgccgctgggcagcggaccttaccggctggagaaggccgaggcggggcgttcggtgagctaccggcgcaaccccgactggtgggctcgcgacctgccggtcgggcgtggcctgtacaacttcgagcggatccgtttcgactactaccgcgacagcggcgtggccttgcaggcgttcaaggccgggcaggccgacatcaatgtcgagaccagcgtcaaggcctggagcagcggctacgactcgccggccctgcgcgatggccggttgcgccaggagagctttccctacccgtacccggccagcctccagggcctggtgttcaacctgcgccggccgctgttcgaggaccgccgggtacgccaggcgctgagcctgttgttcgacttcgaatggaccaaccggcagctcttcggcggtcgctacaagcgcctgcgcagctatttcgacaactcggagatggccgctcgcggcctgcccggcgccgacgaactggccttgctggagccgctgcgcgggcagatccccgaggaggtcttcggccaggcctacgctccgccggtgaacgacggcagcggcgatatccacgagcgcctggtgcaggcctaccgcctgctcggcgaggccggctggcatgccgtcgacgggcgcctgctggataccgccggacggccgctgcgcttcgacctcctgctccagggcaagagcctggagcgcgcgctgctgccgttccagcgcaacctggcgcggatcggcatcgatatgcgcctgcgccaggtggacgcttcgcaatacatcgagcgcatacgtgcgcgggactacgacatgatcgtttcgagcttctcccagtccaattcgccgggcaacgagcagtacagcttctggcattcctccagctacgccgatcccggcggctacaaccgcatcggcctgaaggacccggccatcgaccggctggtccaggcggtggtcgaggccgactcgcgggccgccctggaaaccgccgtgcgcgccctcgaccgggtgctgcaatggggctactacctgatcccgacctggtattccgacgaggtctggatcgccagctggaatcgcttcggccgaccgccgcaggcgccgcgctacagcctggggctgaacacctggtgggaagtccgcgagcgggccgcgccgagccgggaggcgcagtga

SEQ ID NO: 30162 - DNA, 1224 bp, Pseudomonas aeruginosa
atggacgatctctcccccgattccgccttgccgcctgccggcagcgcccaggacaacgacgcgccgcgccagttggtggtctgcatcgacggaacctcgaaccgcttcggcgaccagccgaccaacgtggtgcgcctgtaccgctcgctgtcgcgcgatccgcgcagggtgctggcctactacgaccagggcgtcggcaccttcggcctgaaggaaaccctgttcgagtggcagaagtttccctcgcggatcgccggcctggccttcggctgggggctcaagcgcaacgtcgagggcgcctatcgcttcctcgccgagcactaccggcccggcgaccagatattcctcttcggcttttcccgcggggcctacgcggtgcgcgtgctggccgcgatgctgcgcgcggtgggcctgatcgatgcgcaccagccgcacctcttcgactacgcctggaccctgctcaccacccgcatgccgccccgcgacgaagacaagcgggccggcacgcgtcgccgcggaccggacttcggcctgctgggacgcttccgcaaggtcttcggccggcaggtgaaggtgcacttcctcggcctgttcgacaccgtgacctcggtgggctgggtctacgacccgctgaccgtgccgtattcctcgaacaacgaaatggtcgacgtggtccgccaggccctggccatcgacgaatgccgctgcttcttccggcagaacctctggttcggcgagaaggaccgcaagtccgacgtgttgcaggtgtggttccccggcatgcactccgatgtcggcggtggctatgcgccgaaggactcgcggctggctctggtggcctttacctggatgctcggcgaggcgctggaggccggcctgcatgtcgacccggcgcgcagccgcgaccagttgcgcgcacgttcgaagcagggcccggacccgaccgcgccgatcctgccggtgatgacccggccctggcgcctggccgagtggctgccgctgctggtctgggaccgccgcagcggcaaccgcgcctggcgctggtcgcgtggccggccgcgctcgcggccgctggaaccggtcgggcaggaaacccgggtcaagctgcaccgttcggtgcagcggcggctggacgaatgccccgactaccggccgtgcaacctgccagcgctggaacgctgcgacctcatcgacgattcgccgttgcttgacggctaccgctag

SEQ ID NO: 30163 - DNA, 2109 bp, Pseudomonas aeruginosa
atggctcgcaccactcccatcgagctttatcgcaacatcggcatcgtcgcccacgtcgacgccggcaagaccacgacgaccgagcggatcctcttctacaccggcgtcaaccacaagatgggcgaggtccatgacggcgcggcgaccatggactggatggtccaggagcaggagcgcggcatcaccatcacctcggcggcgaccacggccttctggcagggctcgaccaagcagttcccgcaccgctatcgcttcaacatcatcgacacccccggccacgtcgacttcaccatcgaggtggagcgctcgctgcgcgtgctcgatggcgcggtggtggtgttcagcggcgccgacggagtcgagccgcagtccgagacggtctggcgccaggccaacaagtaccatgtgccgcgcctggcctacgtcaacaaaatggatcgccagggcgccgatttcctccgcgtggtcgcgcagatcaagcaacgcctgggccatgtcccggtgccgatccaactggcgatcggctcggaggaaaacttcagcgggcagatcgacctggtgaagatgaaggccatctactggaacgatgccgaccagggcaccagctaccgcgaggaggagatcccggcggagctgcgggcgctggccgaggagtggcgggcgcacatggtcgaggccgctgccgaggccaacgacgaactgatgaacaagtatctggaaggcgaggaactgagcatcgaggagatcaaggccgggctgcgccagcggaccctggccaaccagatcgtaccggcggtgctcggctcctcgttcaagaacaagggcgtgccgctggtgctcgacgcggtgatcgactatctcccggctccgtcggaaatcccggcgatcaggggcaccgacccggacgacgaagagaagcacgacgagcgccatgcggacgacgacgagcctttctcggcgctggcgttcaagatcgccaccgaccccttcgtcggcaccctgaccttcgcccgcgtgtattccggggtgctgacttccggcgacgcggtgcttaactcggtgaaaggcaagaaggagcgggtcgggcggatggtgcagatgcacgccaaccagcgcgacgagatcaaggaagtgcgcgccggcgacatcgccgcgctgatcggcatgaaggacgtgaccaccggcgacaccctgtgcgccatcgacaagccgatcatcctcgaacgcatggacttccccgatccggtgatctcggtggcggtggaaccgaagaccaaggccgaccaggagaagatgggcatcgccctgagcaagctggcccaggaagacccgtcgttccgcgtgaagaccgacgaggagaccgcgcaaaccatcatttccgggatgggcgagttgcacctggacatcatcgtcgaccgcatgcgccgcgagttcggcgtcgaagccaatatcggcaagccgcaggtggcctatcgcgagaccatccgcaacacctgcgagatcgagggcaagttcgtccgccagtccggcggccgcggccagttcggccattgctggatccgcttcgctccggccgacgaggggcaggaaggcctggagttccacaacgaggtggtcggcggggtgattccccgcgaattcatcccggcgatccagaagggcatcgaggaccagatgcagaacggcgtgctcgccggctacccgctgatcggcctgaaggcgacggtgtacgacggctcctaccatgacgtcgactccagcgagatggcgttcaagatcgccgcctcgatggccaccaagcaactctcgcagaagggcggagcggtgctcctggagccggtgatgaaggtcgaggtggtgaccccggaggactacatgggcgacgtgatgggcgacctcaaccgccggcgtggcctgatccagggcatggaggataccccggcgggcaaggtgatccgtgccgaggtcccgctgggcgaaatgttcggctatgccaccgacgtgcgctcgatgtcccaggggcgcgcgagctactcgatggagttcgttcgctatgccgaggtaccggccagcgtggccgaggggatcgtcgccaggcagggccgctga

SEQ ID NO: 30164 - DNA, 1833 bp, Pseudomonas aeruginosa
atgtgtggaatcaccggctggaccgactggagccgcgacctcggcgagcagcgcagcatcctcgaacgcatgacccgtaccctggccccgcgcgggccggacgccgaaggcctgtggctgtcgcggcacgcgctgctcggccatcggcgcctggcgatcatcgacctggagaacggcgcccagccgatgcttgccgaggctggcgggcgggtggcgctgacctacagcggcgaggtctacaacttccgcgagctgcgcgccgagctggagacgctgggccaggtcttccgcacccgctcggacaccgaagtggtgctgcgcgcctatctgcaatggggcgaggcttccttcgtccggctccgcggcatctacggcttcgccctgtgggacgagcgcgagcagagcctgtggctggtgcgcgatcgcttcggggtcaagccgctgtactactacccgaccgccggaggcgtgctgttcgcctcggaacccaaggcgatcttcgccaaccccgaggccaacccggtgctcgacgccagcggcatcgccgagctgttcgccctgaccaccgcgccgactcccggccacggcctgtacaagggcctgcgccaggtccggccgggccaggcgctgcgcttcgaccgcaatggtgtgcgcgagttggtctactgggcgctgcgcgcggaacgtcacgaagagggcgccgaggacagcgccgaacgcgccggccagttgctccgcgaggcggtggccgagcaactggtggccgacgtcccgctgggcagcctgctttccggcgggctagactccagcgccatcagtgccttcgcggtggccgcgctggatggcgacgcgcggcgcctgccgaccttctccgtggacttccccggcgaaggccgcggcttcgtcccgacgccctggcaaagcagctgggacgaaccctatgcgcagctggcggcgaacttcctcggtacgccgcaccgtaccgtgctggtcgccccggaagaggtgctggaacaggacgaggcggtgctccaggcccgcgacctgcccggctggggcgagctggacgcctcgctctacctgctgttccgccaggtccgcgagcacaccacggtggcactgtcgggcgagtcggccgacgaggtgttcggcggctacccgttcttccacgacccgagcgccctcgcacacgacggcttcccctggctggccggcaagagcgggccctggcaactgctgcggcgggaggtcgccgaacgggtggcggcgccggaatacatccgggcgcgctaccgcgaggccctcgccgaagtgccgcggctggatggcgaggatgccgcccagcgacgccagcgcgaggtcgcctacctggcgctgagccgctggctgccggcgatgctcgaacgcaaggaccggatgagcatggcggtcggcctggaagtgcgcgtgccgttctgcgaccaccgcctggtggagtacgtatggaacctgccctgggcgctgaagagcgtcgccggggaaagcaagagcctgctgcgccgggccctgcgcgggcacctgccgcaggcgatcctggagcggcgcaagagcggtttcccggccaaccccgacccacgttacctggcgctgctgcgcgagcgggtcggccgcctgctcgacgacggccgctcgccgctgttcgaactggtggacgccgggcgggtccgccaggctctcgaacagggcacgccgctgcccagcccgcgtgcctcggcgagcccgaccgccggcctggcctacctgctgaacctggaccgctggctgacccgccatggggtcgacatcagcctctga

SEQ ID NO: 30165 - DNA, 1284 bp, Pseudomonas aeruginosa
atgagcggcgtcgcccgcgaggccatggaggacgtcgcgccggcggcgcctggcgtcggcgagttcggcgtggccagttgtggggtgctgctggcctcggtagtgggggtgatcttcggccccaccgggctggtgatcagcagcttctcgctgttcatcgagccgatcgctgccgacctggactgggaccgcggccagtcggcgctgccggtgaccctgctgggcctggcggtagccctgagcagcccgctgaagggctggctggtggatcgctggggcgcgcgcgccctggtcctgccgctgaccgccgcgctggccctgtgcctggccagcctggcgctggcgcgcagcggctggcagctatacctgctgttcgcgctgctcggcctgctgacgccgggcaacattccctatgcgcggattctcggcggctggttcgagcgtcgtcgcggcgcggcctacggcatcctcggactcggcttcggcgtcggcgggccgctggcgctgtacctgggcagcgcctgcatcgacgccttcggctggcgcgccaccttcctcgtctatggcctgctcgaaggcctcctggcgctgccgctgctctatgcgttgttccgcgagcgacccggcgacctgccgcaggcgcggcgcacgccagccgacgcgctgcccggagcgacgccaggccaggcctggcgctcggcggacttctggctgatcgtcggcaacctgatcctcggcgtgttcgccgtcactggcgtgatggtgcatggcgtgccgctgttgcaggagcgcggcctgtcgcgggaagtcgccaccgacgtgctggcggcgctgtgggtcggcatgatcgtttcgcaaccggcgctgggctacctgctggaccgctacgacaccccgcgcatcgccttgccgttcgccctgctggcggcgctcgggctgctgctcctgctccttggcggaccgccggcgctgctctggggcgcggtgttcctgatcggcctgggcgccggcggcgagaccggcaccacccagtacttcgtcagccgctacttcggcctgcgccatttcagcgtgatctatggctcgatccagcccttcaccttcgccatcgccatcagcctggggtcctggctgctgggttacttctacgaccgcgcgggctcctacgcgggctcgacgctggtcctgctcggcgcgttcggcgtggcggcagggctgctggtcatgctcgggcgctatcgctacgccatcgacggggaggcacgcagccatgggcgagactga

SEQ ID NO: 30166 - DNA, 1035 bp, Pseudomonas aeruginosa
atgcccactccgccctggtctccccgccgcagcgccatcagcgcgcacctgctgatccagttcggcatcgaccgcggcctcggcctggagcagtgcctggcaggtagcggcctggatatccgcctgctcggcgatccctccggggaaatcgacgcggcccaggaactgagcgtagtgcgcaacctggtccggcacctgggcgacgcctgcgcgccgggcctggcggcaggcctgcgctatcacctcaacgcctacggcatctggggcttcgccctgctcagcagcccgaccttcctcagcgccgcgcaactgggcctgcgctacctcgacctgaccttcgccttccatggcatccgcctggaggtacacgacgatgaagcgcacctggtgctcgacgacgccggcattcccgaggacctgcggattttcctcctcgaacgcgacgccggtggcgtgctgcgcatccagcgcgacctcaccgggcagcgcctgccgatcctccgcgccggcttccgccgcccaccgcccgccgatcccgcgccctacgtgcgcgagctgggcctgtgcccggcgttcggccaggcggacaaccgggtggtcttcgaacggcgcttcctcgacctcccgctgcccggcgccaatccagaggtggcgcgcgcctgcgaggagcagtgccgcgccctgctcgcccgccgccaggtgcgcggcggtctggccggacgcatccgcgaccgcttgctgaggacgcccggccacttgccggacatgcagaccctggccatggaactgcacctcaccgtgcgtaccctgcgtcgccgcctggacgacgagggcagcagctaccgcctgttgctcgacgaggtgcgccaggccctcgccgaagagctgctggccaccggcgcgattcgcctggaggagatcgccgagcgcctcggctacggcgaggtgtccaacttcagccatgccttcaggcgctggaaaggcatgacgccgcgccagtatcgccagcggcgacgactcgacgcgatgtcctga

SEQ ID NO: 30167 - DNA, 1773 bp, Pseudomonas aeruginosa
atgtccagcacggttgccgatcaattgctcgaacgcttgagccagtggggggtgaagcgcgtcttcggctaccccggcgatggcatcaacgggatcatgggcgccatgggccggcgcgccgaggcattcgactatatccgcgtgcgccacgaggagatggcggccttcatggccggcgcccacgccaagttcaccggagaggtcggggtgtgcctggccacctcggggccgggcgcgatccacctgctgaacgggctctacgacgcgcgcatggatcatcagccggtgctggccatcgtcggccagcaggcggctaccgcgctgggcagcgactaccagcaggaagtcgatctgcagagcttgttcaaggacgtttccgcctatgtcgagaccgtggtcagcccggcacaactgctccatgtgctggaccgagccctgcgcgtggcggtcggcgagcggcaggtggcgacggtgatcgtgcccaacgacgtgcaacagatggcggccccgaagcgccagccccacgagcacggccacgtgatgtcggcggtgggcttcgtccagccgcgaccctacgcgcgcgacgccgacctggaggccgccgcggcgatcctcaatcgcggccggcgcgtggcgatcctcgccggtgccggggccctgggcgcgcaccggcaactggaagcggtcgccgagcgcctggccgccggagtggccaaggcgctcctgggcaaggcggcggtttccgacgacctgccgtacgtgaccggctccatcggcctgctcggcacccgcgccagcagcatgctgatggagcattgcgacaccctgctgatcgtcggcagcactttcccctacagcgagttcctacccaaggccggccaggcgcgggcggtgcagatcgacctgtatccgcgcaacatcggtatccgctatccgatcgaccaggccttgctcggcgatgcaggggaaaccctggagcgcctgctgccgctgctcgagcagaaaaagcacggtgcctggcgccgccgggtcgagcgggcggtgacggccagtcgcgaggaagcccggcgccaggccgaagagccagccgacccgatcaacccgcagcgggtattccgttccttgtcggagcaactgccggacgatgcgattctctgcggcgacagcggctcgcataccaactggtacgcccgcgacatccgcatgcgcccgggcatgctcggctcgctgtcgggcaagctggcgaccatgggcagcggcgtgccctacgccatcgccgccaagctcgcctatccgcagcggccggtggtggcgatggtcggcgacggcgccatgcagatgaacggcaacgccgaactggtcaccgtgcagcagtactggcagcgctgggactcgccgaccttcatcgtgctggtgctgaacaacggcgatctcaaccaggtgacctgggagcagcgtgccctggccggcgatccggagttcagcccggcgcaggaagtgatcgatttcccctacgcgcgttatgcggacatgctcggcttcaagggcatccgcgtggatcgcccggaggacatcgacgccgcctgggccgaggccttcgccgccgaccgcccggtgctgctggaggtggtcaccgacccgaacgtgccgccgctgccgccgcacatcagtttcgagcaggccaagcacctgcttggcgccatgctgcaggacgatcccaagcgctggggggtgattcgccagagcgcccggcaggtcctcgcgcggcactga

SEQ ID NO: 30168 - DNA, 744 bp, Pseudomonas aeruginosa
atgaacaacctgttgttgaactgcgatatcggcgagagcttcggtgcctggcgcatgggcctggacgccgaggtgatgccgctgatcgattgcgccaacatcgcctgcggcttccacgccggcgatcccggcaccatgcgccgcaccgtggccctggcggtggagcatggcgtgcgcatcggcgcgcaccccggctaccccgacctggtcggcttcggccggcgctcgctggcctgctcggcgcaggaagtggaagacctgctgctctaccagatcggcgccctcgacggactctgccgcgcccagggcacgcgggtacgctacgtcaagccgcatggcgccctgtaccaggacatgatgcgcgacccggcgatcctcgccgccgtgctgcgcgcactggcggcctacgaccgcaccctgccgctgatgctgatgagcacccgcgacaacaccgcggcgcgcgcgctgggcgaggcccacggcatcgagctgtggttcgaggcgttcgccgaccgcgcctacgacggcgccggctacctggtctcgcgcagccagcccggcgcggtacaccacgacgccgagacggtgctcgcccaggccctcctgctggcccgtggcgcggcgctgcgagccagcgacggcagcgccctggcgctggaggcgcagaccctctgcgtacacggcgacaaccccgcctcgctggctgcggtgcggcgcatccgcgacgccctggaggcggcatga

SEQ ID NO: 30169 - DNA, 1272 bp, Pseudomonas aeruginosa
atgaccctcgacgccggcccggacgcttcccgggacggtcatttcggctggtatcgcgccctcgacaagcaggaacgccgggccttctggagctgcaagatcggctacggcctggacggcatggacacccagatgctcagcttcgtgatccctaccctgatcgccctgtgggggatcggcaccggcgaagccggcttcatccacaccatgaccctgctcgcctccgccgccggcggctggatcgccgggatcctctccgaccgcatcggccgggtgctgaccctgcaactgacggtgctctggttcgccttcttcaccttcctctgcggcctcgcgcagaactacgagcagttgctggtcgcacggaccctgatgggcttcggcttcggtggcgaatggaccgccggcgcggtactcatcggcgaagtgatcaaggcccgcgaccgcggcaaggcggtcggcctggtgcagtccggctgggccatcggctggggcctcaccgccatcctatactcgctgatgttcagcctgctgccgccggaagaggcctggcgcgcgctgttcatgctcggcctgttgccggcgctgttcgtcctggtggtacgccggctggtcaaggaaccggagatctaccgcgaggccaggcaacgcaaccagggcgccgacaaggtcagcttctacgagatcttcgcccccgggatgctcagcatcaccctgcgcgcctcgctgctgaccaccggcgcgctcggcggctactacgccatcaccgcctggctgccgaccttcctcaagaccgaacgcgggctgaccgtgctcggcaccagcggctacctggcgatggtgatcctcggctcctacgtcggctacgtggtcagtgccttcctcaccgacctgatcgggcgcaagaagaacttcgtcctgttcgccgtcggctccttcaccgtggtcctgctctacacccagttgccggtgagcaacggcgccatgctctggctcggcttcccgctcggcttcttcgcctcgggcatcttcagcggcatgggctcgttcctcaccgaactgttcccaacccgcatccgcggctccggccagggcttctgctacaacgccgggcgcgccatcgccgcgctgttcccgatgctgatcggcatgctcggccagaagctctcgctgggcctggggatcggcgccttcgccgcggtctcctacggcgtggtgatcctcgccgccctcagcctgccggaaacccgcggcaagcaactggaactctga

SEQ ID NO: 30170 - DNA, 714 bp, Pseudomonas aeruginosa
gtgtccagtaggcgcgcgctcgcgctgctggccatgctttgcctcgcgccgacgagcgaggccggagtgaccgcggagcgcacccgcctggtgttcgtggagggccagcgcgaggcctcgttgctgctggtcaaccagaatccctacccggtgctggtgcaggcgtgggtcgatgacggcgccctcgacggcgaaccggataccgcgctggctccgttcctgccgctgccgcccgtattccgcctggagccgggacgccagcgcagcctgcgcctgctggctaccggccaggcccaggcacgggatcgcgaatcgctgtactggctgaacatctacgagatccccccgcaagccaccgccgaggccgctggccggccccggctcacggtcaccctgcgaacccagatgaaggtgctgtaccgcccgcacggcctgcatccgcacgccgaggacgcggccgccgaactgggcttcgcgctgcgcgacgagaccctgcgggtggacaacccgacgccgtacttcgtgtccctggcggggctggcgctggagataggggagacgcgcctggatctgcccggaacgctgctggctccgcgctcgcaacgacgcctcggcctgccgcggcgggtggacggcgggacgcgcggcgaggtggcgttcgactggatcgacgacaacggcgtcagccgccaggaaaggaaagctctacagtga

SEQ ID NO: 30171 - DNA, 861 bp, Pseudomonas aeruginosa
atgagcgaacagcgacagaccctgccggcgcagcaccaggaccaacgtcccggccacgaaagccagatgcagccgaagccggagttcgtttccgccgattaccgtccggcggccaagctggagggtaaggtggccctggtcaccggcggcgacagtggtatcggccgcgcggtggcggtggctttcgcccgcgagaaggcggatgtggtgctggtctacctggatgagaacgaagacgcggcgaagacccgcgagatcatcgagtcgctcggccgccagtgcctggcgttcgccggcgacgtcgccgacgccggcttctgccgccaggttgtggacacgctaaggcagaaatgggggcgcctcgacgtgctggtcaacaacgccggcgagcagcatccgcaggcgcgcctggaggacatcagcgaagagcagtgggagaagaccttccgcaccaacatcttcggcatgttccagttgaccaaggcggccctgccgctgatgggcaagggcggggcgatcatcaacaccacctcgatcaccgcctacaagggcaacccccagctgatcgactattcctcgaccaagggcgcgatcacctcgttcacccggtcgctgtcgatgaacctggtcaaccgcggcatccgcgtcaacgccgtggccccgggcccgatctggacgccgctgatcccgtccaccttcagcgccgagaaggtcgcccacttcggcgcggatacgccgatgggccggcccggccagccggaagagctggccgccagctacgtctacctggcctgtaacgactcgtcctacgtcagcggccaggtgctgcacgtcaacggcggtacggtagtcaacggctga

SEQ ID NO: 30172 - DNA, 3303 bp, Pseudomonas aeruginosa
atggccagacgcgagaaaccggtctttctcaacgacccgcaatggtacaaggacgcggtgatctaccaggtccacgtgaaatccttctacgacgccaacaacgatggcatcggcgacttcgccgggctgatcgagaagctcgactacatcgccgacctcggcgtgaacactctctggctgctgccgttctacccgtcgccacgccgcgacgacggctacgacatcgcccagtaccgtggcgtgcacagcgactacggcagcctcgccgacgcccgccggttcatcgccgaggcccatcgacgcggtctgcgggtgattaccgagctggtgatcaaccatacctccgaccagcatccctggttcatccgtgcccgccacgcgaagaagggatcgcgcgcccgcgactactacgtctggtcggacagcgacgagaaataccagggtacgcggatcatcttcatcgacaccgagcagtccaactggacctgggacccggtagcccaacagtactactggcaccgcttctattcccaccagccggacctgaacttcgacaacccgcaggtcctgcgcgaggtgctcggggtgatgcgctactggctggacatgggcgtcgacggcctgcgcctggacgcgattccctacctgatcgaacgcgacggcaccagcagcgagaacctgccggagacccaccaggtgctcaagcgcatccgcgccgagctggacgcgcactatcccgaccgcatgctgctggccgaggccaatcagtggccggaagacacccggccgtacttcggcggcgaggatggcggcgagggcgacgaatgccacatggccttccacttcccgctgatgccgcgcatgtacatggccatcgcccaggaggatcgctatccgatcaccgacatcctgcgccagaccccggacatcccggccaattgccaatgggcgatcttcctgcgcaaccacgacgagctgaccctggagatggtcaccgacgacgagcgcgactatctctggaaccactatgccgccgaccgccgcgcgcgcctcaacctgggcatccgccggcgcctggcgccgctggtggagcgtgaccggcggcgcatcgagctgctgcacagcctgctgttgtcgatgccgggcacgccgaccctgtactacggcgacgagatcggcatgggcgacaacatctacctcggcgaccgcgacggcgtgcggaccccgatgcagtggtcggtggaccgcaacggcggcttctcccgcgccgacccggcgaagctggtgctgccgccgattctcgacccgctgtacggctaccagacgatcaacgtcgaggcgcaggcgcgcgacccgcattcgctgctcaactggatgcgccgcctgctcgccgtgcgcagccagcagaaggccttcggccgcggcagcctgaagatgctcgcgccgagcaaccgacggatcctcgcctacctgcgcgaatacgccgagggcgaacggcaggacagcatcctctgcgtggccaacctgtcgcgcgcggcccaggcggtggaactggacctcgccagccatgccggcaaggtgccggtggagatgatcggcggcatgtcgttcccgccgatcggcgagctgacctacctgctgaccctgccgccctacggcttctactggttctacctggccgacgcgacgcagatgccgagctggcacgtggccgccgacgagcgcctgccggaactgccgaccctggtggtcaagcagcgcctcggcgagctgctgcagggcgcatcgcggaacatcctggaaggcgagacgctgccggcctacctgccgaagcgccgctggttcgccggcgagaaaggccagccacggctctgctacatcgttccgctggacgaggcggagccgcgctgtgcattgtgcgaagtggagatcgacgggctgcgctaccagttgccgctgggcttcctcgacgccgaccagcgcggcgacagcctgcctcagttgctggccctggcgcgcctgcggcgcggtcgcaaggtcggcctgctgaccgacgccgccagcctgccgctgttcgcccgcaaggtcctcgcgcaactccgcgccgaggcggtgatcgcccacggcgacggcgagatccagttcatcccggcggcgggactggcggaaatggacgacatcgccgacgaagacgtcctgccgttctcggtggagcagtccaacagctcgatccgcttcggcgagcgcatggtcctcaaggtgctgcgcaagatccttccggggctgcacccggaaatcgaggtcggcggctacctgacccgccacggctaccccggcatcgccccgttgctcggcgaggtacggcgggtcggcgcggatggcgagccgcacacgctgatgatcctgcagggctacctgaacaaccagggcgacgcctggaactggaccctggacaacctggagcgagccgtgcgcgacgagatatccgcggccagcgaggcgctcgaagggcaatacgacagcctcgccgaactgcgcggcttcgccgccaacctcggcgcccggctcggcgagatgcacagcgtactggccggcgagtcggacgatccggccttcggcagccgcgagagcgacgaagccagcgtccaggcctgggcgctgcgcatcgccgaacagttgcgcgaagccggcaaacgcctgagcgagccgccacggccgttgcagggcgaggcggcggaacaggcgcggcgcctgctggaacgcctgccggcgctgctcgaacgcctgccgctgctggcccggcaggcagccggcgggctgctgatcagggttcacggcgacctgcacctgggccaggtgctgatggtccagggcgacgcacgcttcatcgacttcgagggcgagccggcgcgcagcctggaagagcgccgccagcgtcacagtccgatgaaggacgtcggcggcatgctgcgctcgttcgactacgcggcggcgatggtcctgcgcaacgcgcagagcaccgatagctcggaacaggccgacagcgcccggcgcaaggtcgccatgcgctatcgcagcgaagcccgcgatgccttcctggccggctatcgggccgccgcggcgggtctcatgcacgcctggcacggtcgcgaaggcgaaggggcggcgctggccctggcctgcctggaaaaggccgcctacgaactgctctacgaagccgactaccgccccgactggctggaagtgcctctcgccggtctggccgaactcaccgaacacctcctgaagggcaagaaccgatga

SEQ ID NO: 30173 - DNA, 951 bp, Pseudomonas aeruginosa
atgcccagcctgaatgatccgcgcctggacgtcctggtcagcctcggcaactggttgcgaggccaggactaccgtttcgtcaccgtcaccccggctacccatgagcgcgtcaacgcccgcccggaaaaccgcatggcccgggacctggccggcatcttcggctggagccgggcattcgccggggaaagcctgccggccgactggctgacccttcttgccggcgccgacctgatccgccgcgaggcggacggctggcgcagccaggtgcgcgtctccagcctcggcgagcaactgttcgtccattcggccttccctaccctggccgccgacgcggtgttcttcggccccgacacctaccgcttcgaccggctgatccgcagccacctggcatcgtccgatccggcacgcatccgccgtgcggcggatatcggctgcggcgccggccccggcgcgatccgcatcgccatggcctgcccggacgccgaagtacacgggctggatatcaatccggcagcgctcgacctggcgcgggtcaacgcggcgctggcgggggtcggtaacctgaccctggcgcgtagcgacctgctgagccaggcgcccggtcgcttcgacctgatcgtggccaacccgccctatctcctggatgcctcggagcgcgcctaccggcatggtggcgggatgctcggcgccgggctctcgctggcaatcgtcgatgccgccctcgagcgcctggaagccggcggcagcctgctgctgtataccggcgtggcgatggtcgaaggcggcgatccgttcctcgcccgcatccgcgaacgcctggcgtctcgggagtgggactgggactaccaggaactggacccggacgtgttcgccgaagagttggacagccccgcctaccgcgaagccgagcggatcgccgtggtcggcctgcgggtcactcgttccgcctga

SEQ ID NO: 30174 - DNA, 1596 bp, Pseudomonas aeruginosa
atgtccgagcgtggaacggctgcagaaggccggatcaactggcgacgcatcctgccgatactgctcaccaccaccctggtgggcggtgtctgtgggatcttcgtcatcaacgaactggatcgccagcacgacggcgcgcacctgcgctcgtacaccgagagggcgctggagcgggcactggagatttcctccgcggcggaccagatgctccgcgagatgaacgccggcagcgcgccggcctgcagcgaccgggatctggaaatgctgcgttccatcgtgctcgagtcgcgcttcatgagcgacgttggcaggatcagcggcgaccgggtcatgtgcacgggcgtccggggccggctgcgcgcgccctggggattgtccgcgcccgaccgggtagatgccgccggcacccgcttctggtcggagggcatgcccctgccgttgcaggcgctgcccaccgggctggtcagtcgcggcaacgccgtcgtattcattgccccgcacgcctatttcgatgtcgaccacccggccccgggcatctcggcggcggccgtcagcagtggcggcgactacatctaccaccgtttcgcctgggacgacgatcagcccctcgaggcgctcggccggcccggctggccgcgcttcatcggcgcccggcagataagcctgtgcgacccgacgcaggacatctgcgtggtctcccttctccgcgaacgcggcctgcttggcaccgagcccggacgcgcggccatggccgcggcgatcggcggcgggctgttgttcggcgtcatgctgctgctcagctacctgttcggcttcctcaacgacgaaaaactgccggccaggctgctgcgcgcgttgaagcgcgaggccctggaggtgcactaccagcccatcgtgcgcctggccagcggccgctgcgccggggtcgaggccctggcgcgctggaccgatagcagcctggggcgggtttccccggatgtcttcatcggcgccctggaggagagcggcgacatcgaactgctgacccgtttcgtcttccgccgcgccctgaagcagctcgggccgttgctgagggaacagcggagcttctacgtcagcgtcaacgtcaccggcaaggacatcgccgaccccggtttcatcgatttcgccatgcgccagatggccagggaaagcgtgcgcccggaacaggtcgcgctggaactgaccgagcgcaccaccgaggcccagggctgcctgctggccgggatgaaccgcctgcgcgaactcggcctgaagatctacgtggacgatttcggcaccggtcattcgaacctggtctacctggccaacctgccggtagacgcgatcaagatcgacaaggtcttcactcagtccatcggcgacagcagcgccgtcgaactgatcttcgacaagctctgctcgatggccgagcacctggagatcggcgtggtcgtcgaagggatcgagacacaggcccaggccgaccacgtgctgcgccgctcgcccgaggccctcggccagggctggcatttcggcaaggcactgccgctggaggccttcctcgactactaccggaaccagccggcgggccgctag

SEQ ID NO: 30175 - DNA, 717 bp, Pseudomonas aeruginosa
atgttcggcgaacttctcgccccgcagtacctgcgctggttgctcgacggcttcctgctgaccctcggtcttgccctgctcagttgcctgctcgccaccctgatcggcgcccccctggccatcgcccggctgtcgcgccggcgcctgctgtcctggccggcgcgcgcctacctggcgctgttccgcaataccccgctgctggtgcagctgttcttctggtacttcggcgttcccgcgctgctgccggaggcgctggtgagctggctgaacacgccgcacgagacgcccttgctcgactggccgtccttcgagttcctcgccggtgcctgggggctgaccctctatacctcggctttcgtcgccgaggagttccgcgccggcatcgcctcggtacgccccgagcagcgcgccgccggcctcgccctggggctgacccagcgccaggtatggcgcgtggtggtgctgccgcaggccctgcgcacggctctgccgccgctgctcgggcagtacatgaatgcgctgaagaactcctcgctggcgatggccatcggcctggccgagctgtcctacgcttcgcgccaggtggaaaccgagaccttcaagaccttccaggccttcggcatcgccacccttctctacatcggcgccatcgccctgatcgaagccttcggccaggcgttgcagcagacccgccgctaccgccagggaggtgcgtga

SEQ ID NO: 30176 - DNA, 1326 bp, Pseudomonas aeruginosa
atggctcaggcacagaccgccgtgctccaggctgatcctgcccaggacaaggccactgccgcaaaacccagcaacgtccgctggcgcatcttcgccatcgtcttcgccctgacggtgatcaacctggtcgaccgggtctcgctgtccatcgccatgcccaccatcgccggtgaattccagctcacgccgagcatgcaggggctgatcctcagcagcttcttctgggcctacgcgctgttgcagattcccggcggctggctgatcgaccgctacggcccgcgccgggtgatcggctggtccaccggcctctggggagccttccagaccctcgcggccttcgccagcggcggcctgtcgctgatgttcgcccgggtcgccctgggcgcggcggaagcgccgctgttcccctccggcggcaagctcaactcgctgtggctgggctccagcgaacgcagccgcggcgccgtgctgatggactgcggagggccgctgggcgtcgctctcggcggactggtcatcgcctacctgatcgccgtgctcggctcctggcgcagcgccttcttcatcgccggcatcgccaccctggccatggcctggctggcctggcactacctgcgcgacgacccggccgagcatcccggggtcaacgccgccgagctggaccggatcaacgccgaccgcaccaccccgctcgccgaagcggactgccaggccggcggaagactgggcatcgccggccgctccctggtcggtatcgtcctcggccgcgccagttgggccatggtgttcttcggcctgctgacctggggtcctagctacctggcgcaggcgcgcggcttcgatatcaagggtatcggcgccgcgaccttcgtcatcttcctctgcggagccgtcggttccctggtcggcggcttcctctgcgacctgctgatccgcaagggcgtgcgccgcggcctggcggccaagggcctgctgacggtctcgggcctcgcggcgctggtcgccttcctgctgttgccgagcctggaagatgcctatgccgccgtgaccctgctggcgctgaccgccttcttcctgatgtggggcagcctgtactggagctttccggccttgctcgccactccggcccgggtcggcctggtcggcggggtgatgaacatggccggcagcctcggcggcatcgccgtgccgatcctggtcgggctgctgctgcaacacctgggcggatatgccgcggtgctgggcttcttcgccctctgctcggcagccttcatcgccggcaccctgctgatttccctggacaagaccgaggcaaagcatggctga

SEQ ID NO: 30177 - DNA, 1104 bp, Pseudomonas aeruginosa
atggaaaccaagcacagcaatcgagctcgctctcgcaagggtgccctgaggggcgcagtccttgccggtgcgctgatggctctcgtcggctgccagaccagtccggcggcaacgacttcgtcaaacaccggaggaaccaacatgcagctgcaattgacccaggagtgggacaagacctttcccctgagcgcaaaggtcgaacatcgcaaggtcaccttcgccaatcgctacggcatcaccctggcagctgacctgtacctgccgaagaaccgtggcggcgatcggctgccggcaatcgtgatcggcggtccgttcggcgcggtcaaggagcagtcctccggactgtatgcgcaaaccatggccgaacgcggattcgtcacgctggcgttcgacccatcgtataccggtgagagcggcggtcagccacgcaacgtcgcttcgccggatatcaataccgaagacttcagcgcggcagtggatttcatcagtttgttgccggaagtgaatcgcgagcgcatcggcgtcatcggcatctgcggctggggtggcatggcgctgaacgcggtggccgtggacaagcgcgtcaaggcggtggtgaccagcaccatgtacgacatgacgcgggtcatgtccaagggctacaacgacagcgtgaccctcgaacagcgcacgcgaacgctggaacaactgggccagcagcgctggaaggacgcggaaagcggtacccccgcctatcagccgccctacaacgaactgaagggtggtgaggcacagttcctcgtcgactaccacgactactacatgacaccccgtggctaccacccgcgggcagtcaactccggtaacgcctggacgatgaccacgccgctgtcgttcatgaacatgccgatcctcacctacatcaaggagatctcgccacgcccgatcctgttaatccacggcgaaagggcccattcacgctacttcagcgagaccgcctacgccgctgccgcagagccaaaggagctgctgatcgttccgggagccagtcatgtcgacctgtacgaccggctggacaggattcctttcgatcggattgccggattcttcgacgagcatctgtag

SEQ ID NO: 30178 - DNA, 1329 bp, Pseudomonas aeruginosa
atggcacgtaagggactctatctgggcggcagcgcgctgctgctcgccgtggtactgctgctggtgttctgggggcgtcccgccgacgccgagatccaggtactgaaggcgcctcgcgcggtggtctggaaagacttcctcggggtcaacgcgcagttcctctggttcagcccggagcgttacaacaagcagatcgaccgcctgcaggacctggggctggagtgggtgcgcctggacctgcactgggaccgcctggaaaccgccgaggaccagtaccagctggcctccctcgaccagttggtcaaagatctcgaggcgcgccagctgaagtcggtgttctacctggtcggctcggcccgcttcatcaccaccgcgccgttctactcgcccttccaggaccagtatccgccgcgcgacccggaagtcttcgcccggcgcatggcgatgctctcgcagcgctacccgagcgtggccgcctggcaggtatggaacgagcccaacctgatcggcttctggcggcccaaggccgacccggaaggctacgccaagctgctccaggccagcaccatcgccctgcgcatggtcgacccggagaagccggtggtttccgccggcatggccttcttcagcgagatgcccgacggccgcaccatgttcgacgccctcggccacctgggcgtggagagcctcggcaccatcgccacctaccacccctatacccagttgccggaaggcaactacccgtggaacctggacttcgtctcccacgccaaccagatcaaccgcgccctgcgcaacgccggcgtgccggcgatctggagcaccgagtggggctggtcggcctacaaggggccgaaggagttgcaggacatcattggcgtcgaaggccaggccgactacgtgctgcgtcgcctggcgctgatgagtgcgctggactacgaccggatcttcctcttcaccctcagcgatctcgaccagcgcgccagcgtgcgcgaccgcgactacggcctgctcgacctggacgccaaccccaagccggtctacctggccctgcaacgcttcctcaaggtcaccgggccgaagctgcgcccggccgacccgccggtcaccgaggacctgcccgacggttccttcagcatcggctggacccgcgaggacggtcgcaacgtctggctgttctggtcggcccgcggcggcaacgtgcgcctgccgaagctcaaggaggccaccctgcacgatccgctcagcggcaaggtcacgcccttgagcggcagcgacggcctggaagtcccggtgaagtccagcctgcagatgctggtctgggagtga

SEQ ID NO: 30179 - DNA, 1068 bp, Pseudomonas aeruginosa
gtgaaaaaacgctggattcagatggatgtgacccgcggcgtgggcatcctgatcatcgtcttcgggcacagctggttcgtcgccagttcgccgaccgtgctctatccgttgctctctccgttcatcctgccactgttcttcttcatttccggggtgttcttcaggaccgagcaacccttcggcgagatggccctgcgcaaggccgacgccctcctcaagccgttcttcgtgaccatgctcggctacgtcatcctccgcgacctgctgcgcggccagccgctgctgccggacatcggcggagtgctgtacgcctcggtcgacaccctgccctggcaggcgctctggtacctgccgcacttctgggtagcgaccctgttcgcctggttcatgctgcgcgtcatccagcgtctcggcctgtccctcgccgccagttgcgtgctgctggccgtgcaactgggcctgggcatcctgttcctcaagacgttctggcagatcccggtggagttcggcggcgaacagtacctgctgccgggcctgccgttcagcctggacatcaccctgatcagcagcgcccacttcatgttcggctatgtcctgcgcgacgtcctgcgtcgccaccagagttcgttgctgaccctgtgcatcgcccttgccgtgaccaccgccagcttcctctactacccgacggtggtggacatggcgcagcgccgctacgaccactggttctgggccaccgtccaggcagtgagcggcgtctacctgtgctgggcgctgtccgggctgatgatgaagatcgactggctgggcaaggcgatgacctacatcggccagtcgaccctgatcctgctgatcttccacggcgagatccagcacaagaccttcaacctgctggtccacctgggtctgtcggaaccggccgctgccagcgtcgccctggtgatctcggtgatcgtctcgctgctgatcggcgaagtgatcaagcgcgtcgcgctgctgcgcgccctctactttcccttcccggtgcgcaagaagaccgccgcggtccagggcggcggcgaagcgcgctga

SEQ ID NO: 30180 - DNA, 1053 bp, Pseudomonas aeruginosa
atgaatgccatgaacccgcaacacgagaacgcccagacggtcaccagcatgaccatgatccaggcgctgcgctcggcgatggacatcatgctcgagcgcgacgacgacgtggtggtattcggccaggacgtcggctacttcggcggcgtgttccgctgcaccgaaggcctgcagaagaaatacggcacctcgcgggtgttcgatgcgccgatctccgagagcggcatcatcggcgccgcggtcggcatgggtgcctacggcctgcgcccggtggtggagatccagttcgccgactacgtctacccggcctccgaccagttgatctccgaggcggcgcgcctgcgctatcgctcggccggcgacttcatcgtgccgatgaccgtacgcatgccctgtggcggcggcatctacggcgggcaaacgcacagccagagcccggaggcgatgttcacccaggtctgcggcctgcgcacggtgatgccgtccaacccctacgacgccaagggcctgctgatcgcctgcatcgagaacgacgacccggtgatcttcctcgagcccaagcgcctctacaacggcccgttcgatggccaccacgaccgcccggtgacgccctggtccaagcatccggccagccaggtgccggacggctactacaaggtgccgctggacaaggcggcgatcgtccgccccggcgcggcgctgaccgtgctgacctacggcaccatggtctacgtggcccaggccgcggccgacgagaccggcctggacgccgagatcatcgacctgcgcagcctctggccgctggacctggaaaccatcgtcgcctcggtgaagaagaccggccgctgcgtcatcgcccacgaggcgacccgcacctgcgggttcggcgccgagctgatgtcgctggtgcaggagcactgcttccaccacctggaggcgccgatcgagcgcgtcaccggttgggacaccccctacccgcatgcccaggagtgggcgtatttccccggccccgcgcgcgtcggcgcggcattcaagcgtgtgatggaggtctga

SEQ ID NO: 30181 - DNA, 1287 bp, Pseudomonas aeruginosa
atgggtacccatgtgatcaagatgccggacatcggggaaggcatcgccgaggtcgaactggtggagtggcatgtccaggtcggcgactcggtcaatgaagaccaggtcctcgccgaggtgatgaccgacaaggccacggtggagattccctcgccggtggccggacgcatcctcgccctcggcggccagccgggccaggtgatggcggtgggcggcgaactgatccgcctggaggtggaaggcgccggcaacctcgccgagagtccggccgcggcgacgccggccgcgcccgtcgccgccaccccggagaaaccgaaggaagccccggtcgcggcgccgaaagccgccgccgaagcgccgcgcgccttgcgcgacagcgaggcgccacggcagcggcgccagcccggcgaacgcccgctggcctcccccgcggtgcgccagcgcgcccgcgacctgggcatcgagttgcagttcgtgcagggcagcggtcccgccggacgcgtcctccacgaggacctcgatgcctacctgacccaggatggcagcgtcgcgcgcagcggcggcgccgcgcaggggtatgccgagcgacacgacgaacaggcggtgccggtgatcggcctgcgtcgcaagatcgcccagaagatgcaggacgccaagcgacgcatcccgcatttcagctatgtcgaggaaatcgacgtcaccgatctggaagccctgcgcgcccatctcaaccagaaatggggtggccagcgcggcaagctgaccctgctgccgttcctggtccgcgccatggtcgtggcgctgcgcgacttcccgcagttgaacgcgcgctacgacgacgaggccgaggtggtcacccgctacggcgcggtgcacgtcggcatcgccacccagagcgacaacggcctgatggtgccggtgctgcgccacgccgaatcgcgcgacctctggggcaacgccagcgaagtggcgcgcctggccgaagccgcacgcagcggcaaggcgcaacgccaggagctgtccggctcgaccatcaccctgagcagcctcggcgtgctcggcgggatcgtcagcacaccggtgatcaaccatccggaggtggccatcgtcggcgtcaaccgcatcgtcgagcgaccgatggtggtcggcggcaacatcgtcgtgcgcaagatgatgaacctctcctcctccttcgaccaccgggtggtcgacgggatggacgcggcggccttcatccaggccgtgcgcggcctgctcgaacatcccgccaccctgttcctggagtaa

SEQ ID NO: 30182 - DNA, 1395 bp, Pseudomonas aeruginosa
atgagccagatcctgaagacttccctgctgatcgtcggcggcggtcccggcggctacgtcgcggcgatccgtgccgggcaactgggcattcccaccgtactggtggagggcgccgccctcggcggcacctgcctgaacgtcggctgcatcccgtcgaaggcgctgatccacgccgccgaggaatacctcaaggcccgccactatgccagccggtcggcgctgggcatccaggtacaggcgccgagcatcgacatcgcccgcaccgtggaatggaaggacgccatcgtcgaccgcctcaccagcggcgtcgccgcgctgctgaagaaacacggggtcgatgtcgtccagggctgggcgaggatcctcgacggcaaaagcgtggcggtcgaactcgccggcggcggcagccagcgcatcgagtgcgagcacctgctgctggccgccggctcgcagagcgtcgagctaccgatcctgccgctgggcggcaaggtgatctcctccaccgaggcgctggcgcccggcagcctgcccaagcgcctggtggtggtcggcggcggctacatcggcctggagctgggtaccgcctaccgcaagctcggcgtcgaggtggcggtggtggaagcgcaaccacgcatcctgccgggctacgacgaagaactgaccaagccggtggcccaggccttgcgcaggctgggcgtcgagctgtacctcgggcacagcctgctgggcccgagcgagaacggcgtgcgggtccgcgacggcgccggcgaggagcgcgagatcgccgccgaccaggtactggtggcggtcggccgcaagccgcgcagcgaaggctggaacctggaaagcctgggcctggacatgaacggccgggcggtgaaggtcgacgaccagtgccgcacctcgatgcgcaatgtctgggccataggcgatctcgccggcgagccgatgctcgcgcaccgggccatggcccagggcgagatggtcgccgagctgatcgccggcaagcgtcgccagttcgccccggtggcgatccccgcggtgtgcttcaccgatccggaagtggtggtcgccgggttgtccccggagcaggcgaaggatgccggcctggactgcctggtggcgagcttcccgttcgccgccaacggtcgcgccatgaccctggaggccaacgaaggcttcgtccgcgtggtggcgcgtcgcgacaaccacctggtcgtcggctggcaggcggtgggcaaggcggtctcggaactgtccacggccttcgcccagtcgctggagatgggcgcccgcctggaagacatcgccggcaccatccacgcccatccgaccctcggcgaagcggtccaggaagccgccctgcgcgcgctgggacacgccctgcacatctga

SEQ ID NO: 30183 - DNA, 1698 bp, Pseudomonas aeruginosa
atgagcagtcaacgccgaaactaccgcttcatccttgtcgtcaccctgttcgtcctcgcctccctggccgtctccggacggttggtctatctccaggtccacgaccacgaattcctcgccgaccagggcgacctccgctcgatccgcgacctgccgatcccggtcacccgcggcatgatcaccgaccgcaacggcgagccgctggcggtatccaccgaagtcgcgtcgatctggtgcaaccccagggaaatggccgcccacctcgacgaggtgccgcgcctggccggcgccctgcaccgccccgcggcggcgctgctggcccagctccaggccaacccgaacaagcgcttcctctacctcgagcgcggcctgtcgccgatcgaggccagcgaggtgatggccctgggcataacgggggtacaccagatcaaggaatacaagcgtttctaccccagttccgagctgaccgcgcagttgatcggcctggtcaacatcgacggccgcggccaggaaggcaccgaactgggcttcaacgactggctgagcggcaaggacggggtacgcgaggtggcgatcaacccgcgcggctcgctggtcaacagcatcaaggtgctgaagacgcccaaggccagccaggacgtggccctgagcatcgacctgcgactacagttcatcgcctacaaggcgctggaaaaggccgtgctcaagttcggcgcgcactccggctcggcggtcctggtgaacccgaagagcgggcagatcctggcgatggccaacttcccctcctacaacccgaacaaccgcgccagcttcgccccggccttcatgcgcaaccgcaccctcaccgataccttcgagccgggctcggtgatcaagccgttcagcatgtcggcggcgctggcctccggcaagttcgacgagaacagtcaagtcagcgtggcaccgggctggatgaccatcgacgggcacaccatccacgacgtcgcccggcgcgacgtactgaccatgaccggggtgctgatcaactcctcgaacatcggcatgagcaaggtcgccctgcagatcggacccaagccgatcctcgaacagctcggccgggtcggtttcggcgcgccgctgtcgctgggcttccccggcgagaacccgggctacctgccgttccacgagaaatggtcgaacatcgccaccgccagcatgtcgttcggctacagcctggcggtgaacaccgccgagctggcccaggcctactcggtgttcgccaacgacggcaagctggtgccgctcagcctgctccgcgacaacccgcagaaccaggtgcgacaggcgatggacccgcagatcgcacggcgcatccgggcgatgctgcaaaccgtggtggaagacccgaagggcgtggtccgcgcccgcgtgccgggctaccacgtggcgggcaagagcggcaccgcgcgcaaggcctcgggccggggctacgcggacaagtcctaccgttcgctgttcgtcggcatggcgccggcgtccgacccgcaactggtgctggcggtgatgatcgattcgccgaccaggatcggctacttcggcggcctggtctcggcgcccaccttcagcgacatcatggccggatcgctacgcgccctggcgatcccgccggacaacctgcaggacagcccggccgtcgccgaccgccagcaccacggctga

SEQ ID NO: 30184 - DNA, 351 bp, Pseudomonas aeruginosa
atgcccagccccgccgaagtgttcaagtgcctggccgacgagacgcgtgttcgcgccaccctgctgatcgtcgaccagggcgaactgtgcgtctgcgaactgatgtgcgccctcgccgacagccagccgaagatcagccgccacctggcccagttgcgcagtgccgggctgctcctcgaccgtcgccagggccagtgggtgtattaccgcctgaaccctgcgctgccggcctggatccacgaagtcctgcaagtgaccctgcgggccaacggcgactggctgcaagccgacgcagcgcgcctgcgcgacatggacggccgcccgcagcgcgcctccgcctgctgccaatag

SEQ ID NO: 30185 - DNA, 1353 bp, Pseudomonas aeruginosa
atgttcggcatgtcacacgatgcctacctgctcctcgacgccctggtgaccatcatcggcctgatcgtgctgatcacccgcttcaaggtgcatcccttcatcgccctgatcatcgccgccggcttcctcggcctgacctcggggatgccggtggagaagatcgtcaaatccttccaggacggcttcggcggcgtgctcggcttcgtcggcgtgatcctcgccctgggcaccatgctcggcaagctgatggccgattccggcggcgccgaccagatcgcccgcaccctgatccgcgccttcggcaaggagcgggtgcactggtcgatgatgctcgccgcgttcctggtgggcatcccgctgttcttcgagatcggcttcatcctgctgatcccgctggtgttcatcgtcgcccggcgcagcggcgtgtccctgatcaagatcggcatcccgttgctcgccggcctttccgcggtgcacggtctggtgccgccgcatcccggcccgctgctggcgatcggcgtgttcggcgccgacatcggcaagaccatcctctacggcctgatcgtcgccctgcccaccgccgccatcgccggcccgctgttcggcgcgctggtctcgcgctacatacccggcacgccatcggcggaactggtcgagcagatcgcccacgagcccgagacccaggacctgcccagcttcggcgtgaccctggcgaccgtgctgctgccggtgttcctgatgctgctgaagaccttcgccgacgtcgccttccccgatggccacgcgttccgcgcctggatggacatgatcggccatccgatcagcgccctgctcctggccctgctggtggcgctctataccttcggctacgcccgtggcttcgactcgaagaagatcctcaggctgctcgaccagagcctggcaccgaccgccgccatcgtgatgatcatcggcgccggcggcggcttcaagcagatgctggtggccagcggggtcggcgacgtcatcggccatctcgcggtgaacgcgcagatctcgccgatcctgctggcctggctggtggccgcggtgatccgcatcgccaccggctcggccaccgtcgccaccatcaccggggccggcatcgtggtgccggtgatcgacctgattcccggcgtcaaccgcgagttgctggtgctcgccaccggcgccggctcgctgatcctctcccatgtcaacgacgccgggttctggctggtcaagcagtacttcaacatgagcgtcagcgagaccttcaagacctggaccgcgatggagaccatcctctccgtggtcggcctggtcttcatcctgttgctgtcgctggtgctctga

SEQ ID NO: 30186 - DNA, 1200 bp, Pseudomonas aeruginosa
atgtgcctggacgacccgacccattcccgacgtgacatcctcaagctcgccgcgctgctcagcgctgccggcgcgttgccgctgctgagcagcctgcaggcgcgtgccgccgccgaacccgacgcgccggtgcgcatcggctacctgccgatcaccgacgccacgcccttgctggtggcccatgccaacggcctgttcgaggccgagggcatccaggccgaacggccggtgctgttgcgtagctgggcgcaggtgatcgaggcgttcatctccggccaggtcaacgtcatccacctgctgtcgccgatgaccgtctgggcccgctacggcagcaaggtgccggccaaggtggtggcctggaaccacgtcggcggctcggggctcacggtggctccggagatcgccgacgtgcgccagctcggcggcaagagcgtggcgatcccgttctggtactcgatccacaacgtggtgttgcagcaactgctgcgcgacaacggcctgcgcgcggtgagccgtgcggtgggcgcggcgctggccgccgacgaggtcaacctggtggtgctgccgccttcggacatgccaccggcgctggccagcaagcgcatccacggctacatcgtcgccgagccgttcaacgccctggcggagaacctcaaggtcggccgggtacagcgcttcaccggcgatgtctggcgcaaccacgcctgctgcgtggtgttcatgcacgaacacgacctggagcggcggccgcagtggtcgcaaaaggtggtcaacgccatcgtcaaggcccagctatggactcgcgagcaccgcgccgaggccgcacagttgctgtccaaggccggagccaaccgctatacgccgcacgcaccggaggtcctcggccgggtgctggcgccgggcgccgaggagcagcaggcctatctcgccagcggcgcgatccgccacgccgactggcaggagcggcgcatcgacttccagccctatccctatccgagctataccgaggaactggtgcggcggctgaaggacaccctgatcgaaggcaataatgccttcctcgctagcctcgatccgcgccaggtggccagtgacctggtggacgaccgcttcgtccgccaggccctggcagaggtcggcgggttgcaggcgttcggcctcgccgagggcttccagcgcagcgaggagatcagcccgtga

SEQ ID NO: 30187 - DNA, 906 bp, Pseudomonas aeruginosa
atgcccagagccagcaaagtcaccgatccgtcctacgagctgatggacgatcacgaaggccattcgctgatctaccgccagcacggcttccccagcccgctggtgcgctggcacttccacaaggaatacgagctgcacctgatcgtcgccagctccggcaaggtattcatcggcgactacatcggcaacttcgcccccgacaccctgttcctcaccggtcccaacctgccgcacaactggatcagccaggtggagcccgacgaggtggtggcccggcgcgacatgctggtgaacttcaccgacgaggtgctggaggacggcagcggcgtattctccgagctgaaccgcctggccccgctgctggcgcgggcgcgctacggcatcgagttccgcgacccggcgctgatcggcgaaagccggcgactgttgcaacgcatcgccgacagcggcggcatgacccgcctgggatacttttttatcctcatggaacagctcgccgaatgcgaggactaccagttgctctccaccgtcacttcctcgcaactggccgacgagcacaacgtcgaacggatcaaccgggcggtggactacatcttccagcactacgcccaggacctcacccaggagcaggtcgccgcccacctgggcatgacccccacctacttctcgcgcttcttcaagcaggccgccgggcgcggcttcgtcgagttcgtcaaccgcctgcgcatcagcaagtcctgcgagctgctggcccgcagcgagctgccggtgaccgaggtgtgcttcgagtcgggcttcagcaacctgtccaatttcaaccggcgcttccagcagctcaagggcatgacgcccaccggctaccggcgcctggtgacccagcggctgaccgagcagaacctgctctga

SEQ ID NO: 30188 - DNA, 1311 bp, Pseudomonas aeruginosa
atgaacgactcgatcaaggcctgcctggccgccgcctgcctcgccctgcccctgctggcccagggcgccgagaccctgaccatcgccacggtcaacaacaacgacatgatccgcatgcaacgcctgtccaaggtgttcgaggaaagccacccggacatcgcgctgaaatgggtggtgctcgaagagaacgtcctgcgccagcgcctgaccaccgacatcgccacccagggcggacagttcgacctgctcaccatcggcatgtacgaagccgcgctttggggcgccaagggctggctggagccgatgagcgggctgcccgccgactacgccctggacgacctgttgccctcggtgcgcgacggtctctccgtcaagggcacgctgtacgccctgccgttctacgccgaagcctcgatcacctactaccgcaaggacctgttccagcaggccgggctgcggatgcccgagcaaccgacctggacccagctcggcgagttcgccgccaggctcaaccgcccggaccagggccagtacggtatctgcctgcgcggcaaggccggctggggcgagaacatggcgttgatcggcaccctggccaacgccttcggcgcacgctggttcgacgagcgatggcagcccgaattcagcggcggcgaatggaagaaggctctcgacttctatgtctccaccctcaagcggtacggcccgcccggcgcctccagcaacggattcaacgagaacctggcgctgttcaacagcggcaagtgcgcgatctgggtggacgccagcgtcgccggttcgttcgtcaccgacaagagccagagcaaggtcgccgacgccaccggcttcgccttcgccccccgggaagtcaccgacaagggcgcctcctggctgtattcctgggccctggcgattcccgccagctcgcgcgccaaggacgcggcgaaggccttcgccacctgggccacctcgcaggcgtacggcaagctggtggcggacagggaaggcgtagccaacgtgccgcccggcacccgcgcctcgacctacagcgaggcctacctggccgccgcgccgttcgcgcgggtcaccctggaatcgctgaagcgcgtcgatcccaaccatccgacgctgaagccggtgccctatgtcggcatccagttggtcaccatccccgagttccaggccatcggcacccaggtcggcaagctgttctccgccgccctcaccgggcagatgagcagcgaccaggcgctcgccgccgcgcagcagagcaccgcccgcgagatgaagcgcgccggctatccgaagtag

SEQ ID NO: 30189 - DNA, 1113 bp, Pseudomonas aeruginosa
atggctgatctcaagatccgcaacctgcagaaaggcttcgacggccaggccatcatcaagggcatcgacctcgacgtccgcgaccgcgagttcgtagtcttcgtcggcccctccggctgcggcaagtcgaccctgctgcgcctgatcgccggcctcgaagaggccagcggcggcagcatcgccctcgacggcacggacatcaccgacaccccgccggcgaaacgcgacctggcgatggtcttccagacctacgcgctgtacccgcacatgacggtgcgcaggaacctctccttcgccctcgacctggccggcgtcgacaagcgcgaggtcgccgccaaggtcgacgccgccgcacgcatcctcgaactgcaagcgctgctggagcgcaagccgcgccagctctccggcggccaacggcagcgggtggcgatcggccgggcgatcgtgcgcaacccgaagatattcctcttcgacgaaccgctgtccaacctcgacgccgccctgcgcgtgcagatgcgcctggaactggcgcggctgcaccaggaactggcggcgaccatgatctacgtgacccacgaccaggtcgaggcgatgaccctggcggacaaggtcgtggtgctcaacggcgggcgcgtcgagcaggtcggctcgccgctggagctttaccaccatccggccaacctgttcgtcgccggcttcctcggcacgccgaagatgggcttcctgcgcggccatctcagccgcaaccagggcgagcgctgcgaggtcgccctcgaatgcggcgcgcgcgtcggcctgccgctatgcgccggcgagctggccaccggcagcccggtgaccctcggcatccgcccggaacacctgaacatcgcccgcccgggccatgccttccagggcctgctgcgggtcgccgccgacgtcagcgagcgcctgggcagcgacagcttctgccatgtccgcgccgactcgggggaaatgctcaccctgcgcgtgcgcggcgatttcgcaccggactacggcgcccccctggagctgggcttcgatccggagcactgccacctgttcgacagcaacggccaggccctcgacaaacgactgcaacaggcggcctga

SEQ ID NO: 30190 - DNA, 1476 bp, Pseudomonas aeruginosa
atgaaactcaaccggcagcacctccccctgctggcgaccgctgtcgcccgcccgtcctacgaccccgcgcaactgcgccagggcatcgtccacatcggcgtcggcggcttccaccgcgcgcaccaggcggcctacaccgacgccctgatgaaccgcggcgaagccctcgactgggctatctgcggcgccggcctgcgcagcgacgaccgcgccatgcacgacgccctggccgcccaggactacctctacaccctctacgagctgggcgaccaaccggacaccgaggtccgcgtgatcggcgccatcagcggcatgctgctcgccgaggacggcgccgaggcgctgctggaaaaacttgccgagccggccatccgcatcgtctcgctgaccatcaccgaaggcggctactgcatcgacgatggcagcggcgagttcctcgccgagttgccgctggtgcgccacgacctggccaacccgcggaccccgcgcggggtcttcggctttctctgcgaggctctgcggcggcgccgcgacacaggcgtgccggcgttcaccgtgatgtcctgcgacaacctcccgcataacggcgaggtggcgcgcaaggcgctgctggccttcgccgaacggctcgacccggggctggcgcgctggatcgcgacgcacgtcagctttcccaacgccatggtcgaccgcatcaccccgatgaccagccccgcccaccgccgccaactggcccaacggcacgacgtggaagacgcctggccggtggtctgcgaacccttcgtgcaatgggtgctggaagatcgtttcagcgctgggcgcccggcctgggaaaaggtcggcgtgcagttcaccgacgacgtcacgccctacgaggagatgaagatcggcctgctcaacggcagccacctggcgctcacctacctgggcttcctgcgcggctaccgcttcgtccacgagaccctcggcgacccgctgctgcgccgctacgtgcgggccttcatggaccgcgacgtggccccgctgctggcaccggtaccggggatcgacctggaacgctacaaggacagcctggtcgagcgcttcgccaaccgcgccatcgccgaccaactggaacgggtctgctcggacggctcgtcgaagtttcccaagttcatcgtccccaccgccaatcggctgatcgccgccggccggccgctggaacgggtggccctggtggtggcggcctgggcgctgtacctgggcggggtcgacgagcatggcgaacgctacccgattcccgatccgcgcgccgccgaatgccaggcgctggttgccgaacgccacggcctgggccggcgcctgctcggcgtggagaccgtgttcggcccggcgatcccggcctcggcggccttcgtcgaggccttcgagcggctctacgacagcctgcgccgacacggcgtcagcgaaaccctgcgccaggtactcggcgaatga

SEQ ID NO: 30191 - DNA, 654 bp, Pseudomonas aeruginosa
atgtcgcccatgcttgaacggctctggcaaggtttcctcgataccctgctgatgatcggcgcgtcctccgccatcgtcctgctggtgggtatcccgctggccctggtgctggtcaccaccgggccgggcgggatcttcgaggcgcgcctgctcaatcgcatcctgggcggtctggtcaacgtgctgcgctcggtacccttcctgatcctgatggtggcgctgattccctttacccggatgatcgtcggcaccagctatggagtctgggccgcggtggtgccgctgaccatcgccgccacgccgttcttcgcgcggatcgccgaggtcagcctgcgcgaagtcgaccacggcctggtggaggcggcccaggcgatgggctgcgaacgccgccacatcatctgcaacgtactgttgccggaggcgcgaccgggcatcgtcggcggcttcaccatcaccctggtgaccatgatcaattcctcggccatggccggcgcgatcggtgccggcggcctgggcgacctggcctaccgctacggctaccagcgcttcgacacccaggtgatgctcaccgtgatcatcgtccttgtgctgctggtcacgttgatccagttcggcggcgaccgcctggcccgcctgctgaacaaacgcctgtag

SEQ ID NO: 30192 - DNA, 1131 bp, Pseudomonas aeruginosa
atgaacgcttctacccatactcccgaccggctgctgacgctgccacgttcgccgaacctggcgacctcgatccgcgccaccgcccaggtcttcgaggatccgaagtcccaggccctgctcgaacacctgcgccaggtggcgccgagcgaggccagcgtgctggtgatcggcgagaccggcaccggcaaggaactggtggcgcggcatatccacaacctcagcgcgcggcgcaccggtccgttcgtggcggtcaactgcggggccttctccgagtcactggtggaagccgagctgttcggccacgagaagggcgccttcaccggcgccctggcggccaaggccggctggttcgaggaggccaacggcggcaccctgttcctcgacgagatcggcgacctgccgatgccgatccaggtcaagttgctgcgcgtgttgcaggagcgcgaggtggtgcgcttggggtcgcgcaagagcatccccatcgacgtgcgcgtgctggcggcgaccaacgtgcaactggagcgggcgatcaatgccgggcacttccgcgaggacctgtactaccggctcaatgtcgtcagtctcgaactgtcgccgttgcgcgagcgacccggcgacatcctgccgctgacccgccacttcatcgccgaatacagccgtcgcctgggctacggccagagccagttgagcccggaggcggcgcagaagttgcgtgcctattcctggccggggaacatccgcgagctggagaacgtcatccaccataccttgctgatctgccgcgacgggctgatccgcgcggatgacctgcacctgtccaatctgcgcctggagcgtggcgaggagctggcgcgcgggggcccggcgagcggcgccgccgagcacttgttgcagcaggctttccagcgtctgttcgaagagcagggcgagaacctccatgggcgggtcgaagatgccctgctgcgcgcggcgtaccgtttctgccacggcaaccaggtgcataccgccaacctgctgggactcagccgcaacgtcacgcgcacgcggctgatcgccatcggcgaactggtggtgaacaagcgcggtggccagcggatcgatggcgagcgggcggtgcggttgtcgatctga

SEQ ID NO: 30193 - DNA, 1086 bp, Pseudomonas aeruginosa
atgtccgtcatcacccatccccacgcccgcgagctgaccaaatcggtgcgcgccaccgtgctggtgttcaacgacccccgttcccgcgagctgctggagcgcatcgagcgcctggcgcccagcgaggccaacgcgctggtcatcggcgagaccggcaccggcaaggagctggtggcgcgccatatccacgccctcagcggacgcaacggcggcccgttcgtcgcggtcaactgcggtgctttcgccgagagcctggtggagagcgagctgttcggccacgagaagggcgcctttaccggtgcgttgcagagcaaggccggctggttcgaggcggccaacggcggcaccctgttcctcgacgagatcggcgacctgccgccgagcatccaggtcaagctgctgcgcgtgctgcaggaacgcgaggtggtgcggctcggttcgcgccggccgatccccatcgacgtgcggctggtggcggcgaccaacgtcgacctggctgacgcggtggtcgccggacacttccgcgaggacctgttctaccgcctgcacgtggcgaccatccaactgccgccgttgcgcgagcgccgcggcgatatcctgccgctggccgagtacttcatcgtcgagcactgccggcgcctcggctacaccagcgcgagcctgagcccggaagccgagcgcaagctgctcgggcattcctgggcgggcaatatccgcgagctggagaacgccatccaccacgcgctgctggtctgccgcaaccgtctgatccagccggccgacctgcacctcatcgacatgcgtgcgcgccaggagccgaacggcttgcgccgcgctcccgaaagcgccgccggctcggcgttggaggcggcgctgcaggcgctgttcgaggaaaaccgcgaggatctctacgagcacatcgaggaaaccgtgttccgtgccgcctatcgcttctgccacggcaaccagttgcagaccggacgcctgctggggatcagccgcaacatcgtgcgcgcccgcctggagaagatcggcgagctggaaacctcgccacggcacaacgtggtctcgctggtgggcaagtga

SEQ ID NO: 30194 - DNA, 3954 bp, Pseudomonas aeruginosa
ttgaccgccgagcgcttcttgcccgaccccttcggcgaaccgggctcaaggctctaccggaccggcgacctggcgcgccgacgcggtgacggcgtgatcgagtacatggggcgtgccgaccatcaggtgaagatccgcggcttccgcatcgagctgggggaggtcgaagcccgcctcctggacttggagggaatacgcgaagcggcggctcttgcgctggacggtcaactggtggcctacctggtggctgaggggggcgaggacgaaactcgccagccggctttgcgcgagcgtatccgcacagcgctacgggcctcgctaccggactacatggtgccctcgcacctgctgttcctcgagcggatgccgctcagtccaaatggcaagctggaccgtcgggcgctgccgaagccggatgccggcctgatgcaacgcgaccacatggcgccggcgagcgcgctggagaaagacgtggccgcgatatggggcgagttgctgggcgtcgaacgggtcggcctgaccgacaacttcttcgaattgggcggacactcgctgctggcgacgcgcctggtctcgcggattcgccaggatctcggtatcgaagtcagcctgaagagccttttcgagcagccggtcctgcagggattcgtcgagagcctgggcgagaaaccggcggaggttccgccgatcacgcccgttacccgcgagcagccgctgccgttgtcctatgcacaggagcgccagtggttcctctggcaattggaaccggagagcgcggcctatcacattcccgccgccctgcgcttgcgcggcggcctcgatgtcgtcgcgctacagcgcagtttcgagcgcctcgcacagcgtcacgagtcgttgcgtacccgcttccgccaggaaggcctgcgtaccgttcaggtggtggacgccgatgggcagttgcaggtttcccggcataacctggcgaatgtcgatgacgcgtcgctcagggcggcagtcgaagcggagatggccaggcccttcgacctacggacggatgcgttgctgcggatcagtctgttcgaagtggctccgaatgaccatgtgctggtcatggtccagcaccatatcgtctccgacggttggtcgatgcagttgatggtcgaagagctggtccagctctatgccgcctacagccaggggcgcgaagcggccctgccggcgctgccgatacagtatccggactatgccgtctggcagcgcgaatggatggaggccggagagagggagcgccagttggcgtactggatcggcctgctgggtggcgaacagccggtgctggagctgccgttcgatcgtccccgtcctgcggagcagagctttcgcggcgcgcggctggagttcgaactcggcgccgagcgggccaggcggctgaaggcgcttgcccaacggcagggtgcgagtaccttcatgttgctgctggcatcgttccaggcgctgctgtatcgctacagcggtcagtcggatatccgtgtcggcgtgccggtcgccaatcgcaaccgggtcgaaaccgagcgactgatcgggttcttcgtcaacacccaggtgctcaaggccgacatcgatgggcagatggggttcgaccgattgctgcaccaggttcgccagcgctcgctggaggcgcaggcgcaccaggacttgccgttcgagcaactggtggaagccttgcaaccggagcgcagtctcagccacagcccgctgttccaggtgctattcaactaccaggcggagcggggcgagcacggcttgccggaagtcgcgggactgagcatcgaagagcaggcgtgggaaagccatacggcgcagttcgacctggtgctggatacctgtgagtccgagtcggacatctgggcggcgctggtctatgcgaccgatctattcgatgcttcgaccgcagagcgcctggtacggcattggcagaacctgctggatgcgatcctggcgatgcctgacgctcgcctgggagagctggacatgctcgaccgcgaggagcgcgaagtcatcgggcagctctggaaccgcagcgactcgggctatccggcaacgccgctggtacaccagcgagtggccgagcgggcgcgtatggcgccggatgcggtggcggtgatcttcgacgaggaaaagctcacctacgccgaactggataaccgggccaaccgcctggcccatgcattgatcgcccgaggcgttggccccgaggtgcgggtggcgatcgccatgcagcgcagtgcggagatcatggtggcgttcctggcggtactgaaggccggcggcgcctacgtgccgctggatatcgaatacccgcgcgagcgcctgctgtacatgatgcaggacagtcgcgcgcacctgctgctgacccatagccacctgctggagcgtctgccgatccccgaggggttgtcctgtctgtccgtggatcgcgaggaggagtgggccggcttccccgcccatgatccagaggtggcgctgcacggcgacaacctggcctatgtgatctacacctccggctccaccggcatgcccaagggcgtggcggtgtcccacggtccgttgatcgcccatatcgtggctaccggcgagcgctacgagatgaccccggaggactgcgagctgcacttcatgtcgttcgccttcgacggttcccacgaaggctggatgcacccgttgatcaacggtgcgcgggtgctgatccgcgacgacagcctgtggctgccggaacggacctacgccgagatgcatcgccacggggtaacggtgggggtgttcccgccggtgtacctgcagcaactggccgagcatgccgagcgcgacggcaatccgccgccggtacgggtctattgcttcggcggcgacgcggtggcgcaggccagctatgacctggcgtggcgggcgctgaagccgaagtacctgttcaacggctacggcccgaccgagacggtggtgacgccgctgctgtggaaagcgcgagcgggcgatgcctgcggcgcggcctacatgccgatcggtacgctgctgggcaaccgtagcggctacatcctcgacgggcagttgaacctgctgccggtaggcgtggcgggcgaactgtacctgggcggggaaggggtggcgcgtggctacctggagcgtccggcgctgaccgccgagcgtttcgtgccggatccctttggcgcgccgggcagccggctgtaccgcagcggcgacctgacccgtgggcgtgcggatggggtggtggactacctcggacgggtggaccaccaggtgaaaatccgaggcttccgcatcgaactgggagagatcgaggcgcgcctgcgcgagcatccggcggtgcgcgaggcggtggtggtggcccagccgggcgcggtgggccagcagttggtgggctacgtggtggcgcaggagccggcggtcgcggattcgccggaagcgcaggcggagtgccgggcgcagttgaagacggcgctgcgcgagcgcctgccggaatacatggtgccatcgcacctgttgttcctggcgcggatgccgctgacgccgaacggcaagctggaccgcaagggcctgccgcagccggatgcgagcctgttgcagcaggtctacgtggcgccgcgaagcgatctggagcaacaggtcgcggggatctgggcggaggtcctgcaattgcaacaggtcgggctcgacgacaatttcttcgaactcggcggccactcgttgctggccacccaggtcattggccgcctacgcgaacgactgcacctggaggtgccgatcaagtcgatgttcaccgcggagacactgggtgagttctgccacggcgtcgagaccctcaaggccgagagcgcgccggtggaagatgccctggctaaatccctggaggcgctcaaacgtctatctgccgatgaacttgaaaaactgatttcctaa

SEQ ID NO: 30195 - DNA, 2460 bp, Pseudomonas aeruginosa
atgagcttcgcccgcctgccgatcccgcagactcgccaggagatggacaacctgccgctgtcctatgcccaagagcggcagtggttcctctggcagctggagccggagagttccgcctaccacattcctaccgccctgcgcctgcgcggcaggttggacattgcgtccttgcagcgcagcttcgcggcgctcgtcgagcggcacgaaagcctgcgcacgcggatcgcgcggatgggtgatgaatgggtgcaggtcgtctccgccgacgtctcgctggcgctcgaagtcgaagtgcaacggggactcgacgaacagcgattgctggagcgggtcgaggcggagatcgcacgacccttcgatctcgaacagggaccgttactgcgggtgactttgctggaggtggacgccgacgagcatgtgctggtcatggtccagcaccatatcgtctccgacggttggtcgatgcaattgatggtcgaggaactggtccagctctatgccgcctatagccaagggctcgacgtggtgttgccggccctgccgatccagtacgcggactacgccctgtggcagcgcagctggatggaggcgggggaaaaggagcgccagttggcgtactggaccggcctgctgggcggcgagcagccggtgatcgagttgcccctcgatcacccgcggcagccgctgcgcagctatcgtggagcgcaattggacctggagctggagccacacctggcccttgccttgaaacagctggttcagcgcaagggtgtgaccatgttcatgctgttgctggcttccttccaggcgctgttgcatcgctatagcggacaggcggatatccgtgtcggcgtgcctatcgccaaccgtaaccgggttgaaaccgagcggctgatcggtttcttcgtcaacacccaggtgctcaaggccgacatcaatggccggatgggtttcgacgagttgctggcccaggcccgccagcgcgcgctggaggcacaggctcaccaggacctgccgttcgagcaactggtggaggctttgcagccggaacgcagcctcggccacaacccgttgttccaggtcatgttcaatcaccaggccgactctcgttcggccaaccagggcgtgcaactgccaggcctgtcgctggagcggatggagtggcggagcagctccgtggccttcgacctgacgctggacgtgcacgaggccgaggacggtatctgggcatcgttcggctatgccacggatctgttcgaggcctcgaccgtcgagcgcctggctcggcactggcagaatctcctgcgcggcatcgtggccgaaccgggccggccggtcgccgagttgccgctgttgctggacgaggagcgcgattgcctgtcgcgggcctgggcagagaacgccgacgagggtgggttgccgcccctggtccagttgcagatccaggagcaggcccgtctgcgtccgcaggcgcaagcactggcgctggaggggcaggccttgagctacgccgagctcaacgcccgcgccaatcgtctggctcactgcctgatagcgcgtggcgtcggtcccgatgtgctggtgggaatcgccgtcgagcgctcgctggacatggtggtcggtctgctggcgatcctcaaggccggtggtgcctatgtgccgctggacccgacctatccgcaggaccgtttgcgtcacatgctcgaggacagcgccgtcggcctgttgctcagccaggagcatttgctgcccgggctgcctttgcacgaagggctggaggtgctctccatcgaccgcctggaacgggacgcatcggtgtctacggatgatccggtggtgaacctgcggccggagaacctggcctatgtgatctacacctccggctccaccggaaaacccaagggcgtggccatcagccatgcggcgcttgcgcagttctcgcgtatcgccagtggttattccgcgctcaccccggaggatcggatattgcagttcgccaccctgagcttcgacggcttcgtcgaacagctctatccggcgctgacccgtggtgcctgcgtggtcctgcgtggcggcgacctctgggataccggtgagctgtatcggcagatagtcgagcagggcgtgacccttgccgacctgcccacggcgtactggaacctgttcctgctcgatgccctggccgagccacggcgttcctacggtgccttgcggcagatccacatcggtggcgaagccatgccactggaggggccgaagctctggcggcaagccggcatgggccgggtgaggttgctcaatacctatggaccgaccgaggccacggtggtgtccagcgtcttcgattgttccgccgagaacgcccgggtgggcaatgccagtcctatcggccaggcgctacccggccgtacgttgctggtgctggatgaacatctcggcctactgcccgtagggcggtag

SEQ ID NO: 30196 - DNA, 315 bp, Pseudomonas aeruginosa
atggctaagccgaatgatacgtccaaccccgaggtaacagaatcgtccccccgcttcgtcccgctgctccccacctcccaggccgacatgtgtccgcgtagcgccaccctgtacgtggacacccatgcactccccacgcacttgttcgacaacgcgaaagtgcgcttgaggtcggcgatcaacatcctggccatgacccgtttgctcgatgagaaagaagagcccggcggcaccctggcctacatcaacggtgcgttgctgtcgctgctcagcgatgccttgtccgaaatcgaggcgggccacccgagcctgtag

SEQ ID NO: 30197 - DNA, 1005 bp, Pseudomonas aeruginosa
atgaatctgttgcaaggcaaatggccgcgcctggccaccctgctggcggtgctggtggcggcggcactggtgttcctcgcctgggaacgctacacccgcacgccgtggacccgtgacgcgcgggtccgcgccgatgtggtgacgctgtcggcggacgtttccgggctgatcacccggttgccgctgagcgacaaccagcccgtggagaagggcgaactgctgctcagcatcgatccggcgcgctatgaactggcggtgctgcgcgccgagcgcgcggtgaacgtggcgcgggcggcgctgggcgagtcgcgcgcggcgatcgaggccagccaggcccagttgcgccagcgccgcagcgaggcgcaacggcgctcggcattgcagaagcgctcgatgctatcggtggaagagaacgaaaaggcccagaccgacgtcagcctggcccaggccgagttgctgaggaaccaggccagcctcggcctggcccaggccaacgtggagcttgccgaagccgccttgcagcaggcccgtctcgatctcgaacgtacccaggtgcgcgccccggtcagcggctacgtgaccaacctgcagacccgcgagggcgactacgcccacgccggggtgccattgctggcgctggtggaccgcgattcgttctatgtcagcggatacttcgaggagaccaagttgccgggcatccacgtcggcagccgggcgcgggtggaactgatgagcggcgagcgcttcgacgggcgcgtgcagagcatcgcccatgccatcaccgaccgggagaatgccgagggctcgcgcctgctggcgaacatcaacccgagctatacctgggtcaagctggcccagcgaattccggtgcgcatcgccatcgatcccgcctatcgccagcgcaacaccttgcgcgccggcgtgaccgcgaccatccgggtgctgcccgcggaggacaccgcgaaagtcgattccgcggcgcccgggactgccttgcggccttga

SEQ ID NO: 30198 - DNA, 1377 bp, Pseudomonas aeruginosa
atgtccctgagtgtcttcgatctgttcaagatcggcatcgggccgtccagctcccacaccgtggggccgatgcgtgccgccgcgcgctttgccgaggggctgaggcgcgaggggttgctggaggccactgccagcatcaaggtcgagctgtacggctcgctcggcgccaccggcaagggccacggcagcgacaaggcggtactgctcggcctggagggcgagcagccggacacggtggataccgccgcgattcccgctcggctcgatgccatccgttccagcggcgagctgcgcctgctcggcgagcggccgatccgcttcgtcgagaaggaacaccttgcgctgatccgcaagccgctggcctaccatcccaacggcatgatcttccgtgccttcgacgccgccggcctgcaggtccgcagccgcgagtactactcggtgggcggcggtttcgtggtcgacgacgaggccgccggcctcgaccgcatcgtcgaggaccgcacgccgctggcgttccccttcaagaccgcgcggcaactgctcgaccattgcgcccgcgaaggcctgtcgatcagccagttgatggccgagaacgagaaggcctggcgccccgccgaggaaacccgcaccggcctgctgcgtatctggcaggtgatgcaggactgcgtcgaggccggctgccgcaacgagggcatcatgcccggcggactgaaggtcaggcgccgtgcggcggcgctccaccgccagttgtgccagcggccggaggccggtctgcgcgacgccctcagcgtgctcgactgggtcaacctctacgccctggcggtgaacgaggagaacgccagcggcggccgcgtggtgaccgcgccgaccaacggcgcggcggggatcattccggcggtgctgcattactacgcgcgcttcatccccggggccgacgacgacggcgtggtgcgcttcctgctcaccgcggcggcgatcggcatcctctacaaggaaaacgcctcgatctccggcgccgaggtcggttgccagggcgaggtcggcgtggcctgctcgatggctgccggggcgctctgcgaagtgctcggcggtagcgtgcagcaggtcgagaacgccgccgaaatcggcatggagcacaacctcgggctgacctgcgacccggtcggcgggctggtccaggtgccctgcatcgaacgcaacgcgatggcttcggtgaaggcgatcaacgccgcgcgcatggccctgcgcggcgacggccagcacttcatttccctcgacaaggtcatccgcaccatgcgccagaccggcgccgacatgaaaagcaaatacaaggaaaccgcgcgcggcggcctcgccgtgaacatcatcgaatgctga

SEQ ID NO: 30199 - DNA, 2463 bp, Pseudomonas aeruginosa
atgaccgccaccgccgtcgtcctccgcaatgccccgtcgtccctcgatttcccccgcgcctcgcgcctgagccgttcggtgcgcgcggccctgctgtcgttggccatggcggccggcgcggcgccgctctgcgcctcggccgccgaagcggcggcggaacaggcgcggccctatgcgatccccgccggacagttgggcgacgtgctcaaccgcttcgcccgcgaagccggcatcaccctctcggccactccggcgcagaccggtggctacagctcccaggggttgcgcggcagtttcaccgtgcagcagggcctggcccggctgctcgccgacaccccgctggaagcggaagaccagggcgacggcagcttcgtcttgcgcgaggcgccggcaaaggacggcgatgtgctgaacatgcaggcggtggaggtcttcgccctcggcaacaacctgggcagcaccgatggctacctggccacccatagccagatcgccaccaagaccagcaagccgctgctggaaaccagccagaccgtctcggtgatcacccgcgagcagatcgacgacaccgcctccaagaccgtgcagcaggcgatgcgctatacccccggcatcttcaccggccaggtcggcgcctccaaccgctacgactacgtggtgatgcgcggcttcgccgacaacagcgtggacaacatctacctcgacggtctcaaggccatgggcgacagcggtaccttcagctcgatgcaggtcgacccgtacttcctcgaacgcatcgatgtgctcaaggggccgtcctcggtgctctacggccgtagcctgccgggcggcctggtggcgctgaccagcaagaagccgttgtacgaggactaccgccagatcaccggcagcatcggcaacatgggccagaaggagatgggcttcgatttcagcgggccgctcgacgaggagaagcgcatcgcctaccgcctgatcggtctcggcaagggctcggatacccagttcgatcacgtcaaggaggagcgctacgccatcgccccgaccctggccatcgacttcagcgacgacaccaccctgaccctgcaaggctacctgcaacacgatcccaacgggggctaccacggcggcgtaccggccgacggcaccctgtcgcaccacaacggccggcacatctcccgcgagttcttcgatggcgagccgagcaaggacgacttcgaccgcacccagcggatgttcggctaccagctggagcaccgcatcgacgacgtctggtcggcgcggcagaacttccgctacctggactccgacgtcgacctgtcgcaggtctacgcctacggctggagcgccagcgagccgaacaagctgaaccgctacttcagcggcgcccgcgagcacctgcaggcgtatatcgtcgacaacatgctgcaggccgaattcgccaccggcgcggcgcgccacaccctgctcaccggcctcgactaccagcgccggcgcaccgtggtcgactggcgttccggctcggcctcggcgctggacgcgttcaacccggtctacggcgacgacgccatcagctatttcccggacgacaaccacacccgccgcctggagcagaccggcgtctacctccaggacctgatcgacatcgaccagtggcgcttctcgctcggcctgcgccaggactgggtcagcgtcaccgacaagaaccgcagcaccggcagcaaggccgacgacgactgggagaaattcaccgggcggatcggcgcgctgtacctgttcgacaacggcctggcgccctacgtcagctactccgagtcgttcaacccgaacgcctattccgacgcctccggcacgcccctggcgcccaccgagggcaagcagtgggaactcggcctgaagttccaggcgccgggcagcaacagcttctacaccgcctcgctgttccatatcacccaggaaaacgtcgcctccaaggaaccccaggacaacttctacacctcggtcggcgaagtgcgctcccaggggctcgaactggaggcccatacccagctcagcgacaacctgaaactgctcggcagctacacctacaccgacatcacctacaccaagtcgctggacggcaaccagggccatacgccgaaccaggcgcccaagcacatggcttcgctgtgggccgactatgccttcgacgccggcccgctcagcggtctgagcatcggcggcggcgctcgctacgtcggcgagacctgggcggacaaggaaaacaccttgcgggtgccggactacaccctggtcgacgcgcggatcggttacgacctcggcaagctcggcctgaaaggcctggacgtcagcctcaatgccaacaacctgctggacaaggactacgtggcgtcctgctacagcctggacttctgctacttcggcgagaagcgcaacgtcaccgcgacggtgaactaccagttctga

SEQ ID NO: 30200 - DNA, 3111 bp, Pseudomonas aeruginosa
atgagtctgtccacgcccttcatccgccgcccggtcgccaccacgctgctgaccctggcgttgctgctggccggcaccctgtcgttcggcctgctgccggtggcgccgctgcccaacgtcgattttccggccatcgtggtcagcgccagcctgccgggcgccagcccggaaaccatggcctcgtcggtggccacgccgctggagcgctcgctgggacggatcgccgggatcagcgagatgacctccagcagttcgctgggctcgaccaccgtggtgctcgtgttcgacctggagaaggacatcgacggcgccgcccgcgaggtgcaggcggcgatcaacggcgcgatgagcctgctgcccagcggtatgccgaacaatcccagctaccgcaaggccaacccctcggacatgccgatcatggtcctcaccctgacctcggagacccagagtcgcggcgagatgtacgacctcgcctcgaccgtgctggcgcccaagctgtcgcaggtgcagggggtagggcaggtgagcatcggcggcagctcgctgccggcggtgcgggtcgacctcaacccggatgccatgagccagtacgggctgtccctggacagcgtgcgcacggccatcgccgcggccaacagcaacggccccaagggcgccgtcgagaaggacgacaagcactggcaggtggacgccaacgaccagttgcgcaaggcccgcgagtacgagccgctggtgatccactacaacgccgacaacggcgccgcggtgcgcctcggcgacgtggccaaggtcagcgactcggtggaggacgtgcgcaacgccggcttttccgacgacctgccggctgtgctgctaatcgtcacccgccagcccggcgccaacatcatcgaggccaccgacgccatccacgcgcaactgccggtgttgcaggaactgctcgggccgcaggtcaagctgaacgtgatggacgatcgcagcccgtcgatccgtgcgtcgctggaagaggccgagctgaccctgctgatctcggtggcgctggtgatcctggtggtcttcctgttcctgcgcaacggccgcgccacgctgatccccagcctggcggtgccggtctcgctgatcggcaccttcgcggtcatgtacctgtgcgacttcagcctgaacaacctgtcgctgatggcgctgatcatcgccaccggcttcgtggtggatgacgccatagtggtggtggagaacatcgcccgacgcatcgaggagggcgatccgccgatccaggcggcgatcaccggcgcccgccaggtcggtttcaccgtgctgtcgatgacgctctcgctggtcgcggtgttcatcccgctgctgctcatgggtggcctcaccggacggctgttccgcgagttcgcggtgactctctcggcggcgatcctggtgtccctggtggtatccctgaccctcacgccgatgctctgcgcgcgtctgctgcgtccgctgaaacggcccgaaggcgcttccctggcgcggcgcagcgatcgcttcttcgccgccttcatgctgcgctaccgcgccagcctgggctgggcgctggagcactcgcggctgatggtggtgatcatgctggcctgcatcgccatgaacctctggttgttcgtggtggtgcccaagggcttcctcccgcagcaggactccgggcgcctgcgcggctacgcggtggccgaccagagcatctcgttccagtccctgagcgcgaagatgggcgagtaccgcaagatcctctcttccgatccggcggtggaaaacgtggtcggcttcatcggtggcggccgttggcagtcgagcaacaccggttcgttcttcgtcactctcaagccgatcggcgagcgcgacccggtggagaaggtcctcacccggctgcgcgagcggatcgccaaggtgcccggcgcggcgctctatctcaacgccggccaggacgtgcgcctgggcggccgcgacagcaacgcgcagtacgaattcaccctgcgcagcgacgacctgaccctgctccgcgaatgggcgccgaaggtcgaggcggcgatgcgcaagctgccgcagctggtggacgtcaacagcgactcccaggacaagggcgtgcagacccgcctggtgatcgaccgcgaccgcgcggcgaccctggggatcaacgtggaaatggtcgacgcggtgctcaacgactctttcggccagcgccaggtgtcgaccatcttcaacccgctgaaccagtaccgggtggtgatggaggtcgaccagcagtaccagcagagcccggagatcctccgccaggtccaggtgatcggcaacgacggccagcgcgtgccgctgtccgcgttcagccactacgaaccgagccgggcaccgctggaggtcaaccaccagggccagttcgccgccaccacgctgtccttcaacctggcaccgggcgcgcagatcggcccgacccgcgaggccatcatgcaggccctggagccgctgcacatcccggtggacgtgcagaccagcttcgagggcaacgccggcgcggtgcaggacacgcagaaccagatgccctggctgatcctcctggcgctgctggcggtgtacatcgtcctcggcatcctctacgagagctacgtgcacccgctgaccatcctctcgaccctgccttcggccggggtcggcgcgctgctcgcgctgatcctctgccgcagcgagctgagcctgatcgcgctgatcggcatcatcctgctgatcggcatcgtcaagaagaacgcgatcatgatgatcgacttcgccctggaggccgagcgcaaccacggcctgagcccgcgcgaggcgatcctcgaggcctgcatgatgcgcttccggccgatcatgatgaccaccctggccgccttgctcggcgccttgccgctgatcttcggcatcggcggcgacgccgcgctgcgccggccgctgggcatcaccatcgtcggcgggctgatcggcagccagttgctgaccctgtacaccaccccggtggtctacctctatctcgaccgcctgcgccactgggtcaaccagaaacgcggcgtacgcacggacggtgcgctggagacacccctatga

SEQ ID NO: 30201 - DNA, 1281 bp, Pseudomonas aeruginosa
atgactccaacgaccggtaaatccaagttccgtaccctgcgcccgtggctgatcaccgccctggccttcgccgccgtgatcggcctggtgatgtggctggcggcgcccgcctcggcaccgtcctccgacgggcgacccggtcgcggcggcaagccgggcgccgcgctgcccaaggccaacgcgctcaccgtcggcgtggccagggtggagcagggcgacctggcgctgcatttcaacgcgcttggcaccgtcaccgccttcaacacggtgaacgtcaagccgcgggtcaacggcgagctggtcaaggtgctgttccaggaggggcaggaggtcaaggccggcgacctgctggcggtggtcgacccgcgcacctacaaggcggcgctggcccaggccgagggcacgctgatgcagaaccaggcgcaactgaagaacgccgagatcgacctgcagcgctacaaggggctgtatgccgaggactcgatagccaagcagaccctggatacccaggaagcccaggtccgccagttgcagggcaccatccgtaccaaccagggccaggtcgacgacgcccgcctcaacctgaccttcaccgaggtccgcgcaccgatttccgggcgcctcggcctgcgccaggtggacatcggcaacctggtcaccagcggcgataccacgccgctggtggtgatcacccaggtcaagccgatctcggtggtgttcagcctgccgcagcagcagatcggcaccgtcgtcgagcagatgaacggccccggcaagctgacggtcaccgcgctggaccgcaaccaggacaaggttctcgccgaaggcaccctgaccaccctggacaaccagatcgacaccaccaccggcacggtcaagctcaaggcgcgcttcgagaacgccgacggcaagctgttccccaaccagttcgtcaacgtgcgcctgctggcgcagaccctcaaaggcgtgctgaccattccggccaacgccgtgcagcgcggcaccaacggtatctatgtctacgtggtcggcgccgacaacaaggtcagccagcgcagcgtcgccatcggcaccagcgagaacgagcgggtggtggtggaaagcggcctgaaggccggcgagcaggtggtggtggaaggcaccgaccgcctgcgcgacggtatggaagtgcgtgtcgccgaggcctccccgcaggtcctcgagggcgagccgcagaaaccgcagactggccgccccagcggcctccagggcgactcggtgggtagcgggagcgctgaatga

SEQ ID NO: 30202 - DNA, 996 bp, Pseudomonas aeruginosa
atgaaaacccgtcaactcggccacaacggcccttccgtctccgccatcggcctcggctgcatgggcatgaccgacttctacaccaccggcggcgaccgccaggaggccatcgccaccctgcatcgcgccgtggaactcgggctgaacttcttcgataccgccgacatgtacggcccgcacagtaacgaggaactgctcggcgaggccctgcgcggcaaacgcgagcaggtgttcctggccagcaagttcggcatcgtccgcgaccctgccaatccccgggcgcgcggcgtcgacggcagcccggcgtacatccgccgcgccatcgaaggcagcctgaagcgcctcggtaccgaccgcctggacctgtactatcagcaccgcatggacccgcaggtacccatcgaggacagcgtcggcgccctcgccgacctggtgaaggccggcaagatccgccacatcggtctcagcgaagcctcggcggaaaccctcgagcgtgcccaccgggtgcacccgatcagcgcgttgcagagcgagtactcgctgtggacccgcgatccggaggacaccggggtgctcgccgcctgccgtcgcctgggcatcgccttcgtcccctacagcccgctgggccgaggtttccttaccggcaccctgaagcgcccggaagacttcgccgccgacgactaccgtcgtttcagcccgcgcttccagggcgagaacttcgcgaagaacctgaagctggtggacaaggtcggcgaactggccgcagccaagggcgtgaaaccctcgcaactggcgctggcctgggtgctggcgcagggcgatgacctgatcccgattcccggcaccaagcagcggcgctacctggaggagaacgtcgccgcgacggaattgcgcctgagcgcggcggaactggccgagctggatgcgatcttccccgccgaggcggtcgccggcagtcgctatagcgaggaaggcatgcgcctggtcaatctctga

SEQ ID NO: 30203 - DNA, 936 bp, Pseudomonas aeruginosa
atgaacgaacagacctggatgctcttcggcgggatcggcgcgctgctgctgctcgcctcgctggtcggcttcgtcctcaagtggcgcgccggtcccggcccgaacgcggtgatcgacaacctgaacgcgcggatcaacgcctggtgggcgatggtcctggtgatcggtttcgccttctggcttggccaggcggcggtgatcctgctgttctatggcgtgtcgttctacgccctgcgcgagttcatcaccctcaccccgacccggcgcagcgactacccggcgctggtggcggcgttctacttcgtgctgccgatgcagtacctgctgatctacatcgactggtacagcatgttctcgatcttcatcccggtgtacgtgttcctgctgttgccgatcctcgcctcgctgggcggcgacaccaagcacttcctcgagcgcgcctcgaaagtgcagtggggcctgatgctggcggtgttctgtatctccttcgtgccggcgctgctgaccctcgacatccccggcttcgaggggcgcaacctgctgctgatcgcctacctggtgatcgtcgtgcagctctccgacgtgatgcagtacatctgcggcaagctgttcggcaagcgcaagatcgctcccaacctgtcgccgtcgaagaccgtcgaaggcttcgtcggcggcatcgccctggccaccgccatcggcgcctcgctgtggtggatcaccccgttcaacctctggcaggcggcgttgatcgcgctgctgatcaacctgctgggcttcttcggcggcctggtgatgtcggcgatcaagcgcgaccgtggggtcaaggactgggggcacatgatcgaaggtcacggtggcatgctcgaccgcctggactcggtgtgcttcgccgcgccgatcttcttccacgtggtgcgctactggtggacgccctga

SEQ ID NO: 30204 - DNA, 1314 bp, Pseudomonas aeruginosa
gtgctctggctgctgttcctcggcccgttcttcttcgccagctatggcctggccaactggttgaccagccagcgcggcgacgtcggcagcctggtcttcgactgggaacgcgggatgccgctgtggccctggaccatcctgccgtactggtcgatcgacctgctctacggcctgtcgctgttgttgccgcgggacaagcgcgagctggacacccactgcctgcgcctgctcagcgcccaggtgctgtcggtgacctgcttcctgctgttccccctgcgcttcaccttcgaacggccggaactgggcggcgtgttcggctggctgttcgacgtgctgatggggttcgacaaaccgtacaaccaggcaccgtcgctgcacatcgccctgctggtagtgctctgggtctgctacgcgcgctacgccagcggcgcctggcgctggctgctgcatggctggttcgcgctgatcgggctgtcggtgctgaccacctggcagcaccatttcatcgacgtgcccaccggcgcgctggccggttggctgtgcgtctggctgtggccgcaggcgcagcccgcgccgttcgcccgcgccagtctgagccgcgaccggcaacggcggcggctggccgcttgctacggcctcggcgcgctggcctgcgccgccgtcgcctttgccgtcggcggtgcggcgttgtggctgtgctggccggcgctggcgctggcgctggtggcgctgaactacctgctgttcggcgccgccggcttccagaagggcagcactggccgcctgagcgccgccgcgcgctggctgctggcgccatatctgcttgccgcgcggatcaacgcctggctctggacccgtcgccggccgcagccggacgaggtgctgccgggcctctggttggggcgcctgccgtcgtccgcggaactggccgacggccgcttccgcgcattgctcgacgctaccgccgaactttcctgcgagccgcaggggctggcctatcgcagcctgccgttgctcgacctggtcgcgccggacgtcgaggactgccggcgcgccgcggtgctgatcgacgaactgctggcgcaagggccgctgctggtggcctgtgccctgggctattcgcgcagcgccacgctggtcgccgcctggctgctgctcagcggccgcgcggcggacgtcgagtcggccgtggccgtgttacgtcgggcgcgaccgcaagtgctgctgggcgaggcccagcggcggaccctcgcggcgctgagcggaagcgtgccggagccatcggcggaactgggcgaggtgcgccatgcctga

SEQ ID NO: 30205 - DNA, 1761 bp, Pseudomonas aeruginosa
atgcgcgacgtacaggaattgcgtttcaccacccacgacggggtagagctcttctaccgccactggccggccagccgcccggcgccggacggcacgcgccaggcggtgctgctgttccaccgcggccatgagcactccgggcggatcgcccacctggtcgacgaactcgacctgccggaacacgacttcttcgcctgggacgcccgtggccacggcctctcgccaggcgcccgcggcgacagcccgagctttgccaccagcgtgcgcgacgtacagaccttcgtcgaccatatccaggccgtccacggtatcgccgaagagcggatggcggtggtggcgcagagcgtcggcgcggtgctggtttccacctgggcccacgactacgcgccgaaggtgcgcgcactggtgctggcttcgccggcgttccaggtcaagctctacgtgccgttcgcccgcagcgggctgaaactgatgcgcctgtggcgcggcaatttcttcgtcaacagctatgtcaaggcacgcttcctcagtcacgacccggagcggatcgcctcctacgacagcgacccgctgatcgccaaggcgatctcggtgaacgtcctgctcggcctctacgaagctgccgagcgggtggtagcggacgcacaggcgatccagattcccacccaactgctgatttccggggccgacttcgtcgtccatcgtgcgccgcaggagcgcttcttcgagcgtctcggcagcctgcgcaaggaaaagcacatcctgcccggcttcttccacgacacccttggcgagcgcgatcgtcacctggccgtcggccgtgcccggcgcttcctcctcgaggcattcgccacggcacctgaacgaccgagcctgcttgatgccgaccgcctgggtcatacctgcgccgaggccgaggcgctggccgcgccgttgccgaagaactcgccgcgcgatctctactggcgcgccacccgtgccgggctgcgcctgggcagcctgtggtcggacggggtcaagctgggcttcgacaccggcttcgattccggcagcaccctcgactatgtctaccgcaaccagccctgcggcagcggcccgctgggtcgcctgatcgaccgcaactacctggactccatcggctggcgcggcatccgccagcgcaagctgcacgtcgaggaactgctgcgcctggccatgcagcggttgcgcgaggagcagcgcgaggtgcgcatcgtcgacatcgccgccggccacggccgctacatcctcgaagccctgcaaggcgtcgagccgctgccggaaagcatcctcctgcgcgactacagcgagatcaacgtgcgtgacggcagcgccctgatcgaaagcaagggcctcgccggcatcgcccgcttcgtcaagggcgatgccttcgatcgcgccgacctggcggcgctgcaaccgaagccgagcctcggggtggtttccgggctctacgagctgttcgccgacaaccgcatggtcggcgactccctcgccggcctcggcgaggcgctggaggagggcggctacctggtctacaccggacagccctggcacccgcagctggaactgatcgcccgcgcgctgaccagccaccgccagggccaggcctgggtgatgcggcgccggacccaggcggaaatggaccagctggtggccgccgccggcttccgcaagatcacccagcgggtcgaccagtggggcatcttcagcgtatcgctggcgcagaaggtcgcccgctga

SEQ ID NO: 30206 - DNA, 3666 bp, Pseudomonas aeruginosa
gtgaaggcgctgaagatcaccttgctggccatagtcgggctgctcctcgcgttgctcctgggactcgctgcgctgctcggcacccagaccggcagcgcctggctgctcggccgcgtgccgggcctgcaggtcagcggcttcgagggtcgcctcggtggcgcctggcaggcacagcgactgtcctgggcgcaggacggtacgcaactggtcgtcgagcggccggaactgcgctggtcgccggcctgcctggcggggctgcgcctgtgcctgcagcgggtggccgccgaacgggtcgcgctggacctgccgccgagcggcgacagcgccgacagcgggccgatcagcctgccgacgctgaaactgccgctgagcatcgagctcggcgaagtggcggtcggcagcttcctgctcgacggcaaccagcaggtcgccgaactcaagctggcggcccattggctggccgacggcctgcacatcgactcgctgacggcgcggggcttcggcctggacctggcgctccaggggcgcttgcagccgagcggcgactggcccttgcaggccgaagccacgctcggcctgcccgctcccgaaggcaagccgtggaagctggccgtccaggtcggcggtgagctgcagcaggcgctgaccctgaaaggccgcagcagcggttacctggacggcagcctggaaggacagttgcaggcgctggcggaaaacctgccggcacgattgctgatccgcgccgacggtttcaagggggcggccggactaccggacaccttgaccctgaatgccatccagctcgatgccagcggcgatctcaagagcggttacctgatccgcggcggcgccagcctgccgggcgagggcggggcggtggcgttgagcctggacgggcgggtcgacgcccagggcgcggatatccgccaactgcgcctggacgctggcggcgagcagcgcctggagctggtcggacgcctggactggcgcgaaagcctggccgccgacgcgaccctggactggaaggatttcccctggctgcgcctgtatccgctggcggagccgccgccggtgacgctgaagaccttcaaggcggaagtgcattaccaggaccagcgctacctgggcaatttcagcgcggcggcgagcggtccggcgggcgacttcacgctggccagcccggtgtccggcgacctcgtccagctcaacctgccgtcgctgcagctccgcgccgggcaaggccaggccgaggggagggtgacgttgcgtttcgacaatggcgtggcttgggataccgccctgcagctcagcgaactgaacccggcttactgggtcgccgagctgccgggttcactggccggtcccttgcgtagccagggaagtgttcgcgacgagcggctggcgttgggcgtggatctcgacgtcaagggccgcctgcgcggccagccggcgctattccaggcgcgcgccgaaggcgaggggcagcgctggacgctgggcaacctcgacctgcgcctgggggataacaaggttcagggcagcggggcgctcgaccagcgcctgcaaggccgcctggacatcgccctgaaccgtctcggccagctttggccgcaactcttcggtcgcctcgacggacgcctcgacctggctggcagcctcgcggcgccgcaaggcaggctgaacctcaagggacagcagatcgcctacgccgagcagcgcatcgccggcctcgacctgcaggcgaacctcgatgcccggcagaacggcaccctggcgctggtcgcttccggcctgcgcagcggcgaaaccgacctcggcctgttcaaggccaatgcccgcggcgaccaacgccgccagcaactggaactggacctgcaaggtgccttgctcaagctcggcctggccttcgacgggcaactggagcgcggcaactggcgcggtcgcctggcgcgcggcgagttgagcagtggcggccaggactggaagctacagcagccggcgcgcctggagcggttggccgacggcagggtcaatttcggcgcacattgctgggtatccggcgccgccagcctctgcggcggcgagcagcgcctgctgcccgagccgcggctgcgctacaccctgcgcgacttcccgctggacagcctgaagcaatggttccccgaggacttcgcctggcagggcaagctgaacggcgacctgcaactggacgttccggcccgcggcccgagcggcgtggtcagcctggacgccggcagcggtacgctgcgcctgcgcgaccagggccagtgggtcgacgtcggctacgacagcctgcgcctggagagccggttggcgcccaaccgcgtcgatacctccctcgacttccgcggaccgaagctcggcgagttgcgggtgcaggcgcagatcgacccgcgcccggcgagcaagccgctgagcggcgagttcagcctggccggcctcgacctgtcgctggcgcgcccgttcgtgccgatggtggagaaactgcaaggcaggctgaacggcagcggccggctgtccggcggcctgctggcgccgcgggtcgacggacgggtgacgctgagcgacggcaacattggcggcggcgagctgccgaccagcttcgagaacctttccctcgacgctcgcatcgctggcgaaagcctggaactcggcggcggctggcgcagcggcaggtacggccagggcagcctgtccggcaacctgagctggggcgacgcgctgaacgtcgccctgaacatccgtggcaaccgcctgccggtggtggtcgatccctatgcgcaactggaggtggaaccggacctgaagatcggcatggccgggcaggagctggcgatctccggcaaggtcctggtgccgcgtggcgacatcaccatccgccagttgccgccatccacggtcaaggtctccgacgacgcggtgatcgtcggctccgagcagcccgcgcagcggccgctgaagatgaagatggacatcgatgtcgaggtcggccaggacaagctggcgttttccggcttcggcctcagcgccgaactggccggccacctgcacatcggcgacaacctggatacccgcggcgagctgaacctgaacaagggccgctatcgtgcctacggccagcgcctgacgatccgtagggcgcggctgttcttcgccggaccgatcgaccagccgtacctggatatcgaggcgatccgccgggtcgacgacgtggtcgccggcctgcgcctgaccggcagcgccgagcagccgaccagcgcggtattctccgaaccggcgatgagccaggagcaggcgctgtcctacctggtgctggggcggccgatgagcaccggcgaagacagcaacatgctcggcgaggcggccctggccctgggcctggccggtagcgcaccgctcaccggggaaatcgccaagcagctcggcatccaggacttccagctggacaccgagggcaccggcaacagcaccagcgtggtcgccagcgggaatatcaccgacaagctcagcctgcgctatggtgttggagtgttcgaaccggcaaataccatcgccttgcgctaccagttgaccaaacgcctctatctcgaagcggcgagcggcctggccagttcgctggacctgttcttcaagcgcgatttctga

SEQ ID NO: 30207 - DNA, 1044 bp, Pseudomonas aeruginosa
atggcagctctgcatgcatttctcaccgaaccgttcctcggtacggctacctggttctggctggccttcctggccatcgtcatcgttctcctggtcctcgacctcggcgtgctgcaacgcgaccaccacgaaatcggcgtgcgcgaaagcctgctgctgtccgccggctacttcgcctgcggcctggccttcggcggctgggtctggtacgccttcggccccaccagcgcggtggagtactacaccggcttcctggtcgaacagtcgctatcgatggacaacgtgttcgtcatggcgatgatcttcagtttcttcggcatcccccgccgctaccagcaccaggtgctgttctggggcatcctcggcgccatcgtcctgcgggcgatcatgatcggcctgggcgccgcgctggtgaaggagttcgactggatcatgtacgtgttcggcgccttcctgctgttcagcggcgtgaagatgctgttcaacaagcacgaggaagaacccgacctcgagcacaacccggtgctgcgcttcctgcgcaagcacatgcgggtgaccaaggaactgcacgagcatcacttcttcgtccgcctgccggacgccagcggcaagctggtgcgctacgccaccccgctgttcttcgccctggtgctgatcgagctggccgacctggtgttcgcggtggacagcgtgccggcgatcttcgccatcacccaggacccgttcatcgtctacacctcgaacatcttcgccatcctcggcctgcgcgccctgtacttctcgctggcggcgatgatccaccgcttcgtctacctgaagtacgccctggccctggtgctggtgttcatcggtgcgaagatcatgctccacggtgtgatcggcaagattcccgccggcctctcgcttggcgtaaccttcggcctgctggcgggcggtatcctgctctccctgctgaagacccgcacgccgaaagccaccgtcgaggacaaggccgaaccgaatgccgaacacgctctggatcgaacgtctggacacccacgctga

SEQ ID NO: 30208 - DNA, 1488 bp, Pseudomonas aeruginosa
atgctacagacgctgaaacagaactggttctccaacctccgcggcgacctgctcgccggcctggtcgtcgcccttgcgctgatccccgaggccatcgccttctccatcatcgccggggtcgacccgaagatcggcctgtacgcctccttcagcatggcggtggtgatcgccttcgccggcggccgtccgggaatgatctccgccgcgactggcgccatggcgctgctgatggtcaacctggtgaaggaccacggcctgcaatacctgctggcggcgaccctgctctgcggcgtgctgcagatactcgccggctacctgcgcctgggttcgctgatgcgcttcgtctcgcgctcggtggtgaccggtttcgtcaatgccctggcgatcctcatcttcatggcccagctacccgaactcaccgatgtcggctggccggtctacgcgatgaccgccgcgggcctggcgatcgtctacggcttcccgcacctgccacggatcggccggctgctgccctctccgctggtatgcatcctggtcctcaccggcatatccatctacctgggcctggacatccgcaccgtcggcgacatgggtcagttgcccgacagcctgccgctgttcctctggccggacgtgccgctgaacctcgacaccctgctgatcgtcctgccctactccgccgccctggcggtggtcggccttctggagtcgctgatgaccgccaccatcgtcgacgagatgaccgacaccggcagcgacaagaaccgcgaatgcaagggccagggcctggcgaacatagccaccggcctgctcggcggcatggctggctgcgcgatgatcggccagtcggtgatcaatgttaaatccggcgggcgcagccggctctcgaccctggtggccggcgtcgcgctgctgctgatggtggtgttcctcagcgactgggtcgggcggattcccatggcggccctggtggcggtgatgatcatggtatccatcggcaccttccgctgggagtcgatccgcaacctgaagcgctacccgctatcgaccaacctggtcatgctggtgacggtcggcgtggtcctcgccacccacaacctggccttcggcgtggtcgccggcgttctcctggcctcgctgttcttcgccaacaagatcgggcactacctcgatatcgacagcgaacgctccgccgacggcacccgccgccactaccaggtgagcgggcaggtgttcttcgcgtcgtccggcaggttcgtcgctgccttcgacctgaaagagacactggagcatgtgctcatcgacctgcgccacgcccacctgtgggacgtcaccgccgtcgcggcactggacaaggtggtcctgggctttcgccagcgcggcgtgcaggtcgacgtgctgggcctgaacgccgccagcgcgaccctggtcgatcgcttcggcgcctacgacaagccgggcgccgtggacattctctccgatcactga

SEQ ID NO: 30209 - DNA, 1608 bp, Pseudomonas aeruginosa
atgaacattcggcagagaatcctcgcttcgggcgccatcggcatcgtggctgtggtgctgctaggcggggtcggcttctgggggcaattgcggttgggcaaggcgctgtcggagaacgagctgagcgtcaatgcgctgcgcaaccacatggaaggcgacatgatgcacgacgccttgcgcgccgacgtcctggcggcgttcgtggtccagcccggcgacggcgcggcggccgagcaggtccgccaggacctgcaggagcacagccagtggtttcgcaaggtggtcgagcagaaccaggggctgcctctcaacgacgccatccaccaggcgctggtcgagttgcggcccgacctggaagcctacatcggcgccgccgagagcatcgtcggcaaggcgttgcttgatcccgtggcggcgcgggccgagctgccgcagttcgtccaggccttcaaggagctggaagggcgcaacgaagcgctcagcagcctgatcgagaaacacgtcgagcagaccaaccgggcgcgcgaagacagcatgcgctattccgcctggatgctcgcgggcggcatcctggtcgcctgcctggtccttggacagctctgtcgccagttgctgcgcgccgtcctgcagccgctgcgcaaactggtctcatcggcccgggtgatcgcccagggcaacctgcaggagccgatcggcgtcgacagcaatgacgaggccggccagttgcagcgggcgttgggcgagatgcaggagaacctgcggcagatgatcaccatcatccgccaggaaagcgaagaactccacgacacctcccaatccatcggccagacctcgcagtcgatcgtccacggcgccagccaacaggccgacagcgccaccagcatggccgcgagcatggaagagatgatcaccaatatctcgcagatttccgaccacgccgacaacgccagggtgatctcggccaagtccgaggagctggccagcagtggcgggcaggtgatcctcaacgtggtggaagggatgagccgcatcgccgacgtggtcaaccagtcctccaccagcatcaccgctctcggccagtcgtcggacgagatccattcgatcatccaggtgatcaaggggatcgccgagcagaccaacctgctggcgttgaacgccgccatcgaggcggcgcgggccggagaggccgggcgcggtttcgccgtggtcgccgacgaggtacgcgggctggcggcgcggaccacccagtcgacccaggagatcaccgcgatgatcgagcgcatccgcgccagcacggggcaagcgatcaacagcatggaggccggcgtgagccgggtcaacgagggggtgtcgttcgcccgccaggcaggggtgtcgatcaacgagattctcgatggaacccgtcatgccgcgtcggtggtcgatgagatttcccagaccatccgcgagcagtcgcgcgccagtgatgaaatcgcccagcgcgtggaactcatcgcccagcgttcgcagcagaacacccaggcgatgcacgagatggccgccaccgccaggcgcctgaacgaggttgcagcgaccatgcgctcgtcggtggagcgcttcaagatctga

SEQ ID NO: 30210 - DNA, 1029 bp, Pseudomonas aeruginosa
atgagcccgtccgaaaacatccagtacgatttcgagtggcgaccactcaacaactacctcgccgtgcaacgcatcacgcctccggacatgcgtcagggttcggctgccgagccgcgcctgcccagcgaagcgctctacgagtggatcgtgctgaacggacgctcccccctggaaggcctgagcctgggggagcactaccgcctttccgactacggcgtcgccgggctggcattgcagagtgccggcaccgtgggcgaagccttgcaactgatcaagaccaacatgctgctgttccgcaaggatatccgcgggatcgcggtgcgacgttccagttgcgacaccgtggatgtggatatcgacctgcaggacaagccggactggccgcagtcggcccggctgtatcacgccaacgtcctggcgtcggccgcctacgcggtgttccgcgacctgctgctgggcgagctggaactggtccgcctgcgcctcccggaaaggaacggcgacgtgcgggcatacgaggagtatttccgggtgccggtgtatttcgccggcgcaggcatcaccttcaccctccccgaggaattgctcgaggccgagatcgccactgccaactccgccgtgttccaggcctcgctggcgctcggcagcaaggccttcaacacccgcgtcacccgcgagatgggcggctaccgccaacgcatcgtggcactgctggaggtgctacaggaccgctacccgagcatcgcctgggtcgcccggcagttgaaggtcaccgagcggacgctgcgccgacggctcgccgacgagggcaccaactaccgggaagtgctcgacctggtccgccacgacagggcgcgccaactgctgcgggacgagcgactgcgcatcgaggaagtcgccgagaggctgggctacatggatacctccagttttcgccacgccttccgtcgctggacgggacagtgcgccaacgactatcgccaggcccgcctcgccggcaagaccgcgcggcgccagggcgaacgctag

SEQ ID NO: 30211 - DNA, 306 bp, Pseudomonas aeruginosa
atggccacgaccctccacgtactgtcccgctcgccgttcaatgacggccgcctgggcagttgcctgtacctgctcaaccccggcgacggcctgctgctctgcggcgacgccgtgcacgccctgctggccggcagccacgcctgccaggccctggaactgatgccggcggaaatcgaactgttcgccctgctggaagacctccaggcgcgcggtatcgaggacgtccccgctcgcctggtggcggtggactaccccggcttcgtcgaactcgccacccgcttcgacaaggtcaacagttggctatga

SEQ ID NO: 30212 - DNA, 1398 bp, Pseudomonas aeruginosa
atggatttcctgccgctgttccactccttgcaagggcgcctcgcgctggtggtcggcggcggcgaagtcgccctgcgcaaggcgcgcctgctggccgacgccggcgcgcgcctgcgcgtggtcgcgccgcagatccacatcgaactgcggcatctggtggagcagggcggcggcgagctgctcgaacgcgactaccaggacggcgaccagcccggctgcgccctgatcatcgccgccaccgacgacgaaccgctgaacgccgaggtgtcgcgagcggccaatgcgcgcgggataccggtcaacgtggtggacgcgccggccctgtgcagcgtgatcttcccggccatcgtcgaccgttcgccgctggtggtggcggtctccagcggcggcgatgcgcccgtgctggcgcggctgatccgggccaagctggaaacctggattccctcgacctacgggcaactggccggactcgccagccgcttccgccaccgggtcaaggaattgctacccgacctgcagcagcgccgggtgttctgggaaaacctgttccagggcgagatcgccgagcgtgtcctggccggccgtccggcggaagccgagcgtctcctggaggagcacctggccggcggcctcgcgcacatagccacgggcgaggtatatctggtcggggccgggccgggggatccggacctgctgacgttccgtgccctgcgcctgatgcagcaggccgacgtggtgctctacgatcgcctggtggcgccgtcgatcctcgaattatgccgccgcgatgccgaacgcctgtacgtcggcaagcgccgcgccgaacatgcggtgccgcaggatcggatcaaccgcctgctggtggagctggccagccagggcaagcgcgtgctgcgcctgaagggtggcgacccgttcatcttcggccgcggcggtgaggaaatcgacgaactggctgcccacggcatacctttccaggtcgtgccgggaatcaccgcggccagcggctgcgcggcctacgccgggattccactgactcatcgcgatcatgcgcaatcggttcgtttcgtcaccggtcatctgaaggacggcaccaccgacctgccgtggcaggacctggtagcgcctggccagaccctggtgttctacatgggcctggtgggattgccggtgatctgcgagcaactggtcgcccacggtcgctccgcacagaccccggcggcgctgatccagcaggggaccaccgcccagcagcgggtattcaccggaaccctggaaaacctgccgcaactggtggctgagcacgaagtgcatgcgccgaccctggtgatcgtcggcgaagtcgtgcaactgcgcgacaagctggcctggttcgaaggcgcccgcgaggacgcctga

SEQ ID NO: 30213 - DNA, 1281 bp, Pseudomonas aeruginosa
atgctcgatcccaaactggtacgcacccagccgcaagaagtggctgcccgcctggccacccgtggcttccaactggatgtcgcacgcatcgaagcgctggaagagcagcgcaagtcggtacagacccgtaccgagcagctgcaagccgagcgcaacgcgcgttccaaggcgatcggccaggccaagcagcgtggcgaggacatcgcgccgctgctggccgatgtcgaccgcatgggctccgagctggaggaaggcaagcgccagctggacgccatccagggcgaactggatgccatgctgctgggcattcccaacctgccacacgagtcggtgccggtcggtgccgacgaggacgccaacgtcgaagtgcgtcgctggggcacgccgaagaccttcgatttcgaggtcaaggaccatgtcgccctcggtgaacggcacggctggctggatttcgagaccgctgccaagctttccggcgcgcgcttcgccctcatgcgcggcccgatcgcccgcctgcatcgcgccctggcgcagttcatgatcaacctgcataccgccgagcatggctacgaggaggcctacaccccctatctcgtccaggctccggcgctgcaaggcaccggccagttgccgaagttcgaggaggacctgttcaagatcggccgcgacggcgaagccgacctctacctgatcccgaccgccgaggtttcgctgaccaacatcgtctccgggcagatcctcgacgccaagcagttgccgctgaagttcgtcgcccataccccgtgcttccgcagcgaggccggtgcctccgggcgcgatacccgcgggatgatccgccagcaccagttcgacaaggtggagatggtgcagatcgtcgatccggccacctcctacgaagcgctggaaggcctgaccgccaacgccgagcgcgtcctgcaactgctcgagctgccgtatcgggtgctggcgctgtgcaccggcgacatgggcttcggtgcgaccaagacctacgacctggaagtctgggttcccagccaggacaagtaccgcgagatttcctcctgctccaactgcggcgacttccaggcccggcgcatgcaggcccgctaccgcaatccggaaaccggcaagcccgagctggtgcacaccctcaacggctccggcctggccgtcggccgtaccctggtggcggtactggagaactaccagcaggcggacggctcgatccgtgtgccggaagtcctcaagccctacatggctggcatcgaggtgatcggctga

SEQ ID NO: 30214 - DNA, 1326 bp, Pseudomonas aeruginosa
gtggatctgttccgcagcgagcccgtcgcgcagcccctggcggcacggctgaggcccgcaaacctggacgagtacgtggggcaggaacacctgctggcccgcggcaagcccttgcgcgaggcgctggagcagggcgcgctgcactcgatgatcttctggggcccgccgggagtcggcaagactaccctggcgcggctgctggcgcaggtgtcggacgcccatttcgagaccatttccgcggtgctgtccggggtcaaggagatccgccaggcggtcgaggtggccaagcagcacgcggcgcaatacgggcgccggaccatcctgttcgtcgatgaggtgcaccgcttcaacaagagccagcaggatgccttcctgccctatgtggaagacggcacgctgatcttcattggcgcgaccaccgagaacccgtccttcgagttgaacaatgcgctgctctcgcgggctcgcgtgtatgtcctcaagagcctcgacgaagccgccctgcgcaagctggtgggccgcgcgctgaacgaggacaagggcctcggcaagcgcaagctgaggctgccggaggagagcttccaggttctcctggccgccgccgacggcgatgggcggcgcctgctgaacctgctggagaacgctgccgacctcgccgaggacggcagcgagatcagccccgagctgctgcagaatctgctcggcgatacccgccgacgtttcgacaagggcggcgaggcgttctacgaccagatcagcgcgctgcacaagtcggtgcgcggctccaatcccgacgcggcactctattggttcgcgcgtatgctcgacggcggctgcgatcccctgtacatcgcccggcgggtggtgcgcatggccagcgaggaggttggcaacgccgatcctcgcgccctcggcctatgcctgtcggcctgggacgtgcaggagcgcctgggcagccccgaaggcgagctggcggtggcccaggccatcgtctacctggcctgtgcgccgaagagcaatgcggtgtacagcgcgttcaacgcggcgatgcgcgacgtcgccgaaagcggctcgcgggaagtgccattgcacttgcgcaacgcgccgaccaaattgatgaagagcctcggctatggcgaggaataccgctacgcccacgacgagccggatgcctatgccgccggagaggattatttccccgaggatctggagccgcggcgttactatcaaccggtgccgaggggcctggaactgaagatccgcgacaagctggaacacctggccgagctggatcgcaccagtccccgccaacgcagaaaatcctga

SEQ ID NO: 30215 - DNA, 2436 bp, Pseudomonas aeruginosa
gtgcgcaggaaaaatagcgatttgaaggattcgaccaccgcgagccatgccgccgcatggcgtcagcaactgcattcccgcctgaaggaaggggtcctgatcgcgctgggcgcgctctgcctctacttgtggatggctctgctcacctatgactcggccgatccgagctggagtcactcgagccaggttgaccaggtgcagaatgccgccggtcggctcggtgcggtatccgccgatatcctgttcatgacgctcggctacttcgcctacctctttccgctgttgctgggcatcaagacctggcaggtattccgccgccgcaacctgccgtgggaatggaacacctggctgttttcctggcgcctggtcgggctgatcttcctgatcctggccggctcggcactggcctacatccatttccacgccagcggccacatgccggccagcgcctcggccggcggcgccatcggccagagcctgggccgcgtcgcggtggatgcgctgaacgtgcagggcagcacgctggtgttcttcgccctgttcctcttcggcctgacggtgttcgccgacctctcctggttcaaggtgatggatgtcaccggcaagatcaccctggacttcttcgaactgatccagaacgccttcaatcgctggatgggcgcgcgcgccgagcgcaagcaactggtcgcgcaactgcgcgaggtcgacgagcgcgtcgccgaggtggtggcgccgagcgtgccggaccgccgcgaacagtccaaggccaaggagcgcctgctggaacgcgaagaggccctggccaagcacatgagcgagcgggagaagcgcccgccgccgaagatcgatccgccaccgtcgccgaaggccccggagccgagcaagcgcgtgctgaaagagaagcaggcgccgctgttcgtcgatacggcggtggagggcaccctgccgccgctgtcgctgctcgacccggcggaagtgaagcagaagagctactcgcccgagtcgctggaggcgatgtcgcgcctgctggagatcaagctgaaggagttcggcgtcgaggtcagcgtggactcggtgcatccgggccccgtgatcacccgtttcgagatccagcccgcggcgggggtcaaggtcagccgcatttccaacctggccaaggacctggcgcgctcgctggcggtgatcagcgtgcgggtggtggaagtgattcccggcaagaccactgtcggcatcgagattcccaacgaagaccggcagatggtgcgcttctccgaagtgctgtcgtcgccggagtacgacgagcacaagtccaccgtgccgctggccctgggccacgacatcggcggtcggccgatcatcaccgacctggcgaagatgccgcacctgctggtggccggtaccaccggctccggtaagtcggtgggggtcaacgccatgctcctgtcgatcctgttcaagtccacgccgagtgaggcgcgactgatcatgatcgacccgaagatgctcgaactgtcgatctacgaagggatcccgcacctgctctgcccggtggtcaccgacatgaaggaagccgccaacgccctgcgctggagcgtggcggagatggagcggcgctaccgcctgatggcggccatgggcgtgcgcaacctggctggcttcaaccgcaaggtgaaggacgccgaggaggccggcacgccgctgaccgacccgctgttccgtcgcgaaagcccggacgacgagccgccgcagctgagcaccctgccgaccatcgtggtggtggtcgacgaattcgccgacatgatgatgatcgtcggcaagaaggtcgaggagcttatcgcccgtatcgcgcagaaggcgcgggcggccggtatccacctgatcctggcgacccagcggccgtcggtggacgtgatcaccggcctgatcaaggccaacattccgacccggatcgccttccaggtctccagcaagatcgactcgcgcaccatcctcgaccaggggggcgccgaacaactgctcggccacggcgacatgctctacctgccgccgggcacaggcctgccgattcgcgtacacggcgccttcgtttccgacgacgaggtgcaccgggtggtcgaggcctggaagctgcgcggcgcgcccgactacatcgaggacatcctcgctggcgtcgacgaaggcggcggcggtggcggttccttcgatggcggcgacggctccggcgaaggcagcgaggacgacccgctctacgacgaggcggtacgtttcgtcaccgagagtcgccgggcatcgatctccgccgtgcaacgcaagctgaagatcggctacaaccgcgccgcgcggatgatcgaggcgatggagatggccggcgtggtcaccccgatgaataccaacggctcccgcgaagtcatcgcgccggcgccggttcgtgattga

SEQ ID NO: 30216 - DNA, 219 bp, Pseudomonas aeruginosa
atgtcgaaagaagacagcttcgaaatggaaggtactgtcgtcgacaccctgcccaacaccatgttccgtgtggagttggaaaatgggcacgtcgtcaccgcgcacatctccggcaaaatgcgcaagaactacatccgcatcctcaccggcgacaaggtccgcgtggaactgacgccctacgacctgagcaagggccgcatcacctaccgcgcccgctga

SEQ ID NO: 30217 - DNA, 1257 bp, Pseudomonas aeruginosa
atgggataccaaaagatccaggtgccggcgaccggtgacaaaatcactgtgaatgccgacatgtccttgagcgtaccgaagaacccgatcatcccgttcatcgagggtgatggcatcggcgtcgatatcagcccggtcatgatcaaggttgtcgacgctgcagtggaaaaagcatacaagggcgagcgcaagatcgcctggatggaagtctacgccggcgagaaggccacccaggtctatgaccaggacacctggctgccccaggaaaccctggacgccgtacgcgactacgtggtttccatcaagggcccgctgaccaccccggtcggtggcggcatccgctccctgaacgtggccctgcgccagcaactcgatctctacgtctgccagcgcccggtacgctggttcgaaggcgtgcccagcccggtgaagaagcccggcgacgtggacatggtgatcttccgcgagaactccgaggacatctatgccggcgtcgagtggaaggccggttcgccggaagcggagaaggtcatcaagttcctcaccgaggaaatgggcgtcaagaagatccgcttcaccgagaactgcggcatcggcatcaagccggtttcccaggaaggcaccaagcgcctggtgcgcaaggccctgcaatacgccgtcgacaacgaccgcagttcggtgaccctggtgcacaagggcaacatcatgaagttcaccgagggtgccttcaaggattggggctacgaagtcgcgcgcgatgaattcggcgccgagctgctggacggcggtccgtggatgcagttcaagaatccgaagaccggcaagaacgtcgtggtcaaggacgtgatcgccgacgccatgttgcagcagatcctgctgcgccccgccgagtacgacgtgatcgccaccctgaacctgaacggcgactatctctccgacgccctggcggccgaggtcggcggcatcggcatcgcgcccggcgccaacctgtccgattcggtggccatgttcgaggcgacccacggcaccgcgccgaagtacgccggccaggacaaggtcaacccgggttcgctgatcctctccgcggagatgatgctgcgccacatgggttggaccgaggcggccgacctgatcatcaagggcaccaacggggcgatcgccgccaagaccgtgacctatgacttcgaacgcctgatggacggcgcgaccctgctgtcctgctcggagttcggcgacgcgatgattgccaagatgtag

SEQ ID NO: 30218 - DNA, 1128 bp, Pseudomonas aeruginosa
atgtctgaatccgcccccaccccacgccgcgagcgcgtgatcgtcggcatgtccggcggcgtcgactcgtccgtctccgccctgctcctgttgcagcagggctatcaggtcgaaggcctgttcatgaagaactgggacgaggacgacggcaccgaatactgtaccgcccgcgaggacctggccgacgcccaggccgtctgcgaccggatcggcatcaagctgcacacggcgaacttcgccgcggaatactgggataacgtgttcgagcacttccttgccgagtacaaggccggccgtacgccgaacccggacatcctctgcaaccgcgaaatcaagttcaaggcgttcctcgactacgcgctgatgctcggcgcggacctgatcgccaccggccactatgtgcggcgccgcgaccgcgacgggcgcaccgagctgctcaagggcctggacccgaacaaggaccagagctacttcctgcacgcggtgggcggcgagcagatcgcccgcagcctgttccccgtcggcgaactggagaagccggaagtccgcgccatcgccgagaagcatggcctcgccacggcgaagaagaaggactccacgggcatctgcttcattggcgagcgacgcttcaccgatttcctcaagcagtacctgccggcccagccgggcgacatcgagaccaccgaaggcaaggtcatcggtcgccacagcggcctgatgtaccacaccatcggccagcgccagggcctcggcatcggcggtctcaaggaagccggcgacgatccctggtacgtgctcggcaaggacctgcaacgcaacgtgctgctggtcggccagggcaacgaccacccgctgctgttctcccgcgccctgctggcctcgcgaatctactgggtcaacccggtcgaactggagcggccgcgccgcctgcgggccaaggtgcgctaccggcagagcgaccaggactgcgtcctggagaaaaccgccgaaggctaccgcgcggtgttcgacgaaccgcagcgcgcagtgaccccggggcaatcggtggtgttctacgacggcgacgtctgcctcggcggcggcgtgatcgaaacggcggaagcctgggatttcggaggacgcccgtga

SEQ ID NO: 30219 - DNA, 1371 bp, Pseudomonas aeruginosa
atgcagctttcctcgctcaccgcggtatcccccgtcgatggccgctatgccggcaaaaccagcagcctgcgtccgatcttcagcgaatacggcctgatccgtttccgcgtcatggtggaagtccgctggctgcagcgcctcgccgcccacgccgggattcccgaggtcgcgccgttctccgccgaagccaacgccctgctcgacagcctggccagcgacttccagctggaacacgccgaacgcatcaaggaaatcgagcgcaccaccaaccacgacgtgaaagccgtggagtacctgctcaaggaacaggccgccaagcttccggagctggccgcggtcagcgagttcatccacttcgcctgcacctccgaggacatcaacaacctgtcccacgccctgatgctccgcgagggtcgcgacagcgtgctgctgccgctgatgcgccagatcgccgaggccatccgcgaactggcggtgaaactcgccgacgtgccgatgctctcccgcacccacggccagcctgcctcgccgaccaccctgggcaaggaactggccaacgtcgtctaccgcctggagcggcagatcaagcaggtcgccggcatcgagttgctgggcaagatcaacggtgccgtgggcaactacaacgcccacctgtccgcctatcccgaagtcgactgggaagccaacgcgcgccagttcatcgaaggcgacctcggcctgaccttcaacccctacaccactcagatcgagccgcacgactacatcgccgagctgttcgatgcgatcgcccgcttcaacaccatcctcatcgacttcgaccgcgacgtctggggctacatctccctcggctatttcaagcagaagaccgtggccggcgagatcggctcctcgaccatgccgcacaaggtcaacccgatcgacttcgagaactccgagggcaacctcggcatcgccaacgcgctgttccagcacctggccagcaagctgccgatctcgcgctggcagcgcgacctgaccgactccaccgtgctgcgcaacctcggcgtcggcatcgcccacagcatcatcgcctacgaggccagcctgaagggcatcggcaagctggagctgaacgcccagcgcatcgccgaggacctggacgcctgctgggaagtcctcgccgagccggtgcagaccgtgatgcgtcgctatggcgtggaaaacccctacgagaagctgaaggaactgacccgcggcaaaggcatcagcgccgaagccttgcagactttcatcgaagagctggcgattcccgccgaggccaaggtcgagctgaagaagctgaccccggccggctacgtcggcaatgccgccgcccaggccaagcgcatctga

SEQ ID NO: 30220 - DNA, 357 bp, Pseudomonas aeruginosa
gtggaactcttcaaagaattcaccttcgaatccgcccatcgcctgccccacgtccccgaaggccacaaatgcgggcgcctgcacggccactcgttccgtgtcgccatccacatcgaaggcgaggtcgatccgcataccggctggatccgcgacttcgcggaaatcaaggcgatcttcaagccgatctacgagcaactcgaccacaattatctgaacgatattccaggcctggaaaaccccaccagcgaaaacctctgccgctggatctggcaacaactcaagccgctgttgccggaactctccaaggtccgcgtccacgaaacttgcaccagcggttgcgaatatcggggcgattga

SEQ ID NO: 30221 - DNA, 1308 bp, Pseudomonas aeruginosa
atgatccgcgttcgaccggtcggccgcctggcccttttcctggcgctgggcggcacctcgccgtgccacgccgcgacagaggaagccaaggcacccgactacctggagtggcgcctgctcaaccgcaactacttcctctacaacgactatcgccgcgcggacgccgggcgcggctaccgcaaggaatgggcacacggcctgatcgtcgacctggagtcggcctatactcccggccgcgtcggtttcggcctcgatctccacggcttcgccggcttcaagctcgacggcggacgtggccatgccggcaccggcctgttgccgctggactcatccggcgataacgccagcgagtattccgacgccggcgccgcactcaagctgcggctcggcgagagcctgctcaaggtcggcgagatgaccgtcgagaccccggtcttcgataccagcgacaagcgcctgcaaccccagtacgccaggggcttcttcctgcagagcgacgacctcgaccgcgtgcggatccaggccgggcgcttcaccgccttcaaggaacaggcctccagctccggccatggcgacttcgacggctacggcgcgagcaccgccggcagcgccatcggcttcgccggcgccagcctggcggccagcgacaacctgagcggctcgctgttcgccgcgcaactggacaacgtctggcgccaggtctatctcaacatgaacctgcaacgtgccgcgttcagcctggatggcaacctctatcgcacgcgcgaccagggccgcagccgggccggcgcgatcgacaccctggcctacagcctgcaactgaagtaccgcgtcggcgcgcagggtttctccctggcctaccagcgtgtccatggggatacgccgttcgacttcgtcggaggtgactccatctacctcgccaactcgatcaagtacgccgatttcaacggtccgggcgaacgctcctggcaggcccgctacgacctcgacctggccccgttcggcctgccggggctgagcttcatggcgcgttacgtcagcggccgcgccatcgacggcagccatgcgccggccggcggcgcctacaacccactgggcgccgatggccgctaccggcccttgcagggcagcggcggcaagcactgggagcgcgacctcgacctgcgctacctgttcgcctcgggcccgttcaaggacctctcgctgaacgtctcgcacctcagccaccgggccaacgcggcccaggccggcgacgacatcgaccgcctctacctgatcgtcgaatacccactcaaaggctcgctctga

SEQ ID NO: 30222 - DNA, 975 bp, Pseudomonas aeruginosa
atgagccgcatcttcgcagacaacgcgcagtccatcggcaacacgccgctggtccagatcaaccgcatcgccccgcgcggcgtcaccatcctggccaagatcgaagggcgcaaccccggctattcggtgaagtgccggatcggcgcgaacatgatctgggatgccgaagccagcggcagactgaagtccggcatgaccctggtcgagccgacctccggcaacaccggcatcggcctcgccttcgtcgccgccgcacgcggctacaaactgatcctgaccatgccggcgtcgatgagcctggagcgacgcaaggtgctcaaggcgctgggcgcggagctggtcctgaccgaaccggcgaagggcatgaagggtgcgatccagaaggccgaggaactggtcgcgggggatcccgggaagtacttcatgccgcagcagttcgacaacccggccaacccggcgatccatgagaagaccaccggcccggagatctggaacgataccgagggcgcggtggacgtgctggtctccggggtcggcaccggcggcaccctcaccggcgtctcgcgctacatcaagaacacccggggcaagccgatcctcgccgtggcggtggagccggtgacctcgccggtgatcagccagaccctcgccggcgaggaggtcaagcccgccccgcacaagatccagggcatcggcgccggcttcgtgccgaagaacctcgacctgtcgctggtcgaccgggtcgagaagatcggcgacgacgaagcgaagaacatggcgctgcgcctgatgcaggaagaaggcatcctctgcggcatctcctccggcgcggcgatggccgccgcggtgcgcctggccgaggagccgaacatgcagggcaagaccatcgtggtgatcctccccgattccggcgagcgctatctttcgagcatgctcttcgacggcctgttcagcgaacaggaactgacccagtaa

SEQ ID NO: 30223 - DNA, 3441 bp, Pseudomonas aeruginosa
atgaaacccaccgataccagcgagaaggcactggagcaattgatcgtgcgccacctggcgggtatcagcgagcatgcttccgttcctccaaatgccgtacagagtccgggggccatctatgcactgggcggctacgtactgggccgagcgacggatttcaaccgcgatgtggcgctggataccgtgcaactgctggcctttctgcaagccacgcagcctgatgcggtggaaacgctggagttggcgcacgagggcatcaagcgcacacagttcctgcatcgcctgcaaggcgagatcaccaagcgcggtgtggtggatgtgctgcgcaagggcgtaagccatgggccggtgagggtcgatctctacaggctgctgcccacgccgggcaacaccaacgccgccgaggcctttggccggaacatcttcagcatcacccggcaggtacgctacagtcacgactccggcaacgaactcgacctggtgatcttcgtcaacggcctgccggtgctgaccttcgagttgaagaactcgctgaccaagcagaccgtggccgatgccatcgtccagtaccagagcacacgcagcccgcaggagctgctgttccagccggggcgctgcatcgcgcacttcgcggtagacgatgccgaggtgtatttctgcacggagctgaagggcaaggcgtcgtggttcctgccattcaaccagggctggaacaacggtgcgggcaacccgcccaaccccaacggcttgaagaccgattacctgtggaagcaggtgctggccaaggaatcgctggccaacatcatcgaaagcttcgcgcaggtggtggaggagcaggaaaccgacgccaccacagggcggaagaagaaaaagcgcaagccggtgtttccccgcttccaccagttgcgcaccgtgcgcgccctgctgcgccgcactcgcagcgacggtgtgggcaagcgttacctgatccagcactcggcaggtagcggcaagagcaacaccattgcttggctggcgcaccagttggtggagttgcgcagcgtagccgaccctttgatgccgcagttcgattccatcatcgtcatcaccgaccggcgtgcgctggatacgcagatcgcgcgcaccatcaagggctacgaccatgtggcttcgattttcggccattccgacaacgcgcaggaactgcgcgactacctgcgccggggccggaagatcatcgtgaccacggtgcagaagtttcccttcatcctcgaagaaatcggcgacctgtcgggcaggacgttcgcgctattgatcgacgaggcgcactccagccagggcggcaagaccacggccaggatgcatgaagccctttccggcaagaccgacgaggaggctttcgaggaagacgcgacgcaggacgcggtgaacaccgagatcgagaagcgcattcagtcgcgtcggatgctgtccaacgccagctacttcgccttcaccgccacgcccaagaacaggacactggaactgttcggcgagaagaccgtggtggacgacaaggtggaattccgctcgccagaggaactgacctacaccaccaaacaggcgatacaggagggtttcatcctcgacgtgattgcccactacaccacgctggacagtttctaccaggtcgccaagacggtggagaacgatccggacttcgacaaggccagggccttgaaaaagatccgccactacgtcgaatcccacgacaaggccatccggcgcaaggcggagatcatggttgatcacttcgtcgcacaggtgatgggcgccaagaagatcggtggcaaggcgcgggcaatgatcgtctgcaatggcattgcacgggccatcgactactggcgcgaggtgtcggattatctcgaacagatcaagagcccgtacaaagccatcgtcgcgtactcgggcgagttcgagattggcggcgaaaagaagaccgaggccgacctcaacgatttcccgagcaaggagattccggacaggctcaggcaagacccgtatcgctttctgatcgtcgccaacaaattcgtcaccggcttcgatgagccgctgctgcatacgatgtatgtggacaagaagctggcgggcgtacaggcggtgcagacgctatcgcgcctgaaccgagcgcacccgcaaaagcatgacaccttcgtgctggacttcgccgacaacgccgaagctgtgaagaaggcgttccaggactactaccgcgctacgatccagaccggtgaaaccgatgccaacaagctgcatgacctgaaagccgatctggatgacaagcagatctacagctggccgcaggtagaggacttggtggcgctgtatctcagtggtgccgaccgcgacaaactcgatcccatcctcgatcactgcgtcgagcaataccaagccaatctggacgaggacaaccaggtcgagttcaagggcaaggccaaagcctttgtacgcagctacggcttcctcgccgcgatcctgagctacggccatccggcatgggagaagttgtcgatcttcctgaatttcctgatcccgaagctgcccgcgccgaaggaagaggatctgtcgaagggtgtactcgaatccatcgacatcgacagttaccgtgttgaagcacgggctgcactcaagatggcgatggacgataccgacgccacagtcgaagtggctccggtcggtggcggtggcggcaagggcgagccggatatcgacaagctgtcgaacatcctcaaaaccttcaacgatcttttcggcaacatcgactggaaggatgccgacaaaatcggcaaggtcatcgccgaggaaattccggtgcgcgtggcgcaggacaaagcgtatcagaacgcgcaggtcaactccgaccgccagaacgccaagttggagcacgacaaggcactcaaccgggttgtgctggagctgctgtccgaccacacagaattgttcaagcagttcagcgacaacccgaatttcaaacgctggctgacggacatggtgttcgatgtgacgtaccagcagaaccctgcccatggggtagaggatgtccgtatgcgtgcgttggacattgttcgagacagattcgatgctgcggtggtctggtcacaagccgtggatatgctactggatagattggcagcgggaggaaggaacagtctgggtattgccgatctcgccctcatcgaagaaaccagcgggttgtcggtaagccatgttctgtttcccgttctgaatctgttatcggcccacgatgtcggaatcctgaatcgagagtttgtccgtgtaggcagcacggatactccacagacgatgagtttcgacgaagtgcgcttattggcgcagaaagatccggagggcgacgactgggccgaatgcctgtcgattcgttgggcgcttcaagatgcacagaggattgcgcatgggcgatag

SEQ ID NO: 30224 - DNA, 1296 bp, Pseudomonas aeruginosa
gtgctgcgtaatggacggttgtttggccatcgcgtggaaaccggctttcctgatctgcctattctggaagtgtcgctgcgcaccggtgtgcgggtgcgcgatatggacaacctgaagcgcaagcaggtcatgagccagaaggagaagtacaagcgtgccgtcaagggtgacattgcctacaacatgatgcgcatgtggcagggcgcggtcggccccgtgccggaggatggcttggtcagccctgcttatgtcgtagtcaagccctatgcagaagccaacagcacctatttcagctacttgttccgcactgcggcttacatgcaagaggtgaacaagttctctcgtggcatcgtggctgaccgcaaccgtctgtattgggaatccttcaagcagatgccatcgctggttccgccgcgccctgagcaagaccagatcgtcacctacctgcgtacgcaggacgcgcatatcgcctgcttcatcagggccaagcgcgatctcattgcgctgctgaccgaacagaagctgcgcatcatcgaccacgccgtcacgcgtgggctagatgcgtcggtcaagctcaaaccttccgatatcgagtggctaggcgaggtgccagcacattgggaagtgaagcgtctgaagttccttgccggcaacatcaccagccagaccacgacgaaggcggatgacgaaatttatctcgcattggagcacgtccaaagctggacgggtgtggcgcgaccgctcggcggcgaagtcgaatttgcgagcacggtgaagcggtttgttgcagacgatgtactgttcggcaagctccgtccgtacttggcgaaggtaacgcgagtggtttgtgctggtgtatgcgtaagtgagtttctcgtactacgttctcgccaagaactcatcttgcccgcatatcttgaacaactactgcgctgcaagcgtgtcattgacctaatcagcagttcgacggcgggtgcgaagatgccacgcgccgattggaacttcatcggcaatgttcggcttccgattcctcgcaaagatgaacaggaagcgatcctgtcgcacatagggcgcgagacgaaagacttggacgaaaccatcgcccgcgccgaggacgagatcaagctcatccgcgaataccgcgaccgcctgatcgccgatgccgtcaccggtcaagtagacctgcgcggctggcagcccggcccggacgatgtggtgagcgacgacgaccttgccgcgttgggagatgatgacgcaggtagtagcgatgacgaggaagccgatgctgaagactga

SEQ ID NO: 30225 - DNA, 2379 bp, Pseudomonas aeruginosa
atgcagaaacgacagcaagaccaaagccagatcaagtgggtcgccgatttcatctggaatatcgctgacgaccgtctgcgcgacgtctacgttcgtggcaagtaccgcgatgtgatcctgccctttaccgtgctacggcggatcgatgcagtgctggaaccgaccaaacaggcagtcttggaacgcaagaagctgctggacagcgccaaagtggcgaatcagaacggcgcgctccaggccgctgccggacaagccttctacaacgtttccgagttcaccttggccaagctcaaggccagtgctgccgggcagcggctgcgcgaggacttcatcgcttatctggacggtttctcgcccaacgtgcaggaagttctcaccaagttcaatttccgcaaccagatccagaagctggtggatgcccatatcctcggctacctgatcgaagacttcctcgatcccgaggtcaatctctcgccgctgccggtcaaggatgccgacgggcgcaccaagctgcccgcgctcgacaaccatggcatgggtacggtgttcgaggagttgatccgccgcttcaacgaagagaacaacgaagaggccggtgagcacttcaccccgcgcgacgtcgttcaactcatggccaagctgctgttcctaccagtggccgaccggatcgagtccagcacctattcgctgtacgacggctcttgtggcacgggcggcatgctcacagtggccgaggaagccttgaaggaactggctgagcagcacggcaaggacgtctccatccatctgttcgggcaggaaatcagtgatgaaacctacgccatctgcaaggccgacctactgctgaaaggcgaaggggcggaagcggagaacatcgtcggcggggcggataaatccacgctatccgccgatcagttccgttcgcgcgaattcgacttcatgatttccaatccgccctacggcaagagttggaagaccgatctggagcgcatgggcggcaagaaggagttcagcgacccgcgctttatcgtcaatcacggcggcgatgccgagttcaagctcatcactcgctccagcgacgggcagctcatgttccaggtgaacaagctgtccaagatgaaacatgacaccgcgctcggcagccgcatcgccctcgtccacaacggctcggcgctattcactggcgacgctggccaaggcgaaagcaatatccgccgctgggtactggagaacgactggctggaagccatcatcgccctgccgctcaacattttctacaacactgggatcgccacctatatatgggtgctggccaacaaaaaagctgagcatcgcaagggcagggtgcagttgatcgacgcgagccagtggttcgcgccactgcgccgcaatcttggcaagaagaactgtgagctggcagagggcgacatccggcgcattctcgacctgtatttgggcgaagcgcaggaaaccgactccagcaccgatcaaagcaaatggttcgacacgcaggacttcggctactggaagatcacggtcgaacgcccactgcgcctgaagagccagttgaaaaccagcgccattgataccctgcgtttcgccagtggcgacgaggagttgcgcaccgagatctacgccgagcatggtgacaagctctacaccagctttgccaaactgaagcccgaaatcgaagcttggctcaagggtggcagcgaggacgatgatgatgccgaggacggcgacgaagaaggcacacacgcgaagaaagccgtgccagaaaagcgtcgcaagaggctgctcgatgccacgacctggcaacgcgacaaggggctgctcgatctggcgctgctggcgcagaaggttttgggtgacgccgtattcgatgaccacaatgtctttcgggcggaattcgatatagcgatgaaggcacatgacaaaaagctcactgcggcagacaaaaaagccatcttcaaggcggtgagctggcgtgacgacaccgcgccgccagtggtggccaagcggcacaagctgaaagccagcgacgccttcattccgagtttcgatggccgctacttcatcgaaacgggcaagcaccgcgaagtcgtctggtatgaaccggatgccgatctgcgcgacaccgagcaagtgccgttgaaggaacttggtggcatcgacgccttcttcgagcgcgaagtgctgccgcacgcgccggatgcgtggatcgacggcgagaagacccagatcggctacgaaatctccttcgcccgctacttctataagccgacgccgctgcgtccgctggacgacatccgcgccgatatcctgaagctggagcagcagacggaaggtttgttgcacaagatcgtggggacagcttga

SEQ ID NO: 30226 - DNA, 2379 bp, Pseudomonas aeruginosa
atgaaattcagtgaaaagtggctgcggagctgggcaaatccgcaggtttcccatgacgagctggtcgctcgcctgtccatggtcggcctcgaggttgacgccgacctgccggtcgccggcgccttcagcggcgtggtggtcggcgaggtgctctcgaccgaacagcatccggacgccgacaagctgcgcgtctgccaggtcagcaacggcagcgagaccttccaggtcgtctgcggtgcgcccaacgtgcgcgcgggcctgaagattccgttcgccatgatcggcgccgaactgccggacgacttcaagatcaagaaagccaagctgcgcggcgtcgagtccttcggcatgctctgctcggccaaggaattgcagatcagcgaagagaacgccggtctgctcgagctgccggctgacgcgccggtcggccaggacgtccgcacctacctggagctggccgactacaccatcgaggtcggcctgaccccgaaccgcggtgactgcctgtcgctcgccggcctggcccgcgaagtcagcgccatctacgacgttccgctggcgccggtggcggtggacgcggtcgccgcgcagcacgacgagacccgtccggtcgaactcgccgcgccggctgcctgcccgcgctacctcggccgggtgatccgcaacgtcgacctgagccggccgaccccgttgtggatggtcgagcgcctgcgccgttccgacatccgcagcatcgacccggtggtcgacgtcaccaactacgtgatgatcgaactgggccagccgatgcatgccttcgaccttgccgagatcaacggcggcgtgcgcgtgcgcatggccgaggacggcgagaaactggtcctgctcgacggtcaggaaatcaccctgcgcgccgacaccctggtgatcgccgaccaccagcgcgccctggccatcgccggggtgatgggcggcgagcacagcggcgtcagcgacagcacccgcgacctgttcctcgaagccgcgttcttcgacaccatcgccctggccggcaaggcccgctcctatggcctgcacaccgactcctcgcatcgcttcgagcgcggcgtcgacagccagttggcgcgcaaggccatggagcgcgcgacgcgcctgatcctcgacatcgtcggcggtgaaccagggccgatcgtcgagcaggtcagcgaagcgcacctaccgaaggtcgcgccgatcaccctgcgcgccgagcgcgtgacccagatgctcggcatgccgctggacgccgccgagatcgtgcgcctgctgcaagccctggaactaacggtggtagccgacggggaagggcagtggtcggtcggcgtaccgagccatcgcttcgacatttccctggaagtcgacctgatcgaggaactggcccgtctctacggatacaatcgcctgccggtgcgctacccgcaggcgcgcctggcgccgaacaacaagccggaagcgcgcgccgcgctgccgctgctgcggcgcctgctggtcgcccgcggctaccaggaagcgatcaccttcagcttcatcgatccggccctgttcgaactgttcgatccgggcacccagccgctgaccctggccaacccgatctccgccgacatggcggcgatgcgttccagcctctggccgggcctggtcaaggcgctgcagcacaacctcaaccgccagcagtcgcgggtccgcctgtttgaaagtggcctgcgcttcgtcggtcaactggaaggcctgaagcaggaagccatgctcgccggcgccatctgcggcaagcgcctgccggaaggctgggccaatggtcgtgacggcgtggacttcttcgacgccaaggccgatgtcgaggcagtgctggccagtgctggtgccctcggcgacttcagcttcgtgcccggcgagcacccggcgctgcacccggggcagaccgcacgcatcgagcgggaagggcggctggtcggctacctgggtgcgctacatccggaattggcgaagaaactcgacctcgagcagccggtgttcctcttcgagctgctgctggccgaagtggtcgacggccacctgccgaagttccgcgagctgtcgcgcttccccgaagtgcgccgcgacctggcgctgctggtggatcaggacgtgccggcacaagacatcctgacacaaatccgtgcggcggccggcgaatggctgacggacctcaggctgtttgatgtgtatcacggtaaaggcattgatccgcatagaaaaagccttgccgtcggcttgacctggcagcatccatcgcgcactcttaatgacgatgaagtcaatagcacgacgcagaacatcgtcacgtcgttggaagaaaggttcaatgccacgttaaggaaatag

SEQ ID NO: 30227 - DNA, 1017 bp, Pseudomonas aeruginosa
atggaaaacctggatgcgctggtctctcaagcattggaggctgtgcgacacaccgaagacgtcaatgccctggagcagatccgggttcactacctcggcaagaaaggcgaactgacccaggtgatgaagaccctgggcgacctgccggccgaagagcggccgaaggttggcgcgctgatcaacgtggccaaggaaaaggtccaggatgtgctgaacgcgcgtaagaccgagctggaaggggccgcgctggccgcccggctggccgcggagcgcatcgatgtcaccctgcccggtcgtggccagctgagcggcggcctgcatccggtcacccgcacgctggagcgcatcgagcagtgcttcagccgcatcggctatgaagtcgccgaaggcccggaagtcgaagacgactaccacaacttcgaagcgctcaacattccgggccaccacccggcgcgtgccatgcacgacactttctatttcaatgcgaacatgctgctgcgtacccacacctcaccggtgcaggtgcggaccatggagtcccagcagccgccgatccgcattgtctgcccggggcgcgtctaccgctgcgactccgacctgacccactcgccgatgttccaccaggtggaaggcctgttggtggacgagggtgtcagcttcgccgacctcaagggcaccatcgaggaattcctccgcgccttcttcgagaagcagcttgaagtgcgcttccgtccgtccttcttccccttcaccgagccctcggccgaagtggacattcagtgcgtgatctgcagcggcaacggctgccgcgtgtgcaagcagaccggctggctggaagtcatgggttgcggcatggtgcacccgaacgtgctgcgcatgtccaacatcgatcccgagaaattccagggcttcgccttcggcatgggcgccgagcgcctggccatgctgcgctacggggtgaacgacctgcgtctgttcttcgataacgatctgcgcttcctcggacaattccgctag

SEQ ID NO: 30228 - DNA, 552 bp, Pseudomonas aeruginosa
atcattattaagcgtgaaatgagacaggataagcgagctcaaccgaaacccccgatcaacgagaacatctcggctcgtgaggtacggttgattggagctgatggccagcaggttggtgttgtttcgatcgatgaggcgatccgcctagccgaagaggcgaagctggacctggttgagatttcggccgacgcggtgcctcctgtctgccgcatcatggactacggcaagcacctgttcgagaagaagaagcaggctgcggtcgccaagaagaaccagaagcaggcgcaggtcaaagaaatcaagtttcgtccagggacggaagaaggggattaccaggtaaaactacgcaacctggtacgtttccttagtgaaggggacaaggccaaggtatccctgcgattccgcggccgtgagatggctcaccaggagctggggatggagctgttgaagcgggtcgaagccgacctcgtggagtacggcaccgtcgagcagcatcctaagctggaaggacgccagctgatgatggtcatcgctcccaagaagaaaaagtaa

SEQ ID NO: 30229 - DNA, 1923 bp, Pseudomonas aeruginosa
atgcccatcattactcttcccgacggcagtcaacgttccttcgatcacccggtctccgtggccgaggtggcccaatccatcggcgcgggcctggccaaggcgaccctcgccggcaaggtcgacggccgcctggtcgacgcctgcgacaccatcgatcgcgacgcgaccctgcagatcatcacgcccaaggacgaggaaggactggagatcatccgccactcctgcgcccacctggtcggccatgcggtcaagcagctctatccgaccgcgaagatggtcatcggcccggtgatcgaggaaggcttctactacgacattttcttcgagcgccccttcacccccgaggacatggcggcgatccagcagcgcatgcgcgagctgatcgacaaggactacgacgtgatcaagaagatgaccccgcgcgccgaggtcatcgagctgttcaagtcccgtggcgaagactacaagctgcgcctgatcgacgacatgccggacgagaaggccatgggcctgtacttccatgaggagtacgtggacatgtgccgcggcccgcatgtgccgaacacccgcttcctcaaggcgttccaactgaccaagatttccggcgcctactggcgcggcgactcgaagaacgagcagttgcaacgcatctacggcaccgcctgggccgacaagaagcaactggcggcctacatccagcgcatcgaagaggccgagaagcgcgaccatcgccgcatcggcaagcagctcgacctgttccacctgcaggaagaagcgccgggcatggtgttctggcacccgaatggctggagcgtctaccaggtgctcgagcagtacatgcgcaaggtccagcgcgaccatggctatgtcgaagtgcgtaccccgcaggtggtcgaccgcatcctctgggagcgttcgggccactggtcgaactacgccgagaacatgttcaccacctcctcggaaagtcgcgactacgcggtcaagccgatgaactgcccgtgccacgtgcagatcttcaaccagggcctgaagtcctaccgcgacctgccgctgcgcctcgccgagttcggcgcctgccaccgcaacgagccgtccggcgcgctgcacgggatcatgcgcgtacgcggctttacccaggacgacgcgcatatcttctgcaccgaagagcaggtgaagaaggaagcggccgatttcatcaagctgaccttgcaggtctaccgcgacttcggtttcaccgacatcgccatgaagctgtcgacccgtccggccaagcgcgtcggttccgacgagctgtgggatcgcgccgaaggcgcgctggccgatgcgctgaacgaatccggcctggcctgggaataccagccgggcgagggcgcgttctacgggccgaagatcgagttcaccctgaaggactgcctcggccgtaactggcagtgcggcaccctgcagtacgacccgaacctgccggagcgcctggacgccagctatatcgccgaggacaacaaccgtaagcgtccggtgatgctgcaccgtgcgatcctcgggtccttcgagcgcttcatcggcatgctcatcgagcactacgccggagccttcccggcctggctggcgccgacccaggcagtggtgatgaacatcaccgacaagcaggccgatttcgccgccgaggtggtgcggatcctcggggaaagcggattccgtgccaagtccgacttgagaaacgagaagatcggctttaaaatccgcgagcatactttgctcaaggttccctatctcttggttattggagatcgggaagttgaatcgaaggccgtcgcggtgcgtacgcgcgaaggggaagacctgggctccatgcccgtcacccagttcgctgagctgttggcacaggcggtttcccggcgtggtcgccaagactcggagtaa

SEQ ID NO: 30230 - DNA, 714 bp, Pseudomonas aeruginosa
atgctttcccgtttgtttgtaggccttttcgccctcctcctcgccagcgccggccaggccaacgccccgcgcacgttctccgaagcgaagaaaatcggctggaagctctacgcccggcaatccgtggagttctactgcggctgtcgctactcgggaaatcgtgtcgacctcgccagttgcggctacaagccgaggaagaacgccaaccgcgcgcggcgcatcgagtgggaacacatcgtcccggcctgggtgatcggtcaccagcggcgctgctggcagaacggcgggcggagcaactgcgcgaggcacgacagcacctaccagcgcgccgaggccgacctgcacaacctggtgccgagcatcggcgaggtcaacggcgaccgcagcaacttcggcttcggctggctgccgcagaaaccccagcaatacggcgcctgcccgatggtggtggacttcaaggcgcgcaaggcgatgccacgcccgcagattcgcgggatgatcgcccgcacctacttctacatgagcgaccgctacggcctgcgcctgtcgaagcaggatcgccagctctacaacgcctggcacaagcagtacccgccacagacctgggagcgccagcgcaaccacatggtcggctgcgtgatgggctggggcaatccctatgtcggcccggtggacctggcaacctgcagcaacctatcctcgcgtcgacgctga

SEQ ID NO: 30231 - DNA, 999 bp, Pseudomonas aeruginosa
atgcgcccagaaccgaccaacgcccccgccgccctctcacgccgcttctccgttgcgccaatgatggactggaccgatcgccactgccgcttcttcctgcgccagttgtcccgtcacaccttgctctacaccgagatggtcactaccggcgcgttgctgcacggcgatcgccagcgcttcctccgctacgacgaatgcgagcacccactggcgctgcaactgggcggcagtgtgccggcggaactggcggcctgcgcgcggctggcggaagaggccggctacgacgaggtcaacctcaacgtcggctgccccagcgaccgggtccagcacaacatgatcggcgcctgcttgatggggcatccggcgctggtggctgactgcgtgaaggcgatgctggatgcggtggagatagcggtgacggtgaagcaccgcatcggtatcaacgggcgcgacagctatgccgagctctgcgatttcgtcggccaggtgcgcgaggccggctgccggagcttcaccgtgcatgcgcggatcgccatcctcgaagggctctcgcccaaggagaaccgcgaggtgccgccgctgcgctacgaggtcgcggcgcaattgaagaaggacttcccggacctggagatcgtcctcaacggcggcatcaagaccctcgaggcctgccgcgagcacctgcagaccttcgacggcgtgatgctcggtcgcgaggcctaccacaacccctacctgctggccgcggtggacagccagttgttcggcagcgaagcgccgccgctcagtcgcagcgaggccttgctccgtctgcgtccgtacatcgagcgacaccaggccgaaggcggcgcgatgcatcacgtgacccgccatatcctcggcctggcccagggcttccccggctcccggcgattccgccagttgctctcggtggacgtgcacaaggccgccgatccgctgcgggttttcgaccaggcgctggaacttctggcggggcgatag

SEQ ID NO: 30232 - DNA, 924 bp, Pseudomonas aeruginosa
atgacttcgaagctggaacaactcaagcaatacaccacggtggtcgccgacaccggcgacttcgatgccattgcccgcctgaagccggtggacgccaccaccaacccgtcgctgctgctcaaggccgccgccctgccgcgctacgccgagcaccttcgacaggctaccgcaggtagcggcggcgacgccggactggcttgcgaccgcttcgccgtggcagtcggcaaggacatcctcggagtcattcccggacgtatttccaccgaagtcgacgcgcgcctgtcgttcgacagcgaggccaccctcgcccgcgcccaccgcctgatcgagctgtacgacgaacagggcatcgaccgcgagcgggttctgatcaagatcgcctccacctgggaaggaatccgcgccgccgagattctggaacgcgagggcatccagaccaacctgaccctgctgttctccttcgcccaggcggtggcctgcgccgacgccggggtgttcctcatctctccgttcgtcgggcgcatctacgactggtacaagaagagcgagaaccgcgactacgccggcgccgaggatcccggcgtgcagtcggtctcgcgcatctatcgctactacaaggccaacggctacaagacggtggtgatgggcgccagcttccgcaatctcggccagatcgagcaactggccggctgcgaccgcctgaccatcagtcccgacctgctgcaacaactggctgacgcccagggcgagctgccgcgcctgctgctgccgggcgaaggcgagccgcgccaggtgctcgacgagagcgctttccgttggcagatgaacgaggacgccatggccaccgaaaagctggccgaaggcatccgcctgttcgcacgcgaccaggaaaagctcgaataccagttggcgacccgccactga

SEQ ID NO: 30233 - DNA, 705 bp, Pseudomonas aeruginosa
atgcgcgcccgcggcgtgaactggatcgaacgtagtgcccgaatcctggcttgcgccagcctcgcattggcacccacgctgtccctggcggccagtgaagaagacccttgggaaagcatcaaccgtcccatcttcaccttcaacgacaccctggacacctatgcgctgaaaccgctggcccagggttaccagaaggtcaccccgaacttcgttcaggacggcgtgcacaacttcttcaacaacctcggcgacgtgaagaacctggccaacaacctgttgcaggccaagttccacaatgccggcgtggacaccagccgcctgctgttcaacagcaccttcggcctggccggcttgatcgacgtggcgaccccgatgggcctgcagcgcaacgatgaggacttcggccagaccctgggttattggggcgtcggcagcggcccgtacgtgatgctgccgttcctcggcccgagcacgctgcgcgatgccccggcgaagatcccggacatctatgtcagtccctaccactacatggacgacgtacgcgcgcgcaacgtgatgttcggcatcaataccgtcgacacccgtgccaacctgctgaagtcggaaaaactgatcagcggcgacaagtacatcttcatccgcaacgcctacctgcagaaccgcgagttcaaggtcaaggacggcgaggtggaggacgacttctaa

SEQ ID NO: 30234 - DNA, 720 bp, Pseudomonas aeruginosa
atgccggtcgatcaatctcgtcagtacctgcgcatccgcgaccagctcgccgcggatatcgcccagggtgtgctgcaagtgaaacttccctccgagcgggagttggccgagcgcttcctgtgtacccgcatcacccttcgcgaagccctgcagcaattggaaaccgaaggcctggtctatcgcgagaaccgccgcggctggttcgtcgcgccgccgcggatccgctacaacccgacccgtaccaccggcttcatggaatacgtcagcgcccagggacgccagccgcgtaccgagacgctgcacgccgagcggcgtgcagccggcgcctggctggccaagcggatggggctggaggacagcgcgccggtgtatttcctgcaacggcgccgctgggtggacgagcgtccggtgctgatcgaactgatcgccctggatgccgggtggtgcccaggcctgctggaccacgacctcgatacttcgctgatgagcctgctgcgcgagcgtttcggcctgcagccgacgcgctgccaactggcgatgcacccgaccgcgctgaacgcggcccaggccgagccgctgcaactggcgccgggttcgccggcgctgtacctggagcgactgagttacgcggaggggcagagggtggtcgagttcgaccaggagttctggcgcccggacgctctggagatcgtgctcgacgcggcctatccgggcgcctga

SEQ ID NO: 30235 - DNA, 1332 bp, Pseudomonas aeruginosa
atgagcgccgggttcggctcgcggatgtccctcggcgtccgcctgagcctgctgttcgccgcctgcacggcggcggtctcgctgatcgccggattgatcttcagcagggccatcgacgagcatttcgtcgagctcgaccatatggcgatgtccgccaagctcgcggtgtttcgcgatgagctgcgcggcctcggctcggaacaacagatgcgccgccgcgaagcggaactgctgcgcgaactggcacgccatcccgacctcggcctgcgcctgaacggcccggatggcaacctctggttcgagcgcctgccgcagcctgcgcatcccggcctgcccgccaaccgcgaactcggcgccccgctggagcccggcaacgacgcttcgccgcgactcaccgtgatcctcgacatcagtcatcaccagcacttcctgcaacgcatgcgccagttgatctggctgaccatgagcctgtcggcgctggccacggcgctgctcggcgcctgggccaccggcgccagcctggcgccgctgcgacggatgcgcgaagtcgccgcgcgggtttccgccaactccctcaccacccgcctcgacgccagccggatgccagaggagctgcgcggactggccggcgagctgaacgccatgctggcgcgcctggaagaagccttccagcgcctctcggcgttctccgccgacatcgcccacgagttgcgcaccccgctcaccagcctgctgacccagacccaggtggtactgtcccgcccgcgctcgctggaggactatcgcgaggccctgcacggcaatctcgaggaactggaacggctcaccgcgatggtcaacgacatgctgttgctggccaaggccgaccacggcctgctggcgcccagccgccaggccctggacctgggcgcggaagtcgactcgctgctggagttctaccagccgctggcggaagaccgcgacatccgcctgctgcgcgaaggcagcctgagcctgcccggcgaccgcggcatgctgcggcgggtgctggccaacctgctggacaacgccctgcgcttcaccgccgatggcggcgagatacgtatccgtctcggcgaccgacgcctgagcgtggagaaccagggtccggcgattcctcccgagcgcttgccgcgcctgttcgaccggttctatcgtgccgatccggcgcgccgcgaaggccagggtgaacacgccgggctcggcctggcgatctgccgctccatcgtccaggcccacggcggcgagatccgctgcgagtctgccgacggctggacccgtttcgtcatcgatttcgctcgcccgcgccgatga

SEQ ID NO: 30236 - DNA, 1704 bp, Pseudomonas aeruginosa
atgggtctttgcggatgtatacgaggcaaacccatgactcaggaaaccgtcggcttcgccgcgctcggtattcaccccaatgtgctcgcggcaatcgtcgccgtaggctacgaagagccttcgcctatccaggctcaatcgattccgctgatcctcgaaggccacgacatgatcggccaggcgcagaccggtaccggcaagaccgccgcgttcgccctgccgctgctgtcgcgcatcgacccgagccgccgcgagccgcagatgctggtgctggtgccgacccgcgagctggccctgcaggtcgccaccgcctgcgaaacctattccaagcaattgccgggcgtcggcgtggtcgccgtctacggcggcgcgcccatggggccgcagctgaaggccctgcgccagggcgcacagatcctcgtcgctacccccggccgcctgtgcgaccacctgcgccgcgacgagaagctgctggccaccgtccaacgcctggtgctcgacgaagccgacgagatgctcaagctcggcttcatggacgacctggaagtgatcttcgaggcgcttcccgaatcgcgccagaccgtgctcttctcggcgaccctgccggcgtccatccgtggcatcgccgagcgccacctgaagcagcccaagcacgtcaagatcgccgccaagacccagaccgtggcgcgcatcgagcaggtccacctgatggtccatgccgaccagaaggccggttcgatccagcgtctgctggaagtcgagcagttcgacgcgctgatcgccttcgtccgcaccaagcaggccaccctcgactacgccgaattgctcgagcgccagggctaccgcgccgccgcgctcaacggcgacatgccgcaggcccagcgcgagcgggtcatcgagtcgctgaaggacggttcgctggacatcgtcatcgccaccgacgttgccgcccggggcctggacgtaccgcgcatcacccacgtgctgaacatcgacatgccgtacgaccccgagtcctacgtgcaccgcatcggccgtaccggccgtgccggccgggaagggcgcgcgctgttgctggtgactccgcgcgagcggcgcatgctgcaggtgatcgagcgggtcaccgggcagaaggtcggcgaagtccgcctgccggatgccgagaccgtgctggaggcccgcctggcgcgcctggccgcgagcctgacgcccttgctcgacagcgccgtcgagcagcgcggcgcggtgcgcgacgagctgtgccgtcgcctcggctgcgatgccgagaccctggccgccgcattgctggcacgcctgaccgccggcaaggcgctggacctggagtcggtgcgccgcgaacagccgctgaccccatcggcaccgcgcgagcgtgccgaccgtggcgaacgcggcgagcgtccggagcgcagcggcgagcgtcgtccgatggcgccgccgagcgaaggccgtgcccgctgccgcactgccctcggcgcgcgcgacggggttgcggcgaagaacctgctgggcgcgatcctcaacgagggcggcctgtcccgcgaggacatcggtcgcatccagattcgcgataccttcagcctgatcgagctgcccgaggccaatctcgagcgcctgctgaccaagctcaaggacacccgcgtcgccggcaaggccctgcgcctgcgccgctatcgcgaggactga

SEQ ID NO: 30237 - DNA, 606 bp, Pseudomonas aeruginosa
atgcgtgcattgctgttgagcggctgcctggccctggtcctgctgacccagcaggccgcggcgcagacgctgttggtcgtgggcgatagtatcagcgccgctttgggactggataccagccagggctgggtcgccctgctgcagaagcgcctcgccgacgaaggttacgactaccgggtggtgaacgcctcgatcagcggcgacacctccgcgggtggcctggcgcgcctgccggcgctgcttgccgaggagaagccggcgctggtggtgatcgagctgggaggcaacgacgggctgcgcggaatggcaccggcgcaattgcaacagaatcttgccagcatggcgcaaaaggcccgggcggaaggagcgaaggtgctgctgctgggtatccagttgccaccgaactacggcccgcgctacatcgaggccttttccagggtctacggcgcggtcgcggcgcaggaaaagaccgccctggtgccgtttttcctcgaaggggtcggcggggtccaggggatgatgcaggcggatggcatccatccggcgctcgccgcccagccgaggctcctggaaaatgtctggccgacgctgaaaccgctgctttga

SEQ ID NO: 30238 - DNA, 786 bp, Pseudomonas aeruginosa
atgacaagaaccctcggcagcatcgccctctccctcctcctcgccgcaccggccggcgccgccgactggacaggcaaggtcctgcgcctgggcgtcgacccgacctacccgccgctcgaatacaagcagccggacggccgcctggcaggcttcggcatcgagatcggcgaagccctctgcgcggagctgcgagcccgctgcgaatgggtcgaaagcaactgggacggcatcatcccggcgctgctgtcgcgcaagatcgacgccatcgtctcgtcgatgaccatcacgccgaaacgcgcacagcacatcgccttcaccgaccgcgtctccaacgcgccgagccgcctggtggtacgccgtggctcggcgctcctgcccgacgccgagagcctgcgcggcaagcgcgtgggggtcggccagggctccaaccaggaggcctacgccaaggccgaatgggccgccaagggggtgcgggtcgtctcctaccagaaccaggaccaggtctacgccgacctcgtcatgggccgcctcgacgcctcgctgcaaggcgcggtgcaggccagctacggcttcctcgacaagccggtcggcaaggatttcgaactggccggagcggtgctggacgaccctcgctacttcggggtcggcgacggcatcggcctgcgcaaggaggacgtggcgctgcgcgaggacctgaacaaggcgctggcgacgatccgcgccaacggaacctacgcgcgaatcaacgcccgctacttcgacttcgacctctacggcacgccctga

SEQ ID NO: 30239 - DNA, 690 bp, Pseudomonas aeruginosa
atgttcctcgacggcttcggcccgcagatactcgccggcaccctggtgaccctgaaactggcgctgggctccctgctcggcgccgtgctcatcggcctcctcggcgccagcgccaagctcgccgccaaccgcccgctgcgcgccctggccagcggctatacgacgctgatccgcagcgtccccgacctggtcatcatgctgttgctgttcttcagcctgcagatcctcctcaaccgcgtcaccgacgccctcggcatcggccaggtcgacatcgacccgttcgccgccggctgcgtcaccctggcgttcatctatggcgcctacttcacggaaaccttccgcggcgccttccaggcggtcccggccggccaggtcgaagccgcgcaagcctacggcatggggcgctggcgagtgttccgccgggtactcctgccgcagatgctgcgctacgccctgccgggcatcggcaacaactggcaggtgctggtcaagtccaccgcgctggtctcgatcatcggtctcggcgacctggtcaaggccacccaggacgccggcaagggcaccctgcagttcttccacttcaccctggtctgcgggctgatctacctggccatcaccgcaatctccaacgccgcgttgctgtggctggagcggcgcagctcgctgggcgtcaggaggccgctgccatga

SEQ ID NO: 30240 - DNA, 591 bp, Pseudomonas aeruginosa
atggcaacgcgaggcaggccacgggcattcgacagggacacagccctgcagcgagccatggacgtgttctgggtgcgtggctacgaaggcgcttcgctggcggccctgaccgaggcgatggaaatcaggccgcccagcctgtacgccgccttcggcagcaaggaagggctgttccgcgaagccctggcccactatctcggccagcacggccgctatcgccgggatgtcctcgatggcgcgccgagcgcccgcgagggcgtggccgagctgctccgcgagaccgtcgcgcgcttctgttccgacgagttcccgcgcggttgcctggtggtgctcgcggcgctgaccggaaccccggaaagcgaggcggtgcgggacgcgttgagcgccgagcgcggcgagtcgatccgcctgttccgtgagcgcatgcggcgcggcatcgctgacggcgacctggcggcggacaccgacgtggaggagttggcgaccttctatgccaccgtgctgttcggcctcagcgtgcaggccaaggaccgggtgccttgcgagcgcctgctggcggtggtcgaacgggcgctgcgcgcctggccctga

SEQ ID NO: 30241 - DNA, 1656 bp, Pseudomonas aeruginosa
gtggaacgcgaatacatggaattcgacgtcgtcatcgtcggcgccggccccgccggtctgtccgccgcatgccgactgaagcagaaggccgccgaagccggtcaagagatcagcgtctgcgtggtcgagaagggttccgaagtgggcgcccacatcctctccggcgcggtgttcgagccgcgcgcgctgaacgagctgttccccgactggaaggaactcggcgcgccgctcaataccccggtgaccggcgacgacatctacgtcctgaagagcgccgagagcgctaccaaggtgcccaacttcttcgtgcccaagaccatgcacaacgagggcaactatatcatctccctgggcaacctctgccgctggctggcccagcaggccgaaggactgggcgtggagatctatccgggcttcgccgcccaggaagcgctgatcgacgagaacggcgtggtccgcggcatcgtcaccggcgacctcggcgtcgaccgcgaaggcaacccgaaagaaggctactacacccccggcatggagctgcgggccaagtacaccctgttcgccgaaggctgccgcgggcacatcggcaagcaactgatcaagaaatacaacctggacagcgaggccgatgcccagcactacggtatcggcatcaaggaaatctgggacatcgacccgtccaagcacaagcccggcctggtggtccataccgccggctggccgctgaacgacgaaaataccggcggctcgttcctctaccacctggagaacaaccaggtgttcgtcggcctgatcatcgacctgtcctacagcaacccgcacctgtcgccgttcgacgagttccagcgctacaagcaccacccggtggtcaagcagtacctggaaggcggcaagcgcgtggcctacggcgcccgggccatctgcaagggcggcctgaattcgctgccgaagatggtcttccccggcggcgcgctgatcggttgcgacctcggcaccctgaacttcgccaagatcaagggcagccacaccgcgatgaagtccggcatgctcgccgccgacgcgatcgccgaggccctggccgccggccgcgaaggcggcgacgagctgtccagctacgtcgatgcgttcaaggccagctggttgtacgacgaactgttccgcagccgcaacttcggcgcggccatccacaagttcggcgctatcggcggcggcgcgttcaacttcatcgaccagaacatcttcggcggcaagatccccgtcaccctgcatgacgacaagccggactacgcctgcctgaaaaaggccagcgaagcgccgaagatcgactacccgaagccggacggcaagctcagcttcgacaagctgtcctcggtgttcctctccaataccaaccacgaggaagaccagccgatccacctcaagctggccgatgcgagcattccgatcgagaagaacctgccgctctacgacgagccggcccagcgctactgcccggcaggcgtgtacgaagtggtggccaacgacgacggcagcaagcgcttccagatcaacgcgcagaactgcgtgcactgcaagacctgcgacatcaaggacccggcgcagaacatcacctgggtggcgccggaaggtaccggcgggccgaactaccccaacatgtaa

SEQ ID NO: 30242 - DNA, 777 bp, Pseudomonas aeruginosa
atgctggtcgattcccactgccacctcgatcgcctcgacctggccgcccatggcggctcgctcgatgcggcgctggatgccgcgcgagcgcgtggcgtcggtcaattcctctgcatcggcgtcagcgccgacaatgcccaggcggtgaaggccctggccgagcgctatgccgacgtgcactgttcggtgggcgtacacccgctggacctggagcccggaagcgcgccagcgctggactggctgctgggcgaactggcgcatccgcgggtggtggcgatcggcgagaccggcctcgactaccactacgaaccggaagccgccgagttgcaacaggaggcgtttcgcctgcacctggaagccgcgcggatcaccgccaagccagtgatcgtgcacacccgcgaggcgcgcgccgacacgctggcgctgctgcgcgaggcggcgttgccgcaggccggcgtgctgcattgcttcaccgaggactgggaaatggcgcgatcggcgctggacttgggcttctacatttccctgtccggcatcgtcaccttccgcaatgccgatgccctgcgcgaggtggctcgccaggtaccggccgaccggctgttggtggagaccgactcgccctacctggcgccgattccccatcgcggcaagccgaacctgccggaatacgtgcgcgatgtcgccgaattcctcgcgacgttgcgtggcgtcagcctggaaaccctggcggagcagactaccgccaatttccatcggctgtttccgttggcccgctag

SEQ ID NO: 30243 - DNA, 987 bp, Pseudomonas aeruginosa
atggctgatatctatccctggcagcaggcgctctggagccaactgggcggccgcgcccagcacgcccacgcctatctgctctacggtcccgccgggatcggtaagcgtgccctggccgagcattgggccgcccaactgctctgccagcggcctgccgccgctggcgcatgcggcgagtgcaaggcctgccagttgctggccgccggtacccatccggactacttcgtgctggagccggaggaggcggagaaaccgatccgggtcgatcaggtccgcgacctggttggcttcgtggtgcagaccgcgcaactgggcgggcgcaaggtcgtgttgctcgaacccgccgaggcgatgaacgtgaacgccgccaacgccctgttgaaaagccttgaagagccgtcgggcgatactgtgctgctgctgatcagccaccagcccagccgcctgttgccgaccatcaagagccgctgcgtgcagcaggcctgccctttgccgggcgcggcggcgagtctggaatggctggcgcgggccctgcccgacgagccggccgaggccctggaggaactgttggcgctttccggcggctcgccgctcaccgcccagcgcctgcacggccagggcgtgcgcgagcagcgcgcgcaggtggtcgagggggtgaagaagctgctcaagcagcagatcgccgccagcccactggccgaaagctggaacagcgtgccgttgccattgctcttcgactggttctgcgactggacgctgggcatcctgcgctaccagttgacccacgacgaggaggggctggggttggccgacatgcgcaaggtgatccagtacctgggcgacaaatccgggcaggccaaggtgctggccatgcaggactggctgctgcaacagcggcagaaagtgttgaacaaggccaacctcaaccgtgtcctgcttctcgaagccctgctggtgcagtgggcaagcctgcccgggccgggctag

SEQ ID NO: 30244 - DNA, 633 bp, Pseudomonas aeruginosa
gtgaccggcctgttcgtcaccctggagggcccggaaggggccggcaagagcaccaaccgcgactacctggccgagcgcctgcgcgagcgcggcatcgaggtgcagttgacccgcgagcctggcggcacgcctctcgccgagcgcatccgtgaactgctgctggcgcccagcgacgagccgatggccgccgataccgagctgttgctgatgttcgccgcgcgggcccagcatctcgccggggtcatccgcccggcgctggcgcgcggggccgtggtgctctgcgatcgctttaccgatgccacctatgcctaccagggcggcgggcgcggtttgccggaggcgcgcatcgccgcgctggaaagcttcgtccagggcgacctgcggcccgacctcacgctggtcttcgacctgccggtggaaatcggcctggcgcgggcggcggcgcgtggccggctcgaccgtttcgagcaggaggaccgacgcttcttcgaggccgtgcgtcagacctacctgcagcgcgccgcgcaggccccggagcgttaccaggtgctcgatgccgggttgccgctggccgaggtgcaggctggcctggatcggctgctgccgaatctgctggagcgtctgaatggctga

SEQ ID NO: 30245 - DNA, 816 bp, Pseudomonas aeruginosa
atgctggactgggtcgacggccggcccgccgccgagctgtccgtgcgcgatcgcggactggcctatggcgacgggctgttcgagaccctggcggtgcgcgccggcacgccgcgtctcctggagcgccacctggcgcgcctggaagaggggtgtcggcgcctggcgatccctctcgacaccgcggcgttgcgccaggagttgctggcgttctgcgcggctctgggcgacggtgtcgccaagctgatcgtcacccgcggcgagggtttgcgtggctacgcgccgcctgccgaggcctcgccgcggcgaatcctctccggatcgccgcgtccggcctatcccgagcgccactggcagcaaggcgtgcgcctgttcgcttgccgcacgcgcctggccgagcagcccctgctggccggcctcaagcacctcaatcgcctggagcaggtcctcgcccgtgccgagtggagcgacgccgggcatgccgaagggctcatgctggacgtgcacgagcgggtagtggagggcgtgttcagcaacctgctgctggttctcgacggcaccctcgtggcgcctgacctgcggcgctgcggcgtcgctggagtgatgcgcgcggaattgctcgagcgcgccgaaggaatcggcgtcccgctggcgatacgggatgtttccatggctgaactggcgacggccgacgaggtctttctgtgcaacagccagttcggcatctggccggtccgggcattggacgagcacgtctggccggtcggcgagctgacccgtaaactgcaagaccaacttcgcgacgacctggatttctga

SEQ ID NO: 30246 - DNA, 1245 bp, Pseudomonas aeruginosa
gtgtcgcgtagacgcgtcgtcattactggcatgggcatgctgtcgccgctgggcctggatgtcccgagcagttgggaaggtattctcgccggtcgcagcgggatcgccccgatcgagcatatggacctgtccgcctattccacccgcttcggtggttcggtcaagggtttcaatgtcgaggaatacctgtccgccaaggaagcccgcaagctcgacctgttcatccagtacggtctcgccgccagcttccaggccgttcgcgattccggcctggaggtcaccgacgccaatcgtgagcgtatcggcgtatccatgggttccggtatcggcggcctgaccaatatcgagaacaactgccgatccctgttcgagcaggggccgcggcgcatctcgccgttcttcgtgcccggttcgatcatcaacatggtttccggcttcctgtcgatccacctgggtctgcaggggcccaactacgccctcaccaccgcctgcaccaccggtacccacagcattggcatggctgctcgcaacatcgcctatggcgaggccgacgtgatggtcgccggcggttccgaaatggctgcctgcggtctcggcctgggtggtttcggcgcggctcgcgcgctctccactcgcaacgacgagccgacccgtgccagccgtccgtgggaccgggatcgcgacggcttcgtcctgtccgacggttccggcgccctggtgctcgaagaactggagcacgcccgtgcccgcggcgcgcggatctatgccgagctggttggcttcggcatgagcggcgacgccttccacatgaccgcgccgccggaagacggcgccggtgccgcccgctgcatgaagaacgcgctgcgcgatgccggcctggatcctcgtcaggtcgattacatcaacgcccatggcacctccaccccggccggcgacatcgccgagatcgccgcggtgaagagcgtgttcggcgagcatgcccatgcgctgtcgatgagttcgaccaagtcgatgaccggccacctgttaggtgccgccggtgcggtggaggcgatcttcagcgtgctggccctgcgcgaccaggtcgccccgccgaccatcaacctggacaacccggacgaaggttgcgacctcgacctggtggcccatgaagccaagccgcgcaagatcgacgtggccctgtcgaactcgttcggtttcggcgggaccaacggcaccctggtgttccgcaggttcgccgactga

SEQ ID NO: 30247 - DNA, 237 bp, Pseudomonas aeruginosa
atgagcaccatcgaagaacgcgttaagaagatcgtcgctgaacaactcggcgtgaaggaagaagaagtcaccaacagcgcttccttcgtcgaagacctgggcgccgactcccttgacaccgtcgagctggtgatggctctggaagaggaattcgagaccgaaatccctgacgagaaagctgaaaagatcaccaccgttcaggaagccatcgactacatcgttgctcaccagcaataa

SEQ ID NO: 30248 - DNA, 744 bp, Pseudomonas aeruginosa
atgagtctgcaaggtaaggtcgcattggtaaccggcgccagccgtggcatcggccaggcgattgcgctggaactggggcgcctgggtgccgtggtcatcggcaccgcgaccagcgcgtccggcgccgagaagatcgccgaaaccctcaaggccaatggcgtcgagggtgcgggcctggtcctggacgtttccagcgacgaatccgtagccgcgaccctggagcacatccagcagcatctcggccaaccgctgatcgtggtcaataacgccggcatcacccgcgataatctgctggtgcgcatgaaagacgacgagtggttcgatgtggtcaacaccaacctgaacagtctctaccgtctgtcgaaagccgttctgcgcggtatgaccaaggcccgctgggggcgcatcatcaacatcggttccgtggtcggcgccatgggcaatgccgggcaaaccaactatgccgcggcgaaggccggcctggagggcttcacccgtgcgctggcccgggaagtcggttcgcgtgccattaccgtgaatgcggtggcgccgggcttcatcgacaccgacatgacccgcgagctgccggaagcccagcgcgaagcgctgctgggccagattccgctgggtcgcctggggcaggcggaagagatcgccaaggtggtcggcttcctcgcttcggacggcgcagcctatgtgaccggggccaccgtgccggtcaatggtgggatgtacatgagctga

SEQ ID NO: 30249 - DNA, 939 bp, Pseudomonas aeruginosa
atgtctgcatccctcgcattcgtcttccctggccagggttcgcaatccctcggcatgctggccgagctgggcgcccagcaggcgctggtgcgcgataccttcgccgaggcctccgaggcgctcggttacgacctttgggcgctggtccagaatggtcctgaagagcgcctgaaccagaccgacaagacccagccggccatccttacggtttcgatcgcgctctggcgcctctggctggccgagggcggtgcgcgcccggcgttcgtcgccgggcacagcctgggcgaatattccgcgctggtcgcggccgaaagcctggcgttcgccgatgcggtcaagctggtcgagcgtaggggccaactgatgcagcaggcggttccggcggggcagggcggcatggccgcgatccttggcctggaagacgccgatgtattggcggcctgtgccgaggcggcccagggcgaggtggtcagcgcggtcaacttcaacgcgccggggcaggtagtgatcgccggtgccgcggctgccgttgagcgtgccatcgaggcatgcaaggcacgcggcgccaagcgcgcggtggcgttgccagtcagcgtgccgtcgcattgcgaactgatgcgtccggccgccgagcagttcgccgcctcggtcgaaagcctgcagtggcaggcgccgaagatttcgctggtgcagaacgtcagcgccgccgtgccggctgatctcgatacgctgcgccgcgacctgctggcacagctgtacagcccggttcgctgggtggagagcatccagctgctggcggaaaagggcgtcaccgagctggtcgagtgcgggccgggcaaggtcctggcaggcctcaacaggcgctgcgcgaagggcatcaatacccatggcctggatggcgtcgaggcgttcgccgccacgcgcgccgccctggcctga

SEQ ID NO: 30250 - DNA, 579 bp, Pseudomonas aeruginosa
atgcccgacctgatcctcgcctccagctccccctaccgacgcgaactcctgacccgcctgcgccttcccttcgaaagcgccagccccgatatcgacgaaagccatcgcgccggggaaagtgccgaggaactggtgcgccgcctttccgccagcaaggccgaagcgctggccggacgctatccgcaacacctggtgatcggctccgaccaggtcgccgtactcgacggcaacatcctcggcaagccgcacacccccgaacgcgccatccagcagctacgggacgccagcggcaagagcgtgaccttcctcaccggactggccctcctcaacagcgccagccgacgcatccaggtggcatgcgtgccgttcaccgtgcacttccgccacctcgacgagagccgcatccgccgctacgtcgaagcggaacgcccgctggactgcgccggcagcttcaaggcggaaggcctgggcgtcagcctgttccgctccaccgaaggagaggacgccaccagcctggtgggactgcccctgatccgcctggtcgacatgctcctcgaggaaggcgtcgaaatcccctga

SEQ ID NO: 30251 - DNA, 3174 bp, Pseudomonas aeruginosa
atgaaaagaatgctgatcaacgcgactcaacccgaggagttgcgtgttgcactggtcgacggccaacgcctgttcgacctcgacatcgagtcgggcgcccgcgagcagaagaaggccaacatctacaaaggccgcatcactcgcgtcgaacccagcctcgaagccgccttcgtcgacttcggcgccgaacgccacggcttcctccccctcaaagaaatctcccgcgaatacttcaagaaatcccccgaaggccggatcaacatcaaggaagtcctgagcgaaggccaggaagtcatcgtccaggtcgagaaggaagagcgcggcaacaagggcgccgccctgaccaccttcatcagcctggccggccgttacctggtgctgatgccgaacaacccgcgcgccggcggcatctcccgccgtatcgaaggcgaagagcgcaacgagctgcgcgaggccctgaacggcctcaacgcaccggccgacatgggcctgatcgtgcgcaccgccggcctcggccgcagcaccgaggaactgcagtgggacctcgactacctgctgcaactgtggagcgcgatcaaggaagcgtccggcgaacgtggcgcgcccttcctgatctaccaggaaagcaacgtcatcatccgcgccatccgcgactacctgcgccaggacatcggcgaagtgctgatcgacagcatcgacgcccaggaagaagccctgaacttcatccgccaggtgatgccgcagtacgccagcaaggtgaagctgtaccaggacagcgttccgctgttcaatcgcttccagatcgagagccagatcgagaccgctttccagcgcgaagtgaagctgccgtccggcggctccatcgtcatcgacccgaccgaggccctggtttccatcgacatcaactcggcgcgcgccaccaagggcggcgacatcgaggaaaccgccctgcagaccaacctggaagcggccgaggaaatcgcccgccagctgcgcctgcgtgacatcggcggcctgatcgtcatcgacttcatcgacatgaccccggcgaagaaccagcgcgccgtggaagagcgtgtccgcgaagccctcgaggccgaccgcgcgcgcgtccaggtcggtcgcatctcgcgcttcggcctgctggaaatgtcccgccagcgcctgcgtccgtccctcggcgagaccagcggcatcgtctgcccgcgctgcaacggccagggcatcatccgcgacgtcgagtcgctgtcgctggccatcctgcgcctgatcgaggaagaagccctgaaggaccgcaccgcggaagtccgcgcccgcgtgcccttccaggtcgccgccttcctgctcaacgagaagcgcaacgccatcaccaagatcgaactgcgtacccgcgcgcgcatcttcatcctgccggacgatcatctggaaaccccgcatttcgaagtccagcgtctgcgcgatgacagccccgaactggttgccggccagaccagctacgaaatggccaccgtcgagcacgaagaagcccagccggtcagctcgacccgcaccctggtccgccaggaagcagcagtcaagaccgtcgctccccagcagcccgcaccgcaacacaccgaagcaccggtcgagccggccaagccgatgcccgagccgagcctgttccagggcctggtgaagtccctggtcggcctgttcgcaggcaaggatcaacctgccgccaagcctgctgaaaccagcaagccggctgccgagcgccaaacccgccaggacgagcgtcgcaacggccgccagcagaaccgccgccgcgatggccgcgatggcaatcgccgcgacgaagagcgcaaaccgcgcgaggagcgtgcagagcgtcaaccgcgcgaagagcgcgccgaacgcccgaaccgcgaagagcgcagcgaacgtcgccgcgaagagcgcgccgagcgcccggctcgcgaggagcgccagccgcgcgaaggccgtgaagagcgcgccgagcggacaccccgcgaagagcgccagccgcgcgaaggccgcgaaggtcgcgaggaacgcagcgaacgccgccgcgaagagcgcgccgaacgcccggcccgcgaagagcgccaaccccgcgaaggccgtgaagaacgcgccgagcgcccggcccgcgaagagcgccagccgcgcgaggatcgccaggctcgcgacgccgcggccctggaagccgaggcattgccgaacgacgagagcctggagcaggacgagcaggacgataccgatggcgagcgcccgcgccgccgctcccgcggccagcgtcgtcgcagcaaccgccgcgaacgccagcgcgaggtcagcggcgagctggaaggcagcgaggcgaccgataacgccgccgcgccgctgaacaccgtcgcagccgccgccgctgccggtatcgctgtcgccagcgaagccgtagaagcaaacgtggagcaagccccggccactaccagcgaggctgccagcgaaaccacggcaagcgatgagaccgacgcgtcgaccagcgaagccgtcgaaacccagggcgcggacagcgaggccaataccggcgaaaccgccgacatcgaagcgccggtgaccgtcagcgtggtccgggacgaagccgaccagagcaccctgctggtcgcgcaagccactgaagaagctcccttcgccagcgaaagcgtggaaagccgcgaagacgccgagagcgccgtgcaaccggcaacggaagcggccgaagaagttgccgctccggtgcccgtcgaagtagcagcccctagcgagcccgcagccaccgaggagccgaccccggccatcgcggcggtgccggccaacgcgactggccgtgccctcaacgacccacgggaaaaacgtcgcctgcaacgcgaagccgagcgtctggcacgcgaagccgcagcagcagccgaagcggcagctcaggccgctcccgccgtcgaggagatcccggctgtagcgagcgaggaagcgtcggcccaggaggaacctgctgcaccccaggctgaagaaatcacccaggccgacgttccgtcccaggcggacgaagcccaggaagcggtacaggccgagcctgaagcttccggcgaaggcgccgccgacacggagcacgcgaaaaagaccgaggaaagcgaaacctcgcgcccgcatgcctga

SEQ ID NO: 30252 - DNA, 1020 bp, Pseudomonas aeruginosa
gtgagcctggaactgcaagagcattgctcgctgaagccctataacaccttcggcatcgacgtgcgcgcccgcctgctggcccacgcccgggacgaggctgatgtgcgcgaggccctggccctggctcgggagcgtggattgccgctgctggtgatcggtggtggcagcaacctgctgctgacccgtgacgtcgaggcgctggttttgcgcatggccagccaggggcggcgaattgtttccgatgccgcggattcggtgttggtcgaggcggaggcgggcgaggcctgggacccattcgtacaatggagcctggagcggggcctggccggtctggaaaatctcagcctgattcccggcaccgtgggtgcggcgccgatgcagaacatcggcgcctatggcgtggagctgaaggatgtcttcgacagcctgacggcgctggatcgccaggatggaaccctgcgtgagttcgatcgccaggcctgccgtttcggctaccgcgacagcctgttcaagcaggagcctgatcgctggctgatcctccgcgtgcgcctgcgcctgacacggcgggagaggctgcacctggactacgggccggtacgccagcgcctggaggaggagggcatcgccagtccgacggccagggacgtaagccgggtaatctgcgccattcgccgggagaagctgcccgaccccgccgtattgggcaatgccggcagcttcttcaagaacccgctggtggatgcgacgcaggccgagcgcttgcgtcaggccttcccggatctggttggctatccgcaggcggacggtcggctgaagctggctgcaggctggctcatcgacaagggcggctggaagggtttccgcgatggcccggtgggggtacacgcgcagcaggcgctggtcctggtaaaccatggcggcgccactggtgcccaggtccgggcattggccgagcgtatccaggaggacgtccgtcggcgtttcggcgtcgaattggagcctgaacccaatctctactga

SEQ ID NO: 30253 - DNA, 465 bp, Pseudomonas aeruginosa
atgcgcgtcctgttcgtctgcctgggcaacatctgccggtcgcccaccgccgaaggcgtgttccggcgcaaggtcgaggaggccgggctggcttcccgcatccatgtcgattccgccggtaccgccggctggcatgtcggcaaggcgcctgaccagcgcacccgcctggccgcgcaaaggcgtggctacgacctgtcggcactgcgtggacgccaggtcggcatcgaggatttctcccgccatgacctgatcctggccatggacctgtccaacctggctgacctcgagaccctgcgtgccgggcgcggtgccgccgaactggatctgttcctgcgtcgctacggatccgagcgggacgaagtgcccgatccctactatggcggcgaagaaggcttcgagcaggtcctcgacctgatcgaacatgcctgcgaccgtctgttgatcgaagccaaggggcgactgtga

SEQ ID NO: 30254 - DNA, 723 bp, Pseudomonas aeruginosa
gtgactctcatctatggacatcgcggcgccaagggcgaagcgccggaaaacaccctggccagcttccagcgctgcctggagcatggcgtcaaccgttgcgaactggacctgcacctgtcccgcgacggcgaactgatggtgatccacgacccgaccctgaagcgcaccaccggccgccgcggcaaggtcgccgaacacgacgcggccaccctggccacctacgacgcgcgcaagggcggccccggctgggtacggccgacgccgatcccgcggctggaggagctgttcgagaagtgcccgttcgagcactggcagctggaagtgaagagcgcctcgcgcgaacgcgcggcgcggacggtaacgcggatcagggagctgaccgagcgcttcggcaaccgcgacaaggtcaccgtcaccagcggttcgcggaccgtgctcaaggccctcaacgaactgaccccagagctgtcgcgcgggctggtcgccgaatacgcctggctcgacccgctgaaggtcgcccagcactatggctgtgccctgctcgccctgaactggaccctatgcaccccggaacgcctgctcaaggcccagcgccaggggcttcacgtctcggtgtggacggtcaacgaaccggcgctgatgcgccggctcgccgacttcggcgtggacagcctgatcacagactttcccggtttggccagcgccaccctcgggaatcgctga

SEQ ID NO: 30255 - DNA, 3447 bp, Pseudomonas aeruginosa
gtgtccgtactgcgtcttcccagcctgccggccagcgccggcaagcaacactggggcaacctccccggtgccgcgctgagcctggctgtcgccgaggccgccagttccgccaagcgcttcaccctgctgctgaccgccgacagccagaatgccgaacgcctggaacaggaactgcggttcttcgcccccgacctgccggtattgcatttccccgattgggaaaccctgccctacgacgtcttttcgccgcaccaggacatcatttcccagcgcatcgccgccctctaccagttgccgcagctcaagcacggcgtgctggtggtgccgatctccaccgccttgcaccgcctggcgccgacccgcttcctgctcggcagcagcctggtcctcgacgtcggccagaaactcgacgtcgagcggatgcgcctgcgcctggaaggcgccggctaccgctgcgtcgacacggtctacgagcacggcgagttcgccgtccgcggcgcgctgatcgacctgttcccgatgggcagcgagttgcccttccgtatcgacctgttcgacgacgagatcgagaccctgcgcaccttcgacccggagacccagcgctccatcgacaaggtcgagtcgatccgcctgctgccggcacgcgaattccccctgaacaaggaagcggtcaccggcttccgcggccgcttccgcgagcgcttcgacgtcgactaccggcgctgcccgatctaccaggacctcgccagcggtttgacaccctcgggaatcgagtactacctgccgctgttcttcgaggaaaccgcgaccctcttcgactacctgccgcaagacacccaggtgttctccctgcccggcatcgaacaggccgcggagcagttctggaatgacgtacgcagccgctacgaggaccgccgggtcgatccggaacggccattgctgccgccggcggaagtgttccttccggtggaagactgcttcgcccggctgaagaactggccacgggtggtcgccagccaggaggacgtcgagccgggcgtcgggcgcgagcgcttcccggccctgccgctgccgaacctggcgatcgaagccaaggccgccgagccgctggccgcgctgcgccggttcatcgaggagttccccggccgcgtactgttctgcgccgaatcggccggacgccgggaagtcctgctggagctgctggcccgactgaagctgcgccccgaggaagtcgacggctggccggccttcctcgccagccaggcacgcctggcgatcagcatcgcgccgctggacgagggcctgctgctggaccatccggccctcgccctggtcgccgaaagcccgctgttcggccagcgcgtcatgcagcgccggcgccgggaaaagacccgcgacggcggcgacgcggtgatcaagaacctcaccgagctgcgcgaaggcgcgccggtggtgcacatcgaccatggcgtcggccgctacctgggcctgatcactctcgaggtggacaaccagcaggcggaattcctcatgctgcaatacgccgaggacgccaagctctacgtgccggtcgccaacctgcacctgatcgcccgctacaccggcgccgacgacgccctggcgccgttgcaccggctcggctcggaaacctggcagaaggccaagcgcaaggccgccgagcaggtccgcgacgtcgccgccgagctgctcgacatctacgcccgccgcgccgcccgcgaaggcttcgcgttcaaggatccgcaggccgactacgcgaccttctcggccggcttcccgttcgaggagacgccggaccagcaaagcgccatcgaggcggtggtcgccgatatgctcgcgcccaggcccatggaccgcctggtctgcggcgacgtcggcttcggcaagaccgaagtggcgatgcgcgcggcgttcgtcgccgtgcatagcggcaagcaggtggcggtgctggtgcccaccaccctgctcgcccagcagcactacaacagcttccgcgaccgcttcgccgactggccggtgagcgtcgaggtgatgagccgcttcaagagcgccaaggaagtcgagaacgctgcgcggctactggccgaaggcaagatcgacatcctcatcgggacccacaagctgctccaggaagacgtgaagttcgccaacctggggttggtcgtgatcgacgaggaacaccgcttcggggtgcgccagaaggagcagctcaaggccctgcgcagcgaagtggacatcctcaccctcaccgccacgccgatcccgcggaccctgaacatggccgtctccggcatgcgcgacctgtccatcatcgccacgccgccggcgcgccgcctgtcggtgcgcaccttcgtcatggagcagcagaacgcggtgatcaaggaagcgctgctccgcgaactgctgcgcggcggccaggtgtactacctgcacaacgaagtgaagaccatcgagaagtgcgcccgcgacctcgccgaactggtcccggaggcgcgcatcggcatcggccacggacagatgcacgagcgcgagctggaacaggtgatgagcgacttctaccacaagcgcttcaacgtgctggtggcctcgaccatcatcgagaccggcatcgacgtgcccagcgccaacaccatcctcatcgagcgcgccgacaagttcggcctggcccagttgcaccagttgcgcggccgcgtcggtcgcagccaccaccaggcctacgcctacctgctgacaccgccgcgccgtcagatgaccccggacgccgagaaacgcctggaagccatcgccaacgcccaggacctgggcgccggcttcgtcctcgccacccacgacctggagatccgcggcgccggcgagttgctcggtgacggccagagcgggcagatccaggcggtcggcttcaccctctacatggaaatgctcgaacgggcggtgaaggccatccgcaagggcgagcagccgaacctcgagcagccgctgggcggtgggccggaggtcaacctgcgggtgcctgcgctgatccccgaggattacctgcccgacgtgcatgcccggctgatcctctacaagcgcatcgccaacgcccctgacgaggaaggtttgcgcgagttgcaggtggagatgatcgaccgcttcgggctcctgcccgatccggcgaagaacctgatgcgcctgacccttctgaagctgcaggcggaaaaacttggaatcctcaaggtcgatgccggaccgcagggcggtcgtatagaattcgccgccgatacccaggtcgacccgctggtactgatcaagctgatccagggccagccgaaccgctacaagttcgaaggcgcaaccctgttccgcttccaggtgcccatggaacgaccggaagaacgcttcaataccctggaggcgctgttcgagcgcctgacaccgcaaaccacctaa

SEQ ID NO: 30256 - DNA, 2148 bp, Pseudomonas aeruginosa
atgatttaccaaggtaaagccatcacggttaagcctcttgagggcggcatcgtcgagttgaatttcgatctcaagggcgagtccgtcaacaagttcaaccgtctcaccctcagtgagttgcgtgcggcagtcgatgcgatcaaggccgatgcatcggtcaagggcgtgatcgtgaccagcggcaaggacgtgttcatcgttggtgccgacatcaccgagttcgttgacaacttccagctgcccgacgaggaactgatggcgggcaacctcgaagccaacaagatcttcagcgacttcgaagacctggacgtacccaccgttgccgcgatcaacggcatcgccctcggcggcggcctggagatgtgcctggccgcggacttccgcgtgatgagcgcgaccgccaaggtcggcctgccggaagtcaagctgggcatctacccgggcttcggcggcaccgtccgcctgccgcgcctgatcggctgcgataacgccgtcgagtggatcgcctcgggcaaggaaaacaaggccgaggacgccctgaaggtcggcgccgtcgatgccgtggtcgctcccgagcaactgcaggccgctgccctcgacctggccaagcgcgccgtcgccggcgagctggaccacaaggcacggcgccagccgaagctggaaaagctgaagctgaatgcaatcgagcagatgatggccttcgaaaccgccaagggcttcgtcgccggccaggccggtccgaactacccggcgccggtggaagccatcaagagcatccagaaggccgccaacttcggccgcgacaaggcgctggaagtcgaagccgccggcttcgtcaagctggccaagacctcggtcgcgcagagtctgatcggcctgttcctgaatgaccaggaactgaagaagaaagccaagaaatacgacgaagtcgccaaggacgtgaaactggccgccgtgctcggcgccggcatcatgggcggcggcatcgcctatcagtcggcgctcaagggcaccccgatcctgatgaaggatatccgcgaagagggtatccagatgggcctgaacgaggccgccaagctgctcggcaagcgcgtcgagaagggtcgcctgaccccggcgaagatggccgaggcgctcaatggcatccgtccgaccatgtcctatggcgacttcggcaacgtcgacatcgtcgtcgaagccgtcgtcgagaaccccaaggtcaagcaagccgtgctcgccgaagtggaaggcgcggtgaaggaagacgcgatcatcgcctccaacacttcgaccatctccatcagcctgctggcccaggcgctgaagcgtccggaaaacttctgcggcatgcatttcttcaacccggtgcacatgatgccgctggtggaagtgatccgtggcgagaagaccggtgaaaccgccatcgccaccaccgtcgcctacgccaagaagatgggcaagagcccgatcgtggtcaacgattgcccaggcttcctggtcaaccgtgtgctgttcccgtacttcggcggcttcgccaagctgctgagcttcggcgtcgacttcgtgcgcatcgacaaggtgatggagaagttcggctggcccatgggcccggcctacctgtccgacgtggtcggcatcgacaccggccaccatggccgcgacgtcatggccgagggcttcccggaccgcatggcggtcgagggcaagaccgccgtcgacgtgatgtacgaggccaaccgcctgggccagaagaacggcaagggcttctacgcctacgagaccgacaagcgcggcaagccgaagaaggtcaccgatccgcaggcctacgaagtgctcaagccgatcgtggtcgagcagcgcgaagtgaccgacgaggacatcgtcaacttcatgatgatcccgctgtgcctggaaaccgtgcgttgcctggaagacggcatcgtcgagaccgctgccgaggccgatatgggcctgatctacggcatcggcttcccgcccttccgtggtggtgctctgcgctacatcgattcgatcggtgtcgccgagttcgtggccctggccgacaagtacgccgagctgggcgcgctgtaccacccgaccgcgaagctgcgtgaaatggccaagaacggtcagaaattcttcggttaa

SEQ ID NO: 30257 - DNA, 909 bp, Pseudomonas aeruginosa
atggacaaggacaaggttctgctggtcctgcacggcaagcaggcgggcaacgaagaggttcgtgccgcggtcgcggcacagcgcgaggccgggcgggagctggcggtgcgggtaacctgggaggacggcgacgcccggcgcatcgtcgaggaggcgctggcggccggctatgcgacgctggtcgcgggcggtggcgacggcacgctgcgcgaggtggccgaagcgctggcgcgcgggcgaggcgaggcgagcctggcgatcctgccgctgggcaccgccaacgatttcgcccgcgccgccgggattcccctggaaccggccgcggcgctggcgctgctcgaccagacggcgcggccgatcgacctgggcgaggtgaacggcaagctgttcctcaacatggccactggcggcttcggttcgaaggtcaccgcgaatacctcggaggacctgaagaaggttctcggcggtgccgcctacctgttgaccgggttgacccgtttttccgaagtgcatgccgcccagggccgtttcagcgccccggacttccagtgggaaggcgagttcctcgccctgggcatcggtaacgggcgccaggccggcggcgggcacgtactgtgtccgcaagcgcgagtggacgacggcctgctggacgtgagcatcctgccgacgccgcaggacatggtcggtaccctgggcaccctgctcggcggtggcaacggagtggaaagcctgttcgtccgcgcgcgggtgccatggctggaagtggaggcggcggaaggtctcgacgtcaatctcgacggcgagccgctggaaggacgcaagctgcgtttctcggtttccccgggcgcgctgcgcgtgcacttgccggccggctcgccgttgttgcgcgagccgccgcgcgaggactga

SEQ ID NO: 30258 - DNA, 1218 bp, Pseudomonas aeruginosa
gtgagcggctgctgcgaacagccggggctgatgccggtcgagacggcgctggaacggctcctcgaactggccgcgcaaacgcctatcgatacgtgtgagcaggtgcccctggagcaggctggcggccgcgtgctggcggtcgacctgctggccggcctggacctgccgccgtggccgaacagcgccatggacggctacgccttgcgcctcgccgactggaacggcgagccactgccggtcagccagaaaatctttgccggacaggcgccgaagccgctgcaagcgggtacctgtgcgcggatcttcaccggtgcgccgctgcccgaaggcgccgatctggtagagatgcaggaaaacgccgaagcgctcgacgatggccgcgtgcgcttcacccagccgttgcgcgtgggccagcatgtgcgcccgcgtggccaggaaatccgccagggcgacctggtcctgccggccggcacgcgcctgcgctccatcgaactggggttggcggcttcgctcggctacgcggccctggaggtgcgacgcaagccgcgggtggcgctgctgtccaccggcgacgagctggtcgaggcgggccagccgctgcaggccgggcagatctacaacagcaaccgtccgttgctcaaggattggctgcaacgcttgggctgcgacgtgctcgacgccggcatccttcccgacgacctggcacgtacccgcgagcgcctggccgggttggccggggtggacctgatcctgtccaccggcggcgtatcggtgggcgaggccgacttcctcggcatggcgctgcgcgaagccggcgagctgaccctctggaagctggcgataaaacccggcaagccgctgaccgtcggccagttccagggcatcccggtgatcggcctgccgggcaatccggcttcgaccctggtcaccttcgccctgctggcgcgtccctacctgctgcgccggcttggcgtggcgcaggtcgcgccgctgcgggtggaggtaccggccggctttgcctggaccaaggcggggcagcgtcgcgagtacctgcgtggtcgcctggagcagggccgcgcggtgctctatccgaaccagagttccggggtactgcgcagcgcttcctgggccgaggggctggtggaggtccgcgagggacgtaccctcgtggaaggcgagggcgtggcgttcattccgctgagcgaactgctcgattga

SEQ ID NO: 30259 - DNA, 540 bp, Pseudomonas aeruginosa
atgagccacaaggccgaaacggcattcgtgccgttgaacatcgccgtcctgaccgtcagcgatacccgtaccctggaaaccgatacttcaggccagttgttcgtcgaccgcctgaccgaggccgggcacaacctggccgctcgcgtgctgctgaaggatgacctataccggatccgcgcacaggtcgcgacctggatcgccgaggatagcgtgcaggtcgtgctgatcaccggcggcaccggtttcaccggccgcgacagcaccccggaagcggtggcctgcctgctggacaagcaggtggacggcttcggcgagctgttccggcagatttcgctggccgacatcggtacctccaccatccagtcgcgggccctggccgggctttccaacggcaccctggtctgctgcctgccgggctccaccaacgcctgccgcactgcctgggaaggcatcctcgtcgagcaactggacgcccgtcatcgcccgtgcaacttcgtcccgcacctgaaacaggcggcgccctgcgagagccgcgggtga

SEQ ID NO: 30260 - DNA, 558 bp, Pseudomonas aeruginosa
atgacatcccgcaaacgcgagcaactgctcagcaccgccgtcgacctgttctatcgcgagggttaccacgccaccggcatcgaccgcatcctggccgaatccggcgtggcgaagatgacgctgtacaaacactttcgctcgaaggacgaactgatcatggccgccctggaggtgcgtcggcagcgcaccgccgaacgcatgctcgaagccgaggcacggttgcagccgcgtgcggcgatcctggcggtgttcgatggtctgcaggagttcctccaggacgaggcgttccgtggctgtgccttcatccatgccgccgccgagttccatgagcgctcgcatccgatccatcgccaagcggccgagcaaaaggccttcgtcgaagcctatttccagcgccagctggagcgcctgggcgtgcgttcggcggcactgcttgcgcggcagttgcaatacctgatggagggcgccctggtgatggcgcacatccatgggccggcggatcaggctcgcgaggcccggcaggcggccgaaagtctgttgcaggtcgctggcatctga

SEQ ID NO: 30261 - DNA, 2226 bp, Pseudomonas aeruginosa
atgaagttccagaaacgcagtgcgtgcatgctcggcctgcttctcatattcgcctgcatggcgggatatgccgttccggcgagggcgacggctggcgaatattcttccatgctccggattcccgctccggatcgtccgggggacgccgatgtggtcgacgaagcgccgctacgccaggctgccgacgggctgcgctcgccatccccttccagcctggtgctcggcctgctggtggcctgcctggtctgcgtcggatgcctgggctggaataccgtcctgcagctcaggctcaggcgttggcaacgtaccgaagccgacctgagcggccgcctggcattgaagcaggcgctggtcgacgggattccctacccggtgagcatccgcacgctcgacggtcgcctgctggcctgcaaccgcaattacctggaaagcctgcggatgacccgagagcaggcccgcggcaccctgttgaccgattccgactgggtcgagggcagcaaggcacggctcatgcaccagcagtgcctggcggtggctcggggaggaacggcgagcttcaccgacatggcggtgcgcatcggcgggcaattgctggagatccaccattgggtcacgccctacagggatcgccagggccgggtgctcggcctgatgaacggctggatcgacatcaccgaacgggagcgcctggcccgccagttgcgcgaggcgatgcgccaggcggacgaggcgaatcgggcgaagagcgtcttcctggcgaccatgagccacgagatccgtacgccgatgaatgcggtcatcggcatcctcgaactggtcctgcagcgcctggcgccggagcagcgcgaacgcgcctcgctggaggtcgcctacgaggcagcggggtcgctgcaactgctcatcggcgacatcctcgacgtcgccaagatcgagtccggtcacctgaccctcacgcccgagcgggttcgcctgcgccatgtcgtggagtcggtgcgccgcatgttcgaaggcctggcccggcagaaaggcctgaggctcgttgtggagctggacgatgccccgggacgggacgtgctgatcgatcccctgcgcttcaagcaggtgctctccaacctggtgagcaatgcgatcaagttcaccgagcggggacaggtgacgatccgtctccaggaaaggagcctggacgaggggagggcgatcgtccgggtggacgtggaggattccggtatcggtatcgctccggcggaccaggcgcgcctgttccagcctttcatccaggtggccaagggacgcacggtgcagggcgggaccggccttgggctggcgatctgtcggaagttggtggacctcatgggcggcgatgtcgagatgcacagcgagccgggcaaaggcacccgggtgtcgctcgacctgctcttgcgccagtgcgggccgaaaatgcctgaatccggccaggacccgctggcagcatccatggagccgtctcgccgcctgcatatcctcatcgccgacgactatccgcccaaccgggtactgctgcgccagcaactggagtttctcggccaccgggtggcggaagcggaggatggccaggtggcgctggagctctgggccgacgagcgcttcgaggtgctgatcagcgactgcaacatgccgcgcctgaacggctatcagctggcacgcaggatacgcatccaggaacggtgcgagcgacgcgcgccgatcctgatcctcggctataccgccgacgccgagccggacgaggtacagcgctgccgcgacgcgggcatggatgattgcctgttcaagccgctcggcctggagaccctgcgcaactacctcgcgacctctttcggacgcgacgccgcgcagccccgggggctctatgatgcagccgctctcagcagcctcggcggcgaccgcccggaacggctgcgcgaactgctggagaccctgctaggcagcaaccgtcaggacctccagcgccttgccatcctcctgcgcgagggcgacaggacccggctcgccgagcatgcccaccgcatcaagggcgccgcacggatgatcggggcgcgtaccctgctggaggcctgcgaggccctggaggacgcctgccggcgaagtggtgacggggagtgcctgcaggcgcctggcgaaagactccggctggccctggaggcgttgcaggaggaactccaggagcagttggcgggcgctgcggtatga

SEQ ID NO: 30262 - DNA, 2658 bp, Pseudomonas aeruginosa
atgcgcaccgagcaaccgaaagtcatccacctcaaggactatcaggcgccggactacctgatcgacgagacccacctgaagttcgaactgttcgaagaccacagcctggtacacgccgagttgaagctgcggcgcaaccccgagcgcggcgccggcctgccgccgctgttgctgcatggccagcaactggagctgctggcgctcgaactggacggccaggcgctcggcgcggacgactaccaactggacgacgagcagctcggggtgcaaccgcggcaggccgaattcgtcctcaggagcacggtgcgtatccatccggagagcaacaccgcgctggaaggcctgtacaagtccggcaagatgttctgcacccagtgcgaggccgagggtttccgcaagatcacctattacctcgaccgtcccgacgtgatgagtcgcttcaccaccaccgtcagcgccgaacagcagcgctacccggtgctgctctccaacggcaacccggtggccagcggttccgaaggcaacggccggcactgggcgacctgggaagacccgttcaagaagccggcctacctgttcgccctggtcgccggcgacctctggtgcgtcgaggacagcttccgcaccatgagccagcgcgacgtggcgttgcgcatctacgtcgagccggagaacatcgacaaggtccagcacgccatggacagcctgaagaagtcgatgcgctgggacgaggaggtctacggccgcgagtacgacctggacatcttcatgatcgtcgcggtcaacgacttcaacatgggcgcgatggagaacaagggcctcaacatcttcaactccagttgcgtcctggcccgcgccgaaaccgccaccgacgccgcccaccagcgggtcgagggcgtggtggcgcatgagtatttccacaactggtcgggtaaccgggtcacctgccgcgactggttccagctgtcgctcaaggagggcttcaccgtattccgcgactcggagttctccgccgacatgaactcgcgcacggtcaagcgcgtcgaggacgtcgccttcctgcgcaccaaccagttcgccgaggacgccgggccgatggcgcatccggtgcgccccgactcgttcatcgagatttccaacttctacaccctgaccgtctacgagaagggctcggaagtggtgcggatgatccacaccctgctcggcgccgaaggcttccgcaagggctcggacctgtacttccagcgccacgacggccaggcggtgacctgcgacgatttcgtcaaggccatggaagacgccaatggcgtcgacctgacccagttcaagcgctggtacagccagtccggcactccgcgcctggcggtggaaggcgagtacgacgccgccgcccgccgctacaccctgacggtgcgccagagctgcccgccgactcccggccagccgagcaaggaacccttcgtcatcccgctggagctgggtctgctcgacggccagggccacgaacttccgctgcgcctggaaggcgaggccgtggcccagggcggcaaccgcgtgctggcggtgaccgaggccgagcagcgcttcgtcttcgtcgaggtgccggagcagccgctgccatcgctgctgcgcggcttctccgcgccggtgaaactgagcttcccctacagccgcgaccagttgctgttcctcatgcagcacgacagcgacggcttcaaccgctgggaggccggccaacagctttcggtgcaggtcctgcaggagctgatcggccagcaccagcgcggcgagcaactggtactcgacccgcgcctgatcgaggcctaccgcaccctcctggcggacgaggcgctggaccaggcgatggtcgccgagatgctctcgctgcccagcgaggcctatctcaccgagatcagcgaagtcgccgatgtcgacgcgatccatgccgcccgcgaattcgcccgccagcgtatcggcgaagcgctgttcgagccgctgtggcagcgttaccaggccaaccgcaagatttcccgcgacaccgcctacctcgccgaggcttcgcacatagcccggcgcagcctgcagaacatcgcgctgtcctacctgtcgctgtcgggccgggaggaaatcctcgccgcctgcctggagcagtacgaaggctgcgacaacatgaccgagcgcctgaccgccctggcggtgctggtcaactccggcttcgaggcggagaagggcaaggccctggccatgttcgccgattacttcaaggatgacccgctggtgatggaccagtggttcagcgtgcaggccggctcgccgctgccgggcgggctggagcgggtccaggagctgatgcagcacccggccttcaccctgaagaacccgaacaaggtgcgcgcgctgatcggcgcgttcgccaaccagaacctggtcaacttccatcgtcctgacggcgccggctatcgcttcctcgccgaccaggtgatcgtgctcaacgcactcaacccgcagatcgcctcgcgcctgctggtgccgctgacccgctggcgcaagtacgacgaggcgcggcaggcgctgatgcgcggcgagctggaacgcatcctggcctccggcgaattgtccagcgacgtctacgaagtggtgagcaagagcctggcctga

SEQ ID NO: 30263 - DNA, 888 bp, Pseudomonas aeruginosa
atggaaccctttcgcaatatcggcatcatcggccgcctcggcagcacccaggtgctggacaccattcgccggctgaagaaattcctgatcgatcgccacctgcatgtgatcctcgaggacaccatcgccgaagtcctgcccggacacggcctgcagacctgctcgcggaagatcatgggcgagatctgcgacctggtggtggtggtcggcggcgatggcagcatgctcggcgcggcccgcgcgctggcccggcacaaggtgccggtgctggggatcaaccgcggcagcctgggcttcctcaccgacatccgcccggatgaactggaggccaaggtcggcgaggtgctggacggccagtacatcgtcgagagccgcttcctcctcgatgcccaggtgcgtcgcggtatcgactcgatggggcagggcgatgcgctcaacgacgtggtcctgcacccgggcaagtcgacccggatgatcgagttcgagctgtatatcgacggccagttcgtctgcagccagaaggccgacggcctgatcgtcgccacgcccaccggttccaccgcctacgcgctgtccgccggcggtccgatcatgcatccgaagctggatgccatcgtcatcgtgccgatgtacccgcacatgctttccagccgcccgatcgtggtggacggcaacagcgagctgaagatcgtcgtgtcgccgaacatgcagatctacccgcaggtctcctgcgacgggcagaaccatttcacctgcgcccccggcgataccgtgacgatcagcaagaagccgcagaagctgcgcctgatccaccccatcgaccacaactactacgagatctgccggaccaagctcggctggggcagccgcctgggcggaggcgactga

SEQ ID NO: 30264 - DNA, 708 bp, Pseudomonas aeruginosa
atgatccctcggcgatcttcagacataacgataaagaccaggagtgatgtattgcctttctccggcgcctcttcccgctggctgcagcggtacgccccggcccttctggctgttgccctgatcatcgccatgagcatcagcctcgcctggcaggcggccggctggttgcgcctgcaacgcagcccggtagccgtcgccgcctcgccggtcagccacgagtcgatccgcagcgatccgacccgcctggcgcgcctcttcggcaccagcgcccaggaccccaacgccccgccaccggccaccaacctcgacctggtgctcaagggcagcttcgtccagagcgatcccaagctgtccagcgcgatcatccagcgccagggcgacaagccgcaccgctacgcggtcggcggcgagatcagcgacggcgtgaagctgcacgcggtctaccgcgaccgcgtcgaactgcagcgcggcgggcgcctggaaagcctgcccttcccgcaccgttccgggggactgctggccagcgcggacgacattacaagcgagaacgactcgatcgaacaactgcaaagcctgcaggatgagaacgctgcagcattgcgcgagcgcctggacgccttgcgccagcagatggaagccacgcccatcgcagaacccgccgaagaagactcgagcgagcccacgaccacgcctacggaaagcgactga

SEQ ID NO: 30265 - DNA, 1977 bp, Pseudomonas aeruginosa
atgtcccagcctttgctccgcgccctgtttgccccttccagtcgttcgtacgttcccgccgtccttctcagcctggccctcggcatccaggcggcgcacgccgaaaacagcggcgggaacgccttcgtcccggccggcaaccagcaggaggcgcactggacgatcaacctcaaggatgccgacatccgcgaattcatcgaccagatttccgaaatcaccggcgagaccttcgtcgtcgacccgcgggtcaagggccaggtcagcgtggtctccaaggcccagctctcgttgagcgaggtctaccagttgttcctctcggtgatgagcacccacggcttcaccgtggttgcccagggcgaccaggcgcgcatcgtgcccaacgccgaggccaagaccgaggccggcggcggccagagcgcgccggatcgcctggagacgcgggtgatccaggtgcagcagagcccggtatcggaactcatcccgctgatccgtccgctggtcccacaatatggccacctcgccgcggtgccctcggccaacgcgctgatcatcagcgaccgcagcgccaatatcgcgcgaatcgaagacgtgatccgccagctcgaccagaagggcagccacgactacagcgtgatcaacctgcgctacggctgggtgatggacgccgccgaggtgctcaacaacgccatgagccgcggccaggccaagggcgcggcgggcgcccaggtgatcgccgacgcgcgcaccaaccgcctgatcatcctcggcccgccgcaggcgcgcgccaagctggtgcaactggcgcaatcgctggacaccccgaccgcgcgctcggccaacacccgagtgatccgcctgcgccacaacgacgccaagaccctcgcggaaaccctcggccagatttccgaaggcatgaagaacaatggcggccagggcggcgaacagaccggcggcggccgaccgagcaacatcctcatccgtgccgacgaaagcaccaacgccctggtcctgctggccgacccggacacggtcaacgctctcgaagacatcgttcgccagctcgacgtgccgcgtgcccaggtattggtggaagcggccatcgtcgagatctccggcgacatccaggatgccgtcggcgtgcaatgggcgatcaacaagggcggcatgggcggaaccaagaccaacttcgccaataccggactgtccatcggcaccctgctgcaatcgctcgagagcaacaaggcaccggaatccatccccgacggcgccatcgtcggcatcggcagcagcagcttcggcgcgctggtcaccgcgctctcggccaacaccaagagcaacctgctgtcgaccccgagcctgttgaccctggacaaccagaaagcggagattctggtcggccagaacgtaccgttccagaccggctcctacaccaccaacagcgaaggttcgagcaacccgttcaccaccgtggagcgcaaggatatcggcgtcagcctcaaggtcactccgcacatcaacgacggcgcggccctgcgcctggagatcgagcaggagatctcggccctgctgcccaacgcccagcagcgcaacaataccgacctgatcaccagcaagcgctcgatcaagagcaccatcctcgccgagaacggccaggtgatcgtgatcggcggcctgatccaggacgacgtttcccaagccgagtcgaaggttcccctgctcggggacatcccattgctcggtcgcctgttccgttccaccaaggacacccacaccaagcgcaacctgatggtcttcctgcgtcctacggtggtccgcgacagcgccggtctcgccgcgctctcgggcaagaaatacagcgacatccgggtcatcgacggcactcgcggcccggagggacgacccagcatcctgccgaccaacgccaaccagttgttcgatggacaggccgtcgatctgcgcgaactgatgacggaataa

SEQ ID NO: 30266 - DNA, 873 bp, Pseudomonas aeruginosa
atgagcaactggctggtagacaagctgatcccttccatcatgcgttccgagtcccagaagagttcggtaccggaaggcctgtggcacaaatgcccgtcctgcgaagccgtgctgtaccgtccggagctggaaaagaccctggatgtctgcccgaagtgcgatcaccacatgcgcatcaacgcgcgtacccgcctggatatcttcctcgatgaggacggtcgcgaggagctgggcgccgacctcgagccggtggaccgcctgaaattccgcgacagcaagaagtacaaggatcgcctcgccgcggcacagaaggacaccggcgagaaggacgcgctgatcgccatgagcggcaagctgcagggcatgccggtggtcgcctgcgccttcgagttctccttcatgggcggttcgatgggcgccatcgtcggcgagcgcttcgttcgcgcagccaacgtcgcccttgagaagcgctgcccgctgatctgcttctccgcctccggcggcgcgcgcatgcaggaagcgctgatctcgctgatgcagatggccaagacctcggcggttctggcgcgcctgcgcgaagaaggcatcccgttcgtctcggtattgaccgacccggtctacggcggcgtttccgccagcctggcgatgctcggcgacgtgatcgtcggcgaacccaaggcgctgatcggcttcgccggtcctcgcgtgatcgagcagaccgtccgcgagaagcttccggaaggcttccagcgtagcgagttcctccttgagcatggcgccatcgacatgatcgtgcatcgtgccgagttgcggccgcgcctggccaatctgctgtcggccttcactcattcgccgagccccgtatccgcatga

SEQ ID NO: 30267 - DNA, 2760 bp, Pseudomonas aeruginosa
atggttcggcttcgtacactggttcgggcaatcgcggcggcctcggtcctgacttccggcatggcgcatggattgggactgggggaaatcaccctgaagtcggcgttgaaccaaccgttggatgccgagatcgagctgctcgaagttcgtgacctgggttcgggcgaggtgatcccgagcctggcgtcgccggaagagttcagcaaggcgggcgtcgatcgcctgtactacctcaccgacctgaagttcacgccggtggtgaagcccaacggcaagagcgtcattcgcgtgacctcgtcgaagccggtgcaggagccctacctgaacttcctggtccaggtgctctggccgaacggccgcctgctgcgcgagtacaccgtcctgctggatccgccgctgtactccccgcaggccgcggcaagcgctccgcaagcgccggtcagcgcgccgcgcgcgaccggcgccccgcgagccccgcaggctccggctccggtgcgtaccaccgcgccggcaggcagcgacacctatcgcaccgtttccaacgacacgctctgggagatcgcccagcgcaaccgtaccgatcgcgtttccgtaccccaggcgatgctcgcgttccaggagctgaatccgggcgccttcgtcgatggcaacatcaaccggctgaagagcggccaggtcctgcgcattcccaccgaacagcagatgctggagcgctcgccgcgcgaggcgctgtcccaggtgcaggcgcagaaccagagctggcgcggcagccgcaatccggccgcgggcagcgctggcgccaggcagttggatgcgacccagcgcaatgccgccgggtcggcgccatccaaggtcgacgccacggacaatctgcgcctggtgtctggcgagggcaaggccagcaagggtgccgacaagggcggaaagggcgacagcaaggcgatcgccgataccctggcggtgaccaaggaaagcctcgacagcactcgccgcgagaacgaagaactgcagagtcgcatgcaggatctgcagagccagttggacaagctgcagaagttgatccagctgaaggacgcccagttggccaagctgcaagggcagttgggcgccgaaggccagggcgcagcccagccgaacgcagccctgccggatgcgtcccagcccaatgcggccgcgcaggcgccggctcagcccgggactcctgctgcggcagcgccgactcctgctccagccggagaagcacccgccgctccggcgcagcctccggtggcgccgccgcccgcgccagctgccgagaagcctccggcacctgccgttccggcgcccgctccggtacaggcggcagagcagccggcaccgagcttcctcgacgaactgctggccaacccgctgtggttggcggtgatcggcggtagcgcactgctggcgttgctggtgctgctgatgatcctgtcgcggcgcaatgcgcagaaagagaaggaagaagcccaggctttcgccgcggataccggcgaggaacaggaggatgcgctggacctgggaaaggacggcttcgacgacctgaccctcgacgagcctgagccgcaggtcgcagccgtcgctccgcaggtcgagaagaccaccgcgcagacttccgatgcgctgggcgaggccgacatctatatcgcctacgggcgtttcaaccaggccgccgaactgttgcagaacgccatctacgacgagccgcagcgcaccgacctgcgcctcaagctgatggaagtctatgccgagatgggcgatcgcgaaggtttcgctcgccaggaaaacgagctgcgcgaaatcggcggcgcacagccgcaggtcgagcagctcaagtcgcgctatccggcaatggtcgcggtcgccgcggttgccggcctggccggcgccaagctggcgcaggacgagctggatagcttcagccttgacgacctgtcgctcgacgacagcggtcacgcggccaagccggatgcggcaggacaggatctcgacgacgccttcgacctgagcctggacgacctgggcggcgacgacgtgcaggccgacctcaagtccgacagcggggcgctggacgacctgaccctggacagcgatctggacctggcggcctcgaccccggcggacaagcctgtcgacgatctcgacttcggcctggatttcgcggagttggcagagactccgagccaacccaagcatgacgacctgggcgatttctccctggatctcgacgcgccggaagacaagctttcggacgacgacttcctgctttcgctgaacgacgaagtgcccgccgcggcgcctgccgacaacgaattcaccctcgataccgaggctgccgaagagccggcgttgtccctgccggacgacttcgacctgtcgctggccgacgagccgacggagccggccgctccggagaagggcgaggacagtttcgccgcccagttggacgaggtgagtgcgcagttggacgagttggccagcaaccttgacgagccgaagagcgcgacgccgagtttctccgccgaagatgcagcggtcgcctccgccctggacggagacgccgacgatgacttcgacttcctctccggtgccgacgaagcggcgaccaagctggatctggctcgcgcctacatcgacatgggcgatagcgaaggcgcgcgcgatatcctcgacgaagtcctggccgaaggtaatgacagccagcaggcggaagcccgcgagttgctggagcgcctggcctga

SEQ ID NO: 30268 - DNA, 1011 bp, Pseudomonas aeruginosa
atgtcccagcccctcaatgtcgcagtcgtaggcgccaccggatcggttggcgaggctctggtcggtctcctcgacgaacgcgacttcccgcttcatcgtttgcacctgctggccagcgccgagtcggccgggcagcgcatgggtttcgccgaaagcagcctgcgcgtcggcgatgtcgatagcttcgatttttccagtgtcggcctggccttcttcgccgcggcagccgaggtgtcgcgtgcccatgccgagcgcgcccgcgcggcgggttgttcggtgatcgacctgagcggcgccctggaaccgagcgtcgcaccgccggtcatggtttcggtgaatgccgaacgcctggcctcgcaagcggcgccgttccttttgtccagtccttgcgccgtagccgccgaactgtgcgaagtgctggcgccactcctggccacgctggattgccggcaactgaacctgacagcctgcctctccgtctccagcctggggcgcgaaggggtcaaggaactcgcccggcagaccgccgaactgctcaatgcgcgccccctggagccgcgtctcttcgaccgccagatcgccttcaacctgctcgcgcaggtcggagcggtggatgccgagggacacagcgcgatcgagcggcgcatcttcgcggaggtgcaggccttgcttggcgagcgtatcggaccgttgaacgttacctgcatccaggcgccggtattcttcggcgatagcctcagcgtgaccctgcagtgcgcggaaccggtggacctggccgcggtgacgcgggtcctcgatgcgacgaaaggtatcgaatgggtcggcgagggcgattatccgacggtggtcggcgatgccctcggccaggacgagacctatgtcggccgggtgagggcggggcaggctgatccctgtcaggtcaatttgtggattgtgtctgataatgtgcgaaaaggtgccgcgctgaatgccgtgctcctgggtgagttgttgataaaacactatctgtaa

SEQ ID NO: 30269 - DNA, 1485 bp, Pseudomonas aeruginosa
atgaccactgttcgtactcgcatcgccccgtcgccgacgggcgacccgcacgtcggtaccgcatacatcgcgctgttcaacctgtgcttcgcgcgtcagcacggcggtcagttcatcctgcgcatcgaggacaccgaccagctgcgttcgacgcgggagtccgagcagcagatctacgacgccctgcgctggctcggcatcgaatgggacgagggcccggacgtcggcggcccgcatggcccgtaccggcagagcgagcgcgggcatatctacaagaagtattcggacgaactggtcgagaagggccatgccttcacctgcttctgcacgcccgagcgcctcgatgcggttcgcgccgagcagatggcgcgtaaggaaaccccgcgctacgacggccactgcatgcacctgccgaaggatgaggtgcagcgccgcctcgccgccggcgagtcccacgtcacccgcatgaaggtgccgaccgagggcgtctgcgtggtgccggacatgctccgcggcgatgtcgagattccgtgggatcgcatggacatgcaggtgctgatgaaggccgacggcctgcccacctacttcctcgccaacgtggtcgacgaccacctgatgggcatcacccacgtcctgcgcggcgaagagtggctgccgtcggcgcccaagctgatcaagctctacgagtatttcggctgggagcagccgcagctgtgctacatgccactgctgcgcaacccggacaagagcaagctgtccaagcgcaagaacccgacctctatcaccttctacgagcgcatgggctacctgccgcaggcgctgctcaactacctcgggcggatgggctggtcgatgccggacgagcgcgagaaattcaccctcgccgagatgatcgagcatttcgacctgtcgcgcgtctccctgggcggaccgatcttcgacctggagaagctctcctggctgaacgggcagtggatccgcgagcagtccgtggaggagttcgcccgtgaggtgcagaagtgggcgttgaatcccgaatacctgatgaagatcgctccgcacgtgcagggacgggtggagaacttcagccagatcgcgccgctggccggattcttcttcagcggcggggtgccgctggacgcttcgctgttcgaacacaagaagctcgatccgacccaggtccgccaggtcctgcaactggtgctgtggaaactcgaatccctgcgccagtgggagaaggaacgcatcaccggctgcatccaggctgtcgccgaacacctccagctcaagctgcgcgacgtgatgccgctgatgttcccggccatcaccgggcatgccagctcggtttcggtgctggacgccatggagatccttggcgccgacctgtcgcgttatcgcttgcgccaggccctggagctgctgggcggggcgtcgaaaaaggaaaccaaggagtgggagaagatccgcgacgccattcccggctga

SEQ ID NO: 30270 - DNA, 1998 bp, Pseudomonas aeruginosa
atgttggataatttgaggataaagctcctgggattgccgcgccgctataagcgaatgctgcaagtcgctgccgatgtgactcttgtgtggctatccctctggctggctttcttggtcaggttgggcacagaagacatgatcagcccgtttagcggccatgcctggctgttcatcgccgccccgttggtggccattcccctgttcatccgcttcggcatgtaccgggcggtgatgcgctacctgggcaacgacgcccttatcgcgatcgccaaggccgtcaccatttccgcgctggtcctgtcgttgctggtctactggtaccgctccccgccggcggtggtgccgcgttccctggtgttcaactactggtggttgagcatgctgctgatcggcggcttgcgtctggccatgcgccagtatttcatgggagactggtactctgctgtgcagtcggtaccatttctcaaccgccaggatggcctgcccagggtggctatctatggcgcgggggcggccggcaaccagttggttgcggcattgcgtctcggtcgggcgatgcgtccggtggcgttcatcgatgatgacaagcagatcgccaaccgggtcatcgccggtctgcgggtctataccgccaagcatatccgccagatgatcgacgagacgggcgcgcaggaggttctcctggcgattccttccgccactcgggcccggcgccgagagattctcgagtccctggagccgttcccgctgcacgtgcgcagcatgcccggcttcatggacctggccagcggccgggtcaaggtggacgacctgcaggaggtggacatcgctgacctgctggggcgcgacagcgtcgcaccgcgcaaggagctgctggaacggtgcatccgcggtcaggtggtgatggtgaccggggcgggcggctctatcggttcggaactctgtcggcagatcatgagttgttcgcctagcgtgctgatcctgttcgagcacagcgaatacaacctctatagcatccatcaggaactggagcgtcggatcaagcgcgagtcgctttcggtgaacctgttgccgatcctcggttcggtgcgcaatcccgagcgcctggtggacgtgatgcgtacctggaaggtcaataccgtctaccatgcggcggcctacaagcatgtgccgatcgtcgagcacaacatcgccgagggcgttctcaacaacgtgataggcaccttgcatgcggtgcaggccgcggtgcaggtcggcgtgcagaacttcgtgctgatttccaccgacaaggcggtgcgaccgaccaatgtgatgggcagcaccaagcgcctggcggagatggtccttcaggcgctcagcaacgaatcggcaccggtgctgttcggcgatcggaaggacgtgcatcacgtcaacaagacccgtttcaccatggtccgcttcggcaacgtcctcggttcgtccggttcggtcattccgctgttccgcgagcagatcaagcgcggcggcccggtgacggtcacccacccgagcatcacccgttacttcatgaccattcccgaggcagcgcagttggtcatccaggccggttcgatggggcagggcggagatgtattcgtgctggacatggggccgccggtgaagatcctggagctcgccgagaagatgatccacctgtccggcctgagcgtgcgttccgagcgttcgccccatggtgacatcgccatcgagttcagtggcctgcgtcctggcgagaagctctacgaagagctgctgatcggtgacaacgtgaatcccaccgaccatccgatgatcatgcgggccaacgaggaacacctgagctgggaggccttcaaggtcgtgctggagcagttgctggccgccgtggagaaggacgactactcgcgggttcgccagttgctgcgggaaaccgtcagcggctatgcgcctgacggtgaaatcgtcgactggatctatcgccagaggcggcgagaaccctga

SEQ ID NO: 30271 - DNA, 1065 bp, Pseudomonas aeruginosa
atgaaaattctgaccatcattggtgcgcgtccgcagtttattaaagcgagtgtggtttcaaaggctatcattgagcagcagaccctttcggaaatcatcgttcatactggtcagcattttgatgccaatatgtctgaaatatttttcgaacagctgggtattccaaagccggattaccagttggatatccatggtggtactcacggccaaatgaccgggcgtatgctaatggagatcgaggatgtaattctcaaggagaaacctcatcgcgtattggtatacggcgataccaactctaccttggctggagcgttggctgcctccaagctgcatgttcctatcgcacacatcgaagccggcctgcgaagtttcaatatgcggatgccggaggaaattaaccgtattcttactgatcaggttagtgatattctgttttgccctactcgagttgcaattgataatctcaagaatgaaggtttcgaaagaaaggctgcgaagatagtcaacgtgggtgatgtgatgcaggatagcgctctattctttgcgcagcgtgcaacctcgccaattggacttgcgtcacaagatgggtttattctcgcgaccctgcatcgtgccgagaacaccgacgatccagttcgcctgacttcgatagtcgaggctctgaatgaaatccagattaatgttgcacctgtggtgctacccctgcatccacgtacccgcggtgtcatcgagcgcctagggctcaagctggaagtgcaggttatcgatcctgtcggatatctggaaatgatctggctgttgcaacgctctggcctggtgctcacggacagcggcggtgttcagaaagaagcattcttcttcggcaagccctgcgtgaccatgcgtgaccagaccgaatgggtggagctagtgacctgtggagccaacgttcttgtgggagcggcccgcgacatgattgtcgaatctgcacggactagcctgggaaagaccattcaagacgatggtcagctttacggaggcggtcaagcctcttctcggattgctgaatatcttgccaagctgtga

SEQ ID NO: 30272 - DNA, 1890 bp, Pseudomonas aeruginosa
atgtcatctagtagctctaaattgctgaacggtatggtcgcggtaagttcaggcagaaacattcggctggatgtccaggggctgcgggctgttgcagttctggctgtgctagcttaccacgccaacagtgcctggctcagggctgggtttgtcggcgttgacgtgttcttcgtcatttccgggtttatcattaccgccttactggtcgagcgcggtgtaaaagttgatctggtagagttttacgcgggccgtatcaaacgtatttttccagcctatttcgtcatgttggcgattgtctgcattgtctcgacaattctgtttctgcctgatgactatgttttttttgaaaaaagtctacagtcatctgtatttttttccagtaatcactatttcgctaattttggtagttactttgctccgagagctgaagagctgccgctgctgcatacttggtcgttggccatcgagatgcagttttatctgttctaccctgtactgttcatgtgcctgccatgtcgatggcgcttgccggtgttcatcctattagctattttgctgttcatttggagtggctattgcgtattcagcggcagccaagatgctcagtacttcgccttgctagctcgtgtacctgagttcatgtcgggagctgttgtcgcattatcattacgtgatcgtgagctacccgccaggcttgcgatacttgcggggttattgggggcggcgttgctggtctgctccttcattatcatcgacaagcagcactttcccggattctggtcgctcctgccatgcctgggagccgctctgctcattgctgcccgacgtggccctgccagcctgctgctggccagcaggcccatggtctggataggtggtatctcctattcgttgtatctgtggcactggccaattctggcattcatccgttactacaccggccaatacgaattgagcttcgtggcgctgttggcatttctcacaggttcgttcctgctggcctggttctcataccgctacatcgagacacctgccagaaaggctgtgggtctgcgccagcaggcgctgaagtggatgttggccgccagtgtggtagctatagtggttacggggggggcgcagttcaatgtgttggttgtggcgccggcgccaattcagttgacgcgctacgctgtaccagagtcgatctgccatggtgttcaggtaggggagtgcaagcgaggcagcgtcaatgccgtaccccgtgtgctggtgatcggtgatagccatgctgcgcagcttaactacttcttcgacgtggttggcaacgagtcaggtgtggcttaccgagtactcaccggaagcagttgtgtgcctatacctgctttcgatcttgaacgtttgccccgttgggcgcggaaaccctgccaagcgcagattgatgcagttgcccaatcaatgttgaactttgacaagatcattgtggcgggcatgtggcagtatcagatgcagagtccggcatttgcccaggctatgcgtgccttccttgtcgataccagctatgccggcaagcaggtcgttctactcgggcagataccgatgttcgaatcaaacgtgcagcgtgtgcgtcgtttcagggagctgggtttgtcagctccgcttgttagctccagctggcaaggtgcgaaccagctgttgcgtgctctagccgagggtattccaaacgtacggttcatggatttttctaccagcgccttcttcgccgatgctccttatcaggacggagagcttatttaccaggatagccatcaccttaacgaggtgggggctcgccgctatggatatttcgcgagccgtcaattgcagcggctgtttgaacaaccacaatcgagtgtgagtctcaagccatga

SEQ ID NO: 30273 - DNA, 1680 bp, Pseudomonas aeruginosa
atgagcgaaagcttcgcagaactctttgaagaaagtctgaaatccctcgacatgcagccgggtgccatcatcaccggcatcgtggtcgacatcgatggtgactgggtcaccgtccatgccggtctgaaatccgagggcgtcatcccggtcgagcagttctacaacgaacagggcgagctgaccatcaaggtgggtgacgaagtccacgtcgcactggacgcggtagaagacggctttggcgagaccaagctgtcccgcgagaaagccaagcgcgccgagagctggattgttctggaagcggctttcgctgccgacgaagtggtcaagggcgtcatcaacggcaaggtcaagggcggtttcaccgtcgacgtcaacggcatccgcgcgttcctgccgggttctctggtcgacgttcgtccggttcgcgacaccacccacctggaaggcaaagagctcgagttcaaggtcatcaagctcgaccagaagcgcaacaacgttgtcgtttcccgccgcagcgtcctggaagccgagaacagcgccgagcgtgaagctctgctggaatcgctgcaggaaggccagcaggtcaaaggtatcgtcaagaacctcaccgactacggcgcattcgtggacctgggcggcgtagacggcctgctacacatcaccgacatggcctggaagcgcatcaagcatccgtccgagatcgtcaacgttggcgacgagatcgacgtcaaggtcctgaagttcgaccgcgagcgcaaccgtgtatccctgggcctgaagcaactgggcgaagacccgtgggttgccatcaaggcgcgttacccggaaggtacccgcgtcatggcccgcgtcaccaacctcaccgactacggctgcttcgccgagctggaagagggcgtggaaggcctggtacacgtctccgaaatggactggaccaacaagaacatccatccgtcgaaagtcgtccaggttggcgatgaagtggaagttcaggttctggacatcgacgaagagcgtcgtcgtatctccctgggtatcaagcagtgcaaatccaacccgtgggaagacttctccagccagttcaacaagggtgaccgtatctccggtaccatcaagtcgatcaccgacttcggtatcttcatcggtctggacggcggcatcgacggcctggtccacctgtccgacatctcctggaacgaagtcggcgaagaagccgtacgtcgcttcaagaagggcgacgagctggaaaccgtcatcctgtcggtcgatccggagcgcgagcgcatctccctgggcatcaagcagctggaagacgatccgttctccaactacgcgtccctgcacgagaaaggcagcatcgtccgcggtaccgtgaaggaagtcgacgccaagggcgctgtcatcagcctgggcgacgacatcgaaggtatcctgaaggcttccgaaatcagccgtgaccgcgtcgaagacgcgcgcaacgtcctgaaggaaggcgaggaagtcgaagccaagatcatcagcatcgaccgcaagagccgcgtcatcagcctctccgtcaagtccaaggacgtcgacgacgagaaggacgcaatgaaagaactgcgtaagcaggaagtagaaagcgctggtccgaccaccatcggtgatctgatccgtgctcagatggagaatcagggctaa

SEQ ID NO: 30274 - DNA, 690 bp, Pseudomonas aeruginosa
atgaacggcgctgtaccgatgctcgccatcgatggccccagtggcgccggcaagggcacggtcgccgggctgctcgcccggcgcctgggctggaacctgctggattccggggcgctttatcggctgttggcgttcgccgcggtcaaccatggtgtcgacctgaccaatgaagaggcgctgaaggtcctggctgcgcacctcgatgtgcagttcgtcgccgccgatggcagccatgggcagcgcatcattctcgaaggcgaggaagtgaccgatgtgatccgtaccgagcaggtcggtgccggcgcttcccaggtcgcggcgctgccggccgtgcgtgatgcgctgctgcagcgccagcgggcgtttcgcgaggctccgggactggtggccgacggccgcgacatgggcaccgtggtatttcccgatgcgcctctgaagatcttcctcaccgcctcggcggaggagcgtgcgcgtcgacgctacctgcagttgaaggcgaagggcgcggatgtcgaccagtctgccttgctggaagaaatccgcgagcgcgacgagcgcgacagccagcgcgcggtcgcgccgctgaaaccggccgatgacgcgatcctgctggactccaccgaaatgagcatcgaggcggtggtcgagacgatcatccggcactgcgagcggcagggctgggacgtctga

SEQ ID NO: 30275 - DNA, 2772 bp, Pseudomonas aeruginosa
atgggcgaactggccaaagaaattctcccggtcaatatcgaagacgagctgaaacagtcctatctcgactacgcgatgagcgtgatcgtcgggcgggccctgccggatgcacgtgacggcctgaagccggtgcaccgccgtgtgctttatgccatgagcgagctgggcaacgactggaacaagccctacaagaaatccgcccgtgtggtcggcgacgtgatcggtaagtaccacccgcacggcgacaccgcggtctacgacaccatcgtgcgcatggcgcagccgttctcgctgcgctacatgctggtagacggccagggcaacttcggttcggtggacggcgacaacgccgcagccatgcgatacaccgaagtgcgcatggccaagctggcccacgaactgctggcggacctggaaaaggaaaccgtcgactgggtgcccaactacgatggcaccgagcagatcccggcggtcatgccgaccaagattcccaacctgctggtcaacggttccagcggtatcgccgtgggcatggcgaccaacatcccgccgcacaacctcggcgaagtgatcgacggctgcctggcgctgatggacaaccccgacctgaccgtcgatgagctgatgcagtacatccccggtccggacttccccaccgccggcatcatcaacggccgcgccgggatcatcgaggcctaccgcaccggtcgcgggcgcatctacatccgtgcccgcgccgtcgtcgaggagatggagaagggcggcggtcgcgagcagattatcatcaccgagctgccgtaccagttgaacaaggcgcggttgatcgagaagatcgccgagctggtgaaagagaagaagatcgagggtatttccgagctgcgcgacgagtctgacaaggacggcatgcgcgtggtcatcgagctgcgtcgcggcgaggtgggcgaggtggtcctcaacaacctctatgcccagacccagctgcagagcgtgttcggcatcaacgtggtggccctggtcgacggccagccgcgcacgctgaacctgaaggacatgctcgaggtgttcgtccgccaccgccgcgaagtggtgacccggcgtaccgtctacgagctgcgcaaggcccgcgagcgcgggcacatcctggaaggccaggcggtcgccctgtcgaacatcgacccggtgatcgagctgatcaagagttcgccgaccccggccgaggccaaggaacgcctgatcgccactgcctgggagtccagcgcggtggaagcgatggtcgagcgtgccggcgccgacgcctgtcgtccggaagacctggatccgcagtacggcctgcgcgacggcaagtactacctgtcgccggagcaggcccaggcgatcctcgagctgcgcctgcatcgcctgaccggcctggagcacgagaagctgctctccgaataccaggaaatcctcaacctgatcggcgagctgatccgcatcctgaccaacccggcgcgcctgatggaggtgatccgtgaggaactggaagcggtcaaggccgaattcggcgatgctcgccgcaccgagatcgtggcttcccaggtcgacctgaccatcgccgacctgatcaccgaggaagaccgcgtggtgaccatctcgcacggcggctacgccaagtcccagccgctggccgcctaccaggcgcagcgtcgcggcggcaaaggcaagtccgccaccgggatgaaggacgaggactacatcgaacacctgctggtggccaacagccatgcgaccctcctgctgttctccagcaagggcaaggtctactggctgcgtaccttcgagattccggaagcctcgcgtaccgcgcgtggccggccgctggtgaacctgctgccgctggatgagggcgagcggatcaccgcgatgttgcagatcgacctggaggcgctgcagcagaacggtggcgccgatgacgacctcgacgaagccgaaggcgcggtgctcgagggcgaggtggtcgaggccgccgaggtcgaggaagtcgagggcgagaccgccgagctggtggccgagccgaccggcgcctacatcttcatggccaccgccttcggtaccgtgaagaagaccccgctggtgcagttcagccgtccgcgcagcagcggcctgatcgcgctcaagctggaagagggcgacaccctgatcgccgccgcgatcaccgatggcgccaaggaagtcatgctgttctccagcgccggcaaggtgatccgcttcgccgagagcgtggtgcgcatcatgggccgcaacgcccgcggcgtacgtggcatgcgcctgggcaaggggcagcagctgatctccatgctgattccggagtccggggcgcagatcctcaccgcctccgagcgcggcttcggcaagcgtaccccgctgagcaagttcccgcgtcgcggccgcggcggccagggggtgatcgccatggtcaccaacgagcgcaacggcgcgctgatcgccgcggtacaggtccaggaaggcgaggagatcatgctgatttccgaccagggcaccctggtgcggacgcgtgtcgacgaagtctccctgtccggccgcaatacccagggcgtaaccctgatcaagctcgccagcgacgaggtactggtcggtctggagcgtgtccaggagccgtcgggcggagatgacgaggacctgcccgagggcgaggaagctgccgaatctctgggcgagtcggccgagtccgagtccgagcccgcggcggaagcggaaggcaacgaagagtaa

SEQ ID NO: 30276 - DNA, 1161 bp, Pseudomonas aeruginosa
atgaacgataccccagagaatccccacgtaccggtcggggaaaaattgcagaaagtcctcgcccgtctcggcgtcggttcccggcgcgacgtagaagtgtggatcgccgaaggccgggtcaacgtcaatggcagcgtggccagcctcggccagcgggtcgacagccacgatgcgatcaccgtcgatggccacctgatccgccgcgaagaggccgccgagagtgtccgtcgcgtgctgatctacaacaagccggaaggcgaggtctgcacccgcgacgatccggaaggccgcccgaccatcttcgaccgcctgccgcgcctgcgcaccggtcgctggatcaatgtcggtcgcctggacatcaataccaccggcctgctgctgttcaccaccgatggcgaactggccaaccgcctgatgcatccttcctatgagatggaccgtgaatacgcggtacgggtgcgcggcgaggtcaccgaagagatgatcgagcgcctgctcaacggcgtgatgctcgaggacggcccggccaagttcagcgatatccagcaggcgccgggcggcgaaggcttcaaccactggtaccactgcgtagtgatggagggccgcaaccgcgaggtgcgccggttgtgggaatcccaggggttggtggtcagccgcctcaagcgggtgcgtttcggcccggtgttcctgacctccgagctgaccatgggccgctaccgcgaaatggaccagcgcgagatcgacatcctcagcgaggaagtcggcctcaagccagtggccctgccgggcatgaccaccaaggcgcgcgagaaggccgaacgccagcagcgcaagcaggcccgtccgctggcgcgcagcgagcgtccggaagccgggcgcaagcgtgcgccgcggcgcgaggacggcgaaaatgccgctcgtcgcgcgccggcttcgcgtcccgcgcgcggtccgcagccgagcgccgagcgcaaggggcgcgagcagggcactccggttgccgagcggccccgcgagagcaaccgcaagccgcgcccgagcaagccgcgcgacgagcgtccggccagcgcgccgggcgacaagccggcggcccgcaagccgcaggtcaagcggcggccgaaaccggccggcgacggtatgcgtccgggcttccgccgctga

SEQ ID NO: 30277 - DNA, 1005 bp, Pseudomonas aeruginosa
atgactatccgcctggccatcaacggcttcggtcgcatcggccgaaacgttcttcgcgccctgtataccggccactaccgcgaacagttgcaggtagtggcgatcaatgacctcggcgacgccgcggtcaacgcccacctgttccagtacgacagcgtccatggacactttcccggcgaggtcgagcacgatgccgaaagcctgcgggtgatgggcgaccgcatcgccgtcagcgccatccgcaacccggcggaactgccctggaagagcctcggcgtggacatcgtgctcgagtgcacggggctcttcaccagccgcgacaaagccgctgcccacctgcaggccggcgccggcaaggtgctgatctcggcgcccggcaaggatgtcgaagccaccgtggtctacggcgtcaaccacgaggtgctgcgcgcctcccatcggatcgtctcgaacgcctcctgcaccaccaactgcctggcaccggtggcccaggtgctgcatcgcgagctgggcatcgagcacggcctgatgaccaccatccatgcctacaccaacgaccagaacctctccgacgtgtaccacccggacctgtaccgcgcacgttcggcgacccagtcgatgatccccaccaagaccggcgccgccgaggcggtcggcctggtcctgccggaactcgccggcaagcttaccgggctggcggtgcgggtgccggtgatcaacgtgtcgctggtcgatctcaccgtgcaggtggcccgggataccagcgtagacgaggtcaaccgcctgctgcgcgaagccagcgagggctctccggtgctcggctacaacacccagccgctggtgtcggtggatttcaatcacgacccgcgctcgtcgatcttcgacgccaaccacaccaaggtcagcggccggctggtcaaggcgatggcctggtacgacaacgagtggggcttctccaaccgcatgctggacagcgccctggcgctggccgccgcccgcgactga

SEQ ID NO: 30278 - DNA, 588 bp, Pseudomonas aeruginosa
atgaagcaattcatcgatttcatcccactgatcctgttcttcatcgtctacaagatagaccctcagaacgtcgagttcgccgggttcaatctgagtggcatctacggcgcgaccgcgaccctgatcctcgcctcggtgatcgtctacggcgccctctggctcaagcaccgccacctggaaaagagccagtggttcaccctcggcgcctgcctggtcctcggcggcctgaccctggccttccacgaggacaccttcctcaagtggaaggcgccgctggtcaactggctgttcgccctggccttcgccggcagtcacttcatcggcgacaagccgatgatccagcgcatcatgggccatgccatccagttgccgcagggcctctgggtgcgcctgaacatcgcctgggtggtgttcttcctggtgtgcggcttcgccaacctgtacgtggtcttcacctatccgaacttctgggtggacttcaaggtgttcggcagcctcggcatgaccttgctgttcctgatcggccagggcctgttcctggctcgccacctgcacgacgccgataccggcgaaaagcccaaggactga

SEQ ID NO: 30279 - DNA, 441 bp, Pseudomonas aeruginosa
atgcgcaagacgctaaccgccctgttcatcgccgccgccctgccgaccttcgccatggccgcgcccgccgccaacgacctgccccccccgccgatggaaggcggccacatgatgggccagcacggtccccggcatggcggcccgatgaaggaactggacctgacccgcgaacagcgccagcagatgggcaaactgatgggcgaacaaatgaaggcccgccacgagatcacccagcgctacctggccaagctgccggcggccgagcagaaggccctgaaggacgaactcaaggccagccacgagaagacccagaaggacatccgcgccctgctcacccccgagcagcagaagaagttcgacgaactgcagaagaagcgcgagcagcgcaaggcagagtgggccgaattccagcaatggaaggccgacaagaagtccaactga

SEQ ID NO: 30280 - DNA, 561 bp, Pseudomonas aeruginosa
atggaggctctcgacgccttgctcactcgcgtttcccacgcccgcctgagcgatcccgcgccctcgccggagcagctcgaccggctgttccgggtcgccttgcgtgccccggaccacgggcaactgcggccctggcgcttcatcctggtagagggcgaaggccgccgggccctgggcgacctctacgcccgcgccctggcgagccgccagccggacgccgccgaggaagcgctggccaaggcccgcaacatgccgctgcgcgcaccgctgctggtcgtggcggtcgcttgcctgcaggaccacccgaaggtgccgcacgctgagcaactgctggctgccggctgcgccgcccacggcctggtgctgggcgcctatgcccagggactgggggcgatgtggcggaccggcgagatggccaccgatccggtggtgcacgccggcctggggctcggcgagcaggagcggatcatcggcttcgtctacctgggtacgccgatgggcgagttgcgcacgccggcggaactcgacccgacggccttcgtcagcgcctggccgggctga

SEQ ID NO: 30281 - DNA, 1455 bp, Pseudomonas aeruginosa
atggccttgccgaccctacgtatcctcggtttcatcatcggcatcttcctgatcactctggccgccagcatgctggtcccgatcctgaccatgctcgccttcgaccgtaccgaaggcatccaggcattcatctggtccagcgtcgccaccttcgtcaccggcctcggcctggtcctgccgggacgtcccgagcatgtccacctgcgcccgcgggacatgtacatgctcaccgtatcgagctgggtgctggtatgcatcttcgccgccctgccgttcgtcctgcagcagcacatcagctacaccgatgccttcttcgaaagcatgtcgggaatcaccgccaccggctccaccgtgctcagcgggctggacgacatgtccccgggcatcctcatctggcgctctctgctgcactggctgggcggcatcggcttcatcgccatggccgtggcgatcctgccgatgctgcggatcggcggcatgcgcctgttccagaccgaatcctcggaccgctcggaaaaggtcctgccacgctcgcacatggtcgccaagtacatcgtcgccacctatgtcggcatcaccctgctcggcagcctggccttctggggcgcgggcatgagcccgttcgacgcggtcaaccacgccatgtcggcgatttccaccggcggtttctccacctccgaccaatccctggccaagtggaagcagccagcggttcactggaccgcggtagtggtgatgatcctcggcagcctgccgttcgcgctctacgtcgccaccctgcgcggacaccgcaaggcgctgatcaaggaccagcaggtccgcggcctgctcggcctgctgctggtgacctggctgctgatgggcacctggtacgcggtaacctccaagctgccctggatggatgctttccgcatcgtcgcagtgaacgtcacctcggtggtcaccaccaccggcttcgccctcggcgactacagcatgtgggggcacttctcgatcatgctgttcttctacctcggcttcatcggcggttgctccggttctaccgccggcggtatcaagatcttccgcttccaggtcgcctataccctgctcaaggccaacctctaccagttgatccatccgcgcgcagtgctcaagcagaactacaacggccatcgcctggacgaggaaatcgtccgctcgatcctgaccttctcgttcttcttcgcgatcgtcgtctgcctgctcgccctcggcctgtcgctgatcggcctggactggatgaccgccctcaccggcgccgccagtaccgtggccggcgtaggcccggggatggggcccatcatcggcccctcgggcaacttcgccagcctgccggacgccgccaagtggctgctggccgccggcatgctgctcggtcgcctggagatcatcaccgtgctggtcctgctgaccccggcgttctggcgccactga

SEQ ID NO: 30282 - DNA, 1806 bp, Pseudomonas aeruginosa
gtgaaatacggggccggttgcacaaccggccctttttcattgcgacgagagcgttccatgaccgtcaccgagcagttgagcgccctggacagcatcctggcccacggcgacctgcactgcctgttccagcccatcctctcgctttccgaacggcgcctggtcggctacgaagcgctgacccgcggtccgtccaacagcccgctgcactcgcccctggcgctgttcgccgtggcccgccaatgcggacggctgagcgaactggaactactctgccgacaacgcgccttcagccgcttccgcgacatccagggcgacgccatgctgttcctcaacatctccccggagtccctcctcgaggccggccatccgcccggccgcaccctgcaattgctgcaacagctggggatctcgccgaaccgggtggtgatcgaactgaccgaacagacccccatcgacgacttcgacctgctcgacaccgcgctgcaccactatcgctccatgggcttctccatcgccctcgacgacctcggcgctggctactccagcctgcgcctgtggtcggaactgcgtccggactacgtgaagatcgaccgccacttcgtcgacggcatccacctggacaccgtgaaacgcgagttcgtcggctccatcctgaagatggcgcgggcctctcgcgcccaggtcatcgccgaaggcatcgaactgcccgaggaactcgcggtacttagcgagatgggggtcgacctggtgcaaggctatctgttcggccgcccgcaggaacacccggcgagcgacgtacaacagatgctgcccagcgctgacgcccccagccagtcttccagcgacgagcacggcgacctgcgtgcgctgctgctggaacagcgcgcggtcgacgttcgcacctcgacccaggaagtggtggaaatcttccgccgccaggccaacctgaactccctggcgatcctcgacgaagaagggcgtcccatcggcatcgtccatcgccacgcgctcaccgacgccttgctccggcccttcgcctgcgacctgttcctgcgcaagccgatcagccgcctgatgagcgacgattttctcgccgtggaactcggccagaccctgcagcaggtcagccgcctgctgaccagccgcgcacgccagcgtatcgaggaagatttcatcgtcacccgcggcgggcactatgcgggcatgggccgggtgatcgacgtgctcaggctgatcaccgaggaaaagctccagcaggcgcggcacgccaatccgctcaccttgcttcccggcaacgtgccgattcagcaatgcctcgaacgcctgctgcaacaaaggcgcgaggcggtgatctgctacatcgacgtcgacagcttcaaacccttcaacgatctctacggctacgcccgcggcgacgaggtcctgctgtgcctggcacagtgcctgagcgaacggatcgacccgggcagcgacttcgtcggccacatcggcggcgacgacttcatgctggtgctcggccccgaggactggcgcacacggatcgaccggttgctggaaaccttccagagccaatgccggcgcttctacagccgcgagcacctggaagccggctgtttcgttgcgcacaaccgccatggccagcgcgaggagtacccgctgctgtcattgtccgtcggcgtggtgcacctaccggccgaagcctgccagggaatggatgccgcgcacctggcgacgctggcctccgaggccaagcgccaggccaaggcggtgccaggctacagcctgcacctgatcgaggccgcctga

SEQ ID NO: 30283 - DNA, 210 bp, Pseudomonas aeruginosa
atgtcgaatcgtcagaacggcaccgtaaaatggttcaacgacgccaaaggcttcggcttcatcaccccggaaagcggtaacgacctgttcgttcacttccgttccatccagggcaccggcttcaagagcctgcaggaaggccagaaggtttccttcgtggtcgtcaacggccagaaaggcctgcaagccgacgaagtacaagttgtctaa

SEQ ID NO: 30284 - DNA, 4347 bp, Pseudomonas aeruginosa
atgcctatttcatcctcttccgcccgccgcgccgagccggctccgcggcccctggcggagttccatcccgtcgtccgccagtggttcgaacgccacttcgccgcgcccacgccggcgcaggtggaggcctggccggcgatccgcgaggggctttcgaccctggtcgccgcgcccaccggttcgggcaagaccctgaccgccttcctcgccgccatcgatgccttggtggtggaggggctggccgccggcggcgagttggcggatgccacccaggtggtctatgtctcgccgctgaaagcgctgtccaacgacatccgcatcaacctggagcaaccgctggctggcatccgcgaggaactggcgcgtctcggcctgcccgacgtcgatatccgtagcgcggtgcgcaccggcgatacgccgcaggtcgagcgcggagcgatgcgcaagcgcccgccgcacatcctggtcaccacgcccgaatcgctgtacatcctgctcggctcggagtcgggccggcagatgcttgccggggtgcgcagcgtgatcgtcgacgagatccatgccctggccggcagcaagcgcggcagccacctggcgctgtcgctggagcgcctgcaggcgctgtgtccgcgaccgctgctgcggatcgggctgtccgccacgcagaaaccgatcgagaaggtcgcgcgcttcctcgtcggcgccagcggcaatccgcgcgatccggcctgccggatcgtcgacgtcggctatacgcgcccccgcgacctgggcatcgaggtaccgccggtggcgctggaagcggtgatgtccaacgacacctgggagctggtctacgaccgcctggcgcacctggccggcgagcaccgcaccaccctggtgttcgtcaacacccggcgcatggccgagcgggtcacccgcttcctcgccgaacgcctcggcagccgccaggtggcggcccaccacggcagcctggccaaggagctgcgcctggatgccgagcagcgcctcaaggccgggcaattgaaggtactggtggcgaccgcctcgctggagctgggcatcgatatcggcgacgtcgagttggtctgccagttgtcgtcgccgcgctccatcgccgccttcctgcaacgggtcgggcgttccgggcacagtgtcggcggcacccccaagggccggttgttcccgacctcccgcgacgacctggtggaatgcgcggcgctgctcgacagcgtgcgccgtggcgagctggacagcctggtgctgccacgccagccgctggacgtgctggcgcagcagatcgtcgccgaagtggcctgccaggagtggcgcgaggacgacctctatcggctggtgatccgcgccgaaccctacgccgggctggagcgcgagcgcttcgacgaagtcctgcggatgcttgccgagggctaccactcacgcctcggcgtgcgcggcgcctatctccatcgcgatgcgctcaacggcctgctccgtggccgccgtggcgcgcggctgaccgcgctgacctcgggcgggaccattcccgataccggcgactacagcgtgctgctggagccgcagggcctgctggtggggacggtcaacgaagatttcgcggtggagagcctggccggcgatgtgttccagctgggcaacacctcgtaccggatcatccgcatcgagccgggacgggtacgggtcgaggacgcccagggccagccgccgaacattccgttctggctgggtgaggcgccggggcgcagcgacgagctgtcggccagcgtggcgcgcctgcgcgacaccctcgacgagctgctcggcgaaggccaggcattgccggaagggcggcggctggagccagccatcgcctggctcggcgccaccctcgggctggacgatggcgccgcgcggcagatcgtcgagtacctggcccgcgcccgccaggccctgggtggcctgcccgggagccggcggctggtgctggaacgcttcttcgacgaatccggcggcatgcaactgatcatccacagtccccacggcagccgcctcaaccgcgcctggggcctggcgctgcgcaagcgtttctgccgcagcttcaacttcgagctgcaggcggcggccaccgaggacgcgatcatcctctcgctgtccaccagccacagctttcccctcgacgaggtctggcgctacctgcattcggcgagcgccgagcacctgttggtacaggccgtgctcgacgcgccgctgttcggcgtgcgctggcgctggaacctgaccacctcgctcggtttgccgcgctatgccggcggtcgcaaggtgccgccgcaactgctgcggatgaagagcgaggatctgctggccagcgtgttccccgaccaggtggcgtgcctggagaatatcgtcggcgagcgcgaggtgcccgatcacccgctggtggcgcagaccctcgacgactgcctgcacgaggcgatggattgcgagggctggctggccctgctgcgcgacatggagagcggcgcggtggacttgctggcgcgcgacctgccggcgccttcggcgttggcggcggagatactgaccgcgcgtccctacgcctatctcgacgatgcgccgctggaggagcggcgtacccaggcggtacagaatcgccgctggagcgatcccgagtccgccgacgacctcggcgccctggaccttgaggcgatcgaggcggtgcgtggcgaggcctggccggaagcgagcaacgccgacgagatgcatgaggcgctgaacagcctgggcttcctcacctcgggcgaggccgaggccaatccgggctggggggaatggcttgcgcaactgtcggagcaacgccgcgccggacgcctggactgcgcaggcagcactctctggctggcggcggagcgcctgccggcgatgcgcctggtgcatcccgcggcgaaggtgcccgacgctttccaggcgcctcgcggctatccgccgccggactcggcggaagcggcgaccgtggagctgacccgcgcccgcctgggtggcttcgggccacgcacggccgggcagttggcggccgacctgggcatcggcctggccgaccagcagtacgcgttggccgccctggagcgcgaaggctatgtgctgcgtggccgcttcagtcctggcgcgacggaagaggagtggtgcgaacgccatctgctggcgcgcatccatcgctatacggtgaagcgcctgcgccgggaaatcgagccggtggagcgcgccgatttcatgcgttttctgttcgactggcagcgcctggcgccgggcacccgtggccggggtgcggagtccctggctacggtggtcgagcagctggaaggcttccaggccgcggcggccgcctgggaaagcgaactgctggcagcgcgggtggccgactacgccagccattggctggaccagctgtgccgttccggacgcatcgtctgggcgcgcctggccggacgcagcaaggccgccggcggtccgctgcgcagcgcgccgatcgtgctcctgccgcgccgcgagctggggctctggagcgtcctgcagcgcgacgcgccggagccggaactgtcgccgcgcgcggccagggtactggaggtgctgcgcgagcagggtgcatcgttcttcgacgaactgagccaggatgcccacctgctgcgcagcgagctggagaacgccctcggcgagctggtctcggtcggccgggtcaacgccgacagcttcgccgggctgcgcaccctgctgatgccggcggacaagcgcagccgccaggagcgccgctcgcgcggcctgccgggcggcatgcaggacgccgggcgctgggcgccgctgcgccgggcgaaggcggaagaggcggggcagcgtttgccggcggaggttctcgaacatgtcgcccggaccttgctgcggcgctatggggtggtcgcctggcgcctgctggagcgcgaggccgactggctgccgccgtggcgcgagttgctgcgcgtctaccatcgcctggaagcgcgcggcgagattcgcggcgggcgcttcatcgccggcctggccggcgagcagttcgccttggcggaagcggtcggcctgttgcgcgaggtgcgcaagcgaccgccggatggggcgatgctggtggtgtcggcagtcgatccgttgaacctggtcggcggcctgctacccggcgaacgggtgccggcggtgaccggcaaccgcctgctctatcgagacggagcgccgctggcggcgctggtagccggcaaggtgcggatgctcgcggaagtcgacggcgagaccgcgcagcagatccgtgcgctgctgatccgccgtcactga

SEQ ID NO: 30285 - DNA, 1323 bp, Pseudomonas aeruginosa
atgattcgcagacactcgtgcaaaggggtggggagcagtgttgcctggagtttgctgggcctggcgatttccgcgcagagcctggccgggaccgtgaccaccgacggtgccgacatcgtgatcaagaccaagggcggcctcgaagtcgccaccaccgacaaggaattcagcttcaagctcggcggccgcctgcaggccgactacggccgcttcgacggctactacacgaacaacggcaataccgccgatgccgcctacttccgccgcgcctacctggagttcggcggcaccgcctaccgggactggaagtaccagatcaactacgacctgtcgcgcaacgtcggcaacgacagcgccggctactttgacgaagcttcggtcacctataccggcttcaacccggtcaacctgaagttcggccgcttctacaccgacttcggcctggaaaaggccaccagctccaaatgggtcaccgcgctggagcgcaacctcacctacgacatcgccgactgggtcaacgacaacgtcggtaccggtatccaagccagctcggtggtgggcggcatggctttcctctctggcagcgtgttcagcgagaacaacaacgataccgacggcgacagcgtcaagcgctacaacctgcgcggcgtgttcgcgccgctgcacgagccgggcaacgtggtgcacctgggcctgcaatacgcctatcgcgacctggaggacagcgcggtggatacccggatccgcccgcgcatgggcatgcgcggcgtctccaccaatggcggcaacgatgccggcagcaatggcaaccgcggtctgttcggcggcagttcggcagtcgaggggctgtggaaggacgactcggtctggggcctggaaggcgcctgggcgctgggtgccttctcggcccaggccgagtacctgcggcgcacggtcaaggccgagcgcgaccgcgaggatctcaaggcctccggctattacgcgcaactggcctacaccctcaccggcgagccgcgcctctacaagctggacggcgccaagttcgacaccatcaagccggagaacaaggaaatcggcgcctgggagctgttctaccgctacgactcgatcaaggtcgaggatgacaacatcgtcgtcgacagcgccacccgcgaggtcggcgacgccaagggcaagacccataccctgggcgtcaactggtacgccaacgaggcggtgaaggtttccgccaactacgtcaaggcgaagaccgacaagatcagcaatgccaacggcgacgatagcggcgatggcctggtgatgcgcctgcagtacgtgttctga

SEQ ID NO: 30286 - DNA, 1431 bp, Pseudomonas aeruginosa
atgaccccaggttatcccctcgccctctctcttgccgtctccatggccgtgctcggcagcgccttgccggcccaggcgcgccaggacgatccgtcactgttcaaccgccaggcccgtggcgaactcagcgagtacggcggcgcacggcgcgtcgagcaggacctgacccaggccctgaagcagtcgctgtcgaagaagaaggcgaagaacgtgatcctgctgatcggcgacggcatgggcgactccgagatcaccgtggcgcgcaactacgcgcgcggcgcgggcggctacttcaagggtatcgatgcgctgccgctgaccggtcagtacacccactactccctgcacaaggacagcggcctgccggactacgtgaccgattccgccgcctccgccaccgcctggtccaccggggtcaagtcgtacaacggcgcgatcggcgtggatatccacgaacagccgcaccgcaacctgctggagctggccaagctcaacggcaaggccaccggcaacgtctccaccgccgagctgcaggacgccacccccgccgccctgctcgcccacgtcaccgctcgcaagtgctacggtcccgaggccaccagcaagcagtgcccgagcaatgccctggagaacggcggcgccggctcgatcaccgagcagtggctgaagacccgccctgacgtggttctcggcggcggcgccgcgaccttcgcggaaaccgccaaggctggccgctatgccggcaagaccctccgcgcccaggccgaagcccgcggctaccggatcgtcgagaacctcgacgagctgaaagccgtgcgccgcgccaaccagaagcagccgctgatcggcctgttcgcgccgggcaacatgccagtgcgctggctcggtccgaccgccacctaccacggcaacctgaaccagccggcggtgagctgcgaggcgaacccgaagcgcaccgccgacatcccgaccctggcgcaaatgaccagcaaggccatcgagctgctgaaggacaatccgaacggcttcttcctgcaggtcgagggcgcgtccatcgacaagcaggaccatgccgcgaatccgtgcggccagatcggcgagaccgtcgacctcgacgaagccgtgcagaaggccctggcctttgccaaggccgatggcgagaccctggtgatcgtcaccgccgaccacgcccactccagccagatcatcccgccggaaaccgccgcgccggggctgacccaactgctcacgaccaaggacggcgcgccgctggcgatcagctacggcaactccgaggaaagctcccaggagcacaccggcacccagttgcgcatcgccgcctacggcccgcaggccgccaatgtcaccggcctgaccgaccagaccgacctgttcttcaccatccgtcgcgcactgaacctgcgcgactga

SEQ ID NO: 30287 - DNA, 951 bp, Pseudomonas aeruginosa
atgcccgccgctgcctactggctccccgccagcgacgaaaccccgctgtacacccgccactggccgagcgcaacggccgtcggcgcggtgatgctgtcccacggcatggccgagcacgccggtcgctacgagcgtctcgccgccgcgctgaacgctgccggctaccacttctatgcgatcgaccagcgcggccacggccggaccgccgaagccgacgagctgggccacttcgccgaccagggcggctggggcaaggtggtcggcgacctggccagcctgaaccaccatatccgccagcagcacccggaactgccgatcttcctgctgggccacagcatgggcagctacatctccatggcctacctgctgcaccacagctgcagcctgcaaggggcgatcctttccggttccaactaccagccgcaagcgctctaccggatcgcccgcctgatcgcccgcttcgagcgctggcgccaggggccgctgggcaagagcgcgctgatcgacttcctctcgttcggctcgttcaacaaggcgttcaagcccaatcgcacggccttcgactggctcagtcgcgatccgcaggaagtcgacaggtacgtggccgacccgctgtgcggcttccgctgcagcaaccagttgtgggtggacctgctcggcggcctggccgatatcaccccgcccacccacctgcggcagatcgatgccgacctgccgctgctgatcatcggcggcgaacgcgacccggtcagccagggcaagcgcctgggcgacctggccgacgccctgcgcggtgccgggctgcgccaggtgaccctgaagacctatcccgaggcccgtcacgagctgttcaacgagagcaaccgcgacgcggtcacccaagacctgatcgactggctggaacaggccctgcgccaccgccgggatcattcgacaaaggagagaacatga

SEQ ID NO: 30288 - DNA, 1176 bp, Pseudomonas aeruginosa
atggaccttcgcttgctgttgctatccctgaccaccttcgccgccggcctggcggaaagcatcctgatcggcatcctgccgcccctggccgaagacctgcgggtctccatcagcctggccggccagctcaccaccctgttctccctcggcttcgccctcgccgcaccgctgctcggctggctgacccggcgcatcgaacgccgccgcctgctgctggcgaccctgctgctgttcgccctcagcaacgcgctcgccgccctcgctccgggctatctcggcctgctcctggctcgcctgggaatgtcggcctgttgcgggctgctgatcgtcctcgccagcctgctcgccgccgagctggccgccccggcccagcgcggccgggcgatcggcctgatcttcatgggcatcagcggttcgctggtgttcggcgtgccactgggcgtacagatcagcgactggttcggctggcgctggatcttcgccggcatcgcggtctattcgctgcccttgtgcctgctgctctggcgctacctgccgcaacgccaggccggcgacctgcccggccgcgaaggctacctgcggcagttgcgccagcccgcgctgtggctcgcgcaactggtatcgatcctgttgctcggcgggcacttcaccctgttcgcctatttcaccccgtacctggcgagcatggccggtattcgctcgcccagcgagatcagcctgatcctcctgctgatcggcctggcagcgctgagcggcggctatatcggcggctggctggccgaccacctcggccaccggcgcgccctgcgtctggtgccggcggccttcgccctggcgctggcggcggtgccgctgagcctgggcagcatcgggttcctgccggtactgatggtctggagcgcgatcagctggatgatctcgccggtggtgcagagcttcctgctgcgcagcgatccggccagcggttccgccggcgtcgccctgaacacctcggccatgcacctgggcgtgggcctcggcgcggcgctgggcggcctggtggtggcggcactgggagtcgccgcgacgccctgggtcggcctcgccctggtgctggcggcgctggcctgcgcgcttggcgccagcacgctggatggcgccacgcaagcgctgccgttcagtccccctgcacggtga

SEQ ID NO: 30289 - DNA, 858 bp, Pseudomonas aeruginosa
atgcgtgcatcgcttcgcgtcgtcgtcaccctgctggtggtcgctgccgctgtcctcgccggcatctggctctggcgctactacatgctctcgccctggacccgcgatgcccgggtgcgggccgacgtggtggtggtggcgccggacgtgtccggctgggtgaccgacctggaggtcaaggacaaccaggtggtcaaggtcggcgacgtgctgatgcgcatcgaccaggaacgctaccaggccaacctggagcaggcccgcgccgtcgccgagacccgtcaccagcaatacctgttgcgccagaacgaggcggcccggcgcagccgcctgggcatcggcgcgatcagcgccgaggacaaggaaaacgcccagatcaatgccgccatcgctcgcagcgagtaccaggaggcgctggcccaggtgaagatcgccgaactcaacctcaagcgcagcgagctgcgcgccgcgcgcaacggccaggtaaccaacctgcgcctggcccagggcaactacgccacggcgggccaggcggtgatggcgttggtcgaccagcagtccttctatgtggtcgcctacttcgaggaaaccaagctgcccggcatccgcgtcggcatgcgcgcccaggtccgcctgatgagcggcgatcagccgatcgacggcacggtggagagcatcagcagcggtatcaccgaccgcaactcgacgccggacggccagttgctggccaatgtcgagccgaccttcaactgggtgcgcctggcgcagcgtattccggtgcgcatccgcctcgaccaggtgccggcggatgtccacctgagcgccgggatgaccgccagcgtcaccgtgcagggggactga

SEQ ID NO: 30290 - DNA, 1995 bp, Pseudomonas aeruginosa
gtgcccattcactggaagccgttcctggcaccctcgacgctggcgctcaagttcgccatcaagacgctcctggccggcggcctggcgttgtggtgcgcctttcgcttcgacctggagcagccgcaatgggcgctgatgaccgtgctgatcgtgtcccagccgttgtccggcatggtggtggcgaagggcttgttccgcctgctcggcaccctggtcggcaccgcgatgtcggtgttgatgatcgcgctgttcgcccaggcgccctggttgttcctgctggccatctcgctctggctggggctctgcacggcggcctcgacctccctgcgcaaccacgtttcctatgccttcgtactttccggctatacggtagcgatcattggcctgccggcggtggaccagccgctgctggtcttcgagcaggcggtggcgcgttgtaccgagatctgcctggggatcatctgcgcctcggcggtcagtgcgatcctctggccgcagcgggtcgagcagaacctcgacaagcaggcccacgccacctggctgctgggcatgcaggccgcgcgcggcgagatcgacccgcgccagcggcagccgcaggggctgctcaacgcgctgagcaagatcgtcgaggtcgatgcgcagcgcgaccatgcctggttcgaaggcgagcgcgggcggcgccgggccggcgccctggcgttgctctcgcgcgacctgctcagcctgttgcgcaccgcgcgcggcgtggcccggcaacgggcgcggctgagcgaagaggaagagcgccgggtggagcgctggctggccgcgctggccagcgccctggaaggaaccgatccggcgtcgatgcaggcgctgcgcgaggagttggcgcaggtcgcggtcgagccgcagtggagcaacgaccagcggtacctgctgacccgctgctcggtgctgctgctcaaggcggtgaatgccgagaagggcatgcgcgcggtggccagcggcgaagtcgaggggcgggtgggcagcgccggtaccctgtcctggcaccgcgacctgcagatggcgctgttctacggtacgcgtagcgccctggcgttgctcgggctgtcggtctactggatctataccgcgtggccggcggcgtccggcgcgatgctgctggcggcggtggtgtgcagcctgttcgccaaccgcgacaacgcggtggccatcggcctgagcttcctgcgcggcatcgtctacgcgatcccggcggcgatgctggtcagccagtggctgctgccgcagtggaatggcttcccgctgctctgcctggcgatgggcgtgccgctgttcttcgccaccctgggcatggccgtaccggttaccgccggcaccgccacctcgttcgcgatccacttcatcgtcctggtcgcgccgcgcaaccagatggactacaacctcgcgaccctgctgaattccgcccagggcgtgctgatcggagtcggcttcgcggtggtgatcttccgcttgctgaccttgcgtccgggctggctgacccgacgcctgctggacgccacctgcgtcgatctcggccgcctcacccggcgcccgctggcgcaggcggagaactggttcggcgggcgcatggccgaccgcctgttgcgcctggcgcggcacgccaacctgttgccggagcaggagcggcggcgttgggacgatggcctcctggcgctcgacctgggtaacgaactgatccacctgcgggcctgcctggaaggcgcccgtggcgtcctgcgcaaggcgcgcgaccgcttcctcggggaactgggcgaactgcttgaggccggtcccgcgggtccgcgcagtgaccgcctggagcggatcagcctgccgttgcgcgaagccctggagcgtgacgctcgccacgacgacgaagccagccgcctggcgcgcgcggccctggcgcaactgctgttcacctggcagcagtggtgccatcaggaggaaagccatgagtctgcatga

SEQ ID NO: 30291 - DNA, 993 bp, Pseudomonas aeruginosa
atgccgcgcgccgccgtggtctgcggcctgggcagctacctgcccgaggccgtgctcagcaacgacatgctcgccgccgagctggacacttccgacgcctggatcagcagccgcaccggcgtgcgccagcggcatatcgccggcgacctcggcagcggcgacctggccctgcgggcggcctccgccgcgctcgcctcggcggggctggagcgagtcgatgcggtggtgctggcaaccagcaccggcgacttctgctgcccggccaccgcgcccagggtcgcggcgcgcctggggttggtcggcgcgctcgcgttcgacctgtccgccgcctgcaccggcttcgtctacggcctggccagcgtcggctcgctgatcagcgccgggctggcggacagcgcgctgctggtcggggtggacactttcagccataccctcgaccccgccgatcgctcgacccgcgcactgttcggcgacggcgccggagcggtggtgctgcgtgccggcgatgccgaggaagaaggcgcgctgctggccttcgacctcggcagcgacggccaccagttcgacctgctgatgacccccgccgtcagtcgcgccgaacgcagttccggacaggcctccaactacttccggatggacggcaaggcagtgttcggccaggcggtgacgcagatgagcgactcggtgcggcgggtgctcgaccgggtcggctggcaagcttcggacctccatcacctggtcccgcaccaggccaacacacgcattctcgcggcggtcgccgaccagctcgaccttcccgtcgagcgagtggtgagcaacatcgccgaggtgggcaataccgtcgccgcctcgattcccctggccctggcccacggcctgcgccaaggcatcctgcgcgacggcggcaacatggtcctcaccggtttcggtgccggactgacctggggttcggtcgccctgcgctggccgaagatcgttccgacaatggactga

SEQ ID NO: 30292 - DNA, 2139 bp, Pseudomonas aeruginosa
atgcgcgagcaagccctacgcatcctcaaagacgttttcggttacgacgccttccgtggcaaccaggcacggatcatcgagcgggtagccgagggtggcgatgcgctggtactgatgcccaccggcggtggcaagtccctgtgtttccaggtcccggcgctgctgcgcgaaggcctgacggtggtggtgtcgccgctgatcgcgctgatggaggaccaggtcgccaccctggacgaactcggcgtgccggcggtggcgctgaactccaccctcaaccccgagcagcagcgggacatcgccgagcgcctgcagcgtggcgagatcaagctgctctacctggcaccggaacggttggtccagccgcgcatgctggccttcctgcaacgactgccggtcggcctgttcgccatcgacgaagcgcactgcgtgtcgcaatggggccatgacttccgtcccgaatacctgcagctcggccagcttgccgagctgttcccgcaggtgccgcggatcgccctgaccgccaccgcggacatgcgtacccgcgaggagatgatccagcgcctgcacctgcagaacgccgagcagttcctctccagcttcgaccggccgaacatcttctaccgcatcgtgcccaaggagcagccgcgcaagcagttgctcggcttcctctccgagcggcgcggcgatgccggcatcgtctactgcctgtcgcggaagaaggtcgaggaggtcgcggaattcctcggcaaccagggcttccccgcgctgccgtatcacgccggactgtccaacgaactgcgtgcccaccaccagaagcgcttcctcaacgaggaaggcttgatcatggtggcgaccatcgccttcggcatgggcatcgacaagcccaacgtgcgtttcgtcgcccacctcgacctgcccaagagcctcgaggcctattaccaggaaaccggccgcgccggccgcgatggcctgccggccgacgcctggatggcctacggcctgcaggacgtcctgctgctgcggcagatgatgcagagttccgagggcgacgagcggcacaagcgcgtcgagcggcacaagctggaagccatgctggcgctctgcgaggaaacccgttgccggcgccaggcgctgctggcctatttcgacgaggagatgccgcagccctgcgggcattgcgacaactgcgtggacggcgtggaaacctgggatgccaccgaatccgcgcgccaggcgctgtcggcgatctaccgcagcggccagcgctacggcgtcggccatctggtggatatcctgctcggccgcgagaccgagaagatccgcagtctcggccaccagcacctggcggtgttcgggatcggcaaggggcgcggcgaagacgagtggcggaccctgttccgccagttggtcgcgcgcggcctggccgacgtcgacctggacggcttcggcggcctgcgcctgaccgaggcctgtcgtccgctgctgcggggcgaggtgcggctggagctgcgccgcgacctcaaaccacagcgcgccaagggctcctccagcggcggcgccagcgccgccagccaattggtgcgcagcgaagagcgggaaatgtgggaggccctgcgcgcgctgcggcgcaagctggccgaagagcattcggtgccgccctatgtgatcttccccgacgcgaccctgctggaaatgctccgcagccagccgcgctcgctatccgacatggcccaggtcagcggggtcggcgcgcgcaagctggagcgctacggccaggccttcctcgatgtcctcaccgactcgccggcggcgcccgccgcgccgccgcaggacctgcgccacgaattggccagcctggcctgtgcggggatgaccccggcgcagatagcccgccagctcaattgcagcgagaagaacgtctacgcgatgctcgccgaggccatcgccggtcagcaggtgagcctggagcaggcgctggatctgcccgaggaactcctcggcgaaatccaggacgccttcctcgaggaagacggcgaactgccgccggtggcggcgctggaggagcgtttcggcaagcgggtgccgagtggcgtgctgcactgcgtgcgcgccgccctgcaggtggaactggagtcgtga

SEQ ID NO: 30293 - DNA, 1011 bp, Pseudomonas aeruginosa
atgtccgccaacgacctgcgtcagtgcctgcgcatcgccggcggcggcaccctggggttcttcgtctgcaagctgatgaactgggactacggctcgttcttcggcgtctacccgatgctgctgctcggcctgacgccggtgatcaacctgcacatcgtccgccagttcctcgctaactcggtggtgatcagcgtcgaggtactggtgctgtacgggttgttcggcgaccggccgctgctgatgacgcctatcgtcttcggcctcttcgtctaccgcttcgccctgatggcgcgcggcccgctgttcttcttcggcgcactgagttcggtgttcctctcgatgctgctgcactttgccagctatccggacgtcgatctgttcgacatgctcgccagcaacatggtcgccacctggctgacggtggccatcgccgtgctgatgttctacctgttccccgacgtcgaaccgcggtcgccgcgccaggcgccggccaaggacgcccccagccggcgccacgagacgctgctcggggccacggtggcgaccctgtccttcgtggtcttccagaccttcgacctgaaggactcgctgtcggcgcagatcgcctcgatcctggtgttgtttcccatgcactggaagggcgtgcacttcgccgggcgcatccgcgccctcggtacgctgctcggctgtgcgctggcggtgggcttgcaggtgctgctctacgatcactacgacatcctgcccttcgtcgccctgttgctgtggatctcggcgatgttctgcgcgcgcatccacatgctggagaacggcgtaccggggatcggtttcggcgcgctgaccaccctggcgatcgtcctcggccagtacctgacgccaacccacgacatgatgtacagcgtgctctaccgatttacctcggtgtgcttcgcggtgctgatcacgttgatgacggtgctggtgatccacctgttcctcaaccgcttcgccgccacccggcactacagccactga

SEQ ID NO: 30294 - DNA, 696 bp, Pseudomonas aeruginosa
atgacccacagcgtttctcccatcggctacatccgctcctgcttcatggagaagttcgccatcccgcgccagccgctgctcgcgccggcggcgcgggggaccctggaactgctgccgccgttcgaccaggtggaagcgctggaaggcctggagcaggtcagccatgtctggctgctgttcctcttccaccaggccctggaagacaagccgcgactgaaggtgcgcccgccgcgcctgggcggcaaccgctcgctgggagtcttcgccacccgcgccacccatcggccgaacggcatcggccagtcggtggtgcgcctggagggcttcgaagcggggcgcctgtggctgtccggaatcgacctgctcgacggcaccccggtactcgatatcaagccctacgtaccctacgccgacgccgtggccgacgcccgcaacggcatcgccgacgcgccgccgccgggcatcgccgtggagtggagcgagcaggcgcggcgccaggcccatgagcacggccagcggttgcggcagccggtggccgagctgatcgagcaatgcctggcgcaggacccacgcccggcctaccagaagccagagcccgggcgccgctacggggtgcgcctgtgggacctcgacgtgcattggcactacccgcgcccggacctgatccgcgtgctggacgtcgccggcggcgattga

SEQ ID NO: 30295 - DNA, 1002 bp, Pseudomonas aeruginosa
atgaatgagcgcaacggcgaagcgaaacgcctggcccttctggaggcggtcaacctggcgttgcaccgggccatggccgaggacgagacggtggtggtgctgggcgaagacgtcggggtcaacggcggggtgtttcgcgccaccctcggcctgcgcgagcgcttcggcttcaagcgggtgctggatacgccgctggcggagaacatgatcgccgggctgtccatcggcatggccgcccagggcctgaagccggtgatggagatccagttcatgggcttcatctacgccgccatggagcaactggtgtcccatgccagccgcctgcgcaatcgcacccgcggccgcctggcctgcccgttggtgctgcgcacgccgatgggcgcggggatccgcgcgccggagcaccacagcgaggcgaccgaggcgatgttcgcgcacatccccggcgtccgcgtgctggtgccgtcgtcgccggcgcgggcctacggcctgctcctggcggcgatcgacgatcccgatccggtgatcttcctcgagccgacccggctctaccggatgaacccgcagccgctggcggacgacgcccggcgcctgccgctggacagttgcttcacccttcgcgaaggcggcgacctgaccctggtcagctggggcgccagcgtccacgagacccagcaggccgccgagcgcctggcgcagcgcggcatcgaggccgaagtgatcgacgtcgcctgcctcaagccgctcgacctcgacaccctcgaagcttcggtgcgcaagaccggtcgctgcgtgatcgtccatgaggcgccgaagagcggcggccttggcggggaaatcgccgcgagcctctacgagcgcgtcctgttcgatctgcgggcgccgatccagcgggtcgccgcggccgatatcccgccgccgctgtaccgcctggaaccgctgtacatgcccgccgtggaggacatcctggcggcctgcgacaccgtgctcggctacgcctga

SEQ ID NO: 30296 - DNA, 1098 bp, Pseudomonas aeruginosa
atggttcacaaccggatcgacccgcctttcacccgctacctcgacagcgacggtcggcccctcggcgagttgcccgcctgggccggcgacagcgatgcgctggtcggcctctaccggcagatgctcctgacccgcctgttcgaccagaaggcggtggccctccagcgtaccgggcggatcggcacctatgcgccaaccctcggccaggaagccatcggcgtggccatcggcagccagatgcgcgccgaggacgtgctggtgccgtattaccgcgataccgccgtgcaattgatgcgcggcgtgcgcatggaggacatcctcctctactggggcggcgacgagcgcggcagcgactacgccgaaccgctggcggcgcaggactttcccatttgcgtgccgatcgccacccaggccctgcatgcctgcggggtcgcctcggcgttccgcatccgcggcgaacaccgggtggcggtgaccacctgcggcgacggcgccaccagcaagggcgatttcctcgaggcgctgaacgtggcgggcgcctggcagttgccggtgctcttcgtggtcaacaacaaccagtgggcgatctcggtgccgcggcgcatccagtgcggcgcgccgaccctggcggagaaggcggtgggtgccggcttccccggcgaacaggtggacggcaacgacgtgctggcggtcgccgaacgcgtccgcgcggccctggagcgcgcgcgccagggcaaggggccgaccctgctggagtgcatcagctatcgcctctgcgaccacaccacggccgacgacgccagccgctaccgttccgccgaggaggtcaaccaggcctggcgcgaggagccgatcaagcgcctgcgcgccttcctcgccggccgcggccagtgggacgaggagcgcgagcaggcgctggtgggcgagtgccaggcgcgggtgcaggaggcggtggagcgtttcgagacgttcgccgcgcaggcgccgcaggcactgttcgagcatgtctacgcgcgctggccggcggtcctggaggagcagcgcgagcaattgctggagcgcgccgcgcggcggcggggaggggccgaacatgaatga

SEQ ID NO: 30297 - DNA, 1572 bp, Pseudomonas aeruginosa
atgaaaaaaatcttattgatgcttttgtgcgtcagcgtgctgggttgctccaaaaacagcgtcgaatcggaaaaaccggtcgacgtgctcctgatcggtggcggcatcatgagcgccaccctgggtacctatctgaacgaactggaaccaggctggaccatcgagatggtcgagcgcctggacaaggtcgccgaagaaagctccaacggctggaacaacgcgggcaccggtcactcggcgttctgcgaactgaactacaccagcgaggccgcggacggctcgatggatatcagcaaggcggtggcgatcaacgagaacttcgagatctccaagcagttctgggcctaccaggtcgaccgcaaggtgctgaacgatccgaagtcgttcatcaacaacgtcccgcacatgagcttcgtctggggcgacgacaacgtcgccttcctcaagaagcgccacgccgccctgcagcacagctcgctgttccgcggcatggagtactcggaagaccccgagcagatcaagcagtgggtgccgctggtgatggaaggccgcgagccggggcagaagatcgccgccacgcgcatgtcgatcggcaccgacgtcaacttcggcgagatcactcgccaactggtgggctcgctgtcggccaaggacaccttcaagctgcgcctgcaacatgaggtccgcgacctcaagcgcaacgacgacaacacctggaccgtgaccatggccgacctggccaatggcgacaaggaaaccagcgtcaaggccaggttcgtcttcatcggcgccggcggcggcgcgctgaagctgctgcagatgtccggcatccccgaggccgaaggctacgccggcttcccggtgggcggttcgttcctcgccaccaccaacccggacgtggtcaagcgccacctggccaaggtctacggaaaggcttcggtgggttcgccgccgatgtcggtgccgcacctcgacacccgcatgatcgacggcaagccggttctgctgttcggtccgttcgccactttctccaccaagttcctgaagaacggctcgctgtgggacctgccgggctcggtgaccagcggcaacatcggcccgatgttcaacgccggcatcgacaacttcgatctcagccagtacctgatcggccagctgatgctcagccaggacgaccgcatggcctcgctgcgcgagtacttcccggaagcccgcgacgaggactggaagctggtgcaggccggccagcgcgtgcagatcatcaagaaggacgccgagaaaggcggcgtactgcaattcggcaccgaagtggtgaccgcagcggacggctccgtcgccgccctgctcggcgcctcgccgggcgcctcgaccgccgcgccgatcatgctgtcggtgctggagaaggccttcaaggacaaggtcgctacccccgagtggcaggcacgcctgaaggaaatcgtgccgtcttacgggcgcaagctgaacaacgacatcgagctgaccaacagcacccgtgcctggagcagcgagcgcctgcaactgatccacgtgccggtacagccggaggcctga

SEQ ID NO: 30298 - DNA, 1770 bp, Pseudomonas aeruginosa
atgtgcggcatatcaggagagtttcgtttcgacaaccaggcagccgacctcgcagcggtcgaacgcatcacccaccacctggcccctcgcggccccgacgcctggggcttccacgcccagggtccgatcgccctcggacatcgacggctgaagatcatggacctggcggaagcttccggccaaccgatgatcgatcccgatctcggcctggccatggtgttcaatggcgccatctacaactaccccgaactgcgtggcgaactggaaagccttggctatcggttcttctccggcggcgacaccgaagttctcttgaaggggtaccatgcctggggcgccgatttattgccccggctcaatgggatgttcgccttcgccgtctgggagcgcgatcgccagcggctgttcctggcccgtgaccgactcggcatcaagccgctctactacagcctcgaccgctcgcgcctacgcttcgcctcgagcctgccggccctgctcaagggcggcgacatcgccagcgacctcgatccgcaggcgctgaatttctacctcaacttccacgccgtggttcccgccccgcacaccttgctggagggcgtgaagaagctgccgccggcgacctggatgagcgtcgacctcgacggcagctgcgagcagcgcacctggtggacgctggactacggcccacgcccggacgagcgcgagctgacgctcgacgactggcaggagcgcgtcctcgacggcctccgcgaagcggtggcgatccgccagcgcgccgcccgcgaggtcggcgtgctgctctccggcggggtcgattcgagcctgctggtgggcctgctgcacgaagccggggtggacaacctgctgaccttctccatcggcttcgaggatgccggcggcgagcgcggcgacgagttccagtattccgacctgatcgccgagcgctatcacacccgccaccatcgcctgcgcatcggcgagcacgaagtgatcgagcagttgccggcggccttccgcgccatgagcgagccgatggtcagccacgactgcatcgccttctacttgctcgcgcgggaagtctcgaagcactgcaaggtggtgcagagcggccagggcgccgacgagctgttcgccggctaccactggtatccgaaggtggatggcgccgacgacgccttcgccgcgtaccgcgcggcgttcttcgaccgcgaccacgaggaatacctggccaccgtcggcgagcgcttccgcgtcgaggacgtcgccgggcgcttcgtccgcgaccacttcgccagccccggcgccgaggccgcggtggacaaggcgctgcgcctggatagcacgatcatgctggtcgacgacccggtcaagcgggtcgacaacatgaccatggcctggggcctggaagcccgcgtgccgttcctcgactaccgcctggccgagctgtcggcgcgcattcccgcccgcttcaagctcggcgacggcggcaagcaggtgctcaagggtgccgcgcgcaaggtgattcccagcgaagtcatcgaccggcccaagggctacttcccggtgcccggcctcaagcacttgcagggccgcacccgcgaatgggtacgcgaactgctgctcgacccgagccaggaccgcggcctgttccagccggcgatattcgatcgcctgctgagcgatccggacggcgacctcacaccgctgcgcggctccaagctgtggcagctggccgccctcaacctctggctcagcgaacagggactttga

SEQ ID NO: 30299 - DNA, 1197 bp, Pseudomonas aeruginosa
atgacccctctgccacaaccggacctcaactacctgcaacgggtgctgctggagatgctcgccatccccagccccaccggcttcaccgataccatcgtgcgctatgtcgccgagcagctcgacgaacttggcgtgcccttcgagatgactcgccggggaaccatccgcgcgaccctccagggccgcctgaataccccggaccgggcggtttccgcgcacctcgacacgatcggcgcgctggtccgcgagatcaagcccaacggccgcctcggcctggccccggtaggctgctggtcgagccgtttcgccgagggtagccgggtcacggtgttcaccgaacagggcgtgttccgtggcagcgtgctgccgctgctggcctcgggccacgccttcaataccgaggtggacaacctgaagatcagctgggacaacatcgagctgcgtctcgacgcctataccgccagccgcgccgacagcgagagcctgggcatctcggtgggcgactacgtggccttcgatccgctgccggagttcaccgagagcggccatatcagcgcccgccacctggacgacaaggccggggtcgcggcgctgctggcggcgctgaaggcggtcaaggaaagcggccaggagccgccgatcgactgccacccgctattcaccatcaccgaggaagtcggttccggcgccgccggcgccctaccctgggacgtcagcgagttcgtcggcatcgacatcgccccggtggccgaaggccagaattccaacgagcacagcgtcagcgtggccatgcaggactccggcgggccctacgacttccatctgtcgcggcacctgctgcggctcggcgagcgccacgacatcgccctgcgccgcgacctgttccgctactaccacagcgacgcgcagtcggcgatcgccgccggccacgacacccgcgccgcgctgctggcgttcggctgcgacgccacccacggctacgagcgcacgcacatcgacagcctcgccgcgctgagccgcctgcttaccgcctacatcctcagcccgccggtcttcgccagcgacgccaagccccgggaaacctcgctggaacgcttcaacaagcagctcgagcatccggtgcacatggaaagctgcacccacgtcccgccggtggacgaagtgctcgacagcagcaacaacagcgacaagggctga

SEQ ID NO: 30300 - DNA, 459 bp, Pseudomonas aeruginosa
atgaccgacaacctgctgagcatttccgccgcctgcctgttcgacgaccagggcaacctgttgctggtgcgcaagcgcggcacccaggccttcatgctcccgggcggcaagcgcgagccgggcgaaacgcccctcgccgcgctacagcgcgaactgctggaggaactgcgcctgccgatgggcgcctcgaccttcgagcacctcggcagcttccaggcgccggcggccaacgaggcgaacacccgcgtcgatgccgatatctacgtcgcccgcttgccccacgccgtctgtgcgcaggcggagctggaggaactggcctggctggtccccggccaagcgcagccggacaatctcgcgccgctgctgcgcgatcatgtcctgccggccctggcgcggcgcgcggcggaaaacccggaaacccaggccgaacaccggacgcgccccgatcatgtgcgctga

SEQ ID NO: 30301 - DNA, 2034 bp, Pseudomonas aeruginosa
atgtccgaaccacgcaagatcctcgttaccagcgccctcccctacgccaacggttccattcacctgggacacatgctggagtacatccagacggacatgtgggtgcgcttccagaagatgcgtggcaaccaggccgtctacgtctgcgccgacgacgcccacggttcggcgatcatgctccgcgccgagcgcgagggcatcacctccgagcaactgatcgacgccgtgcgcgccgagcacatgggcgacttcgccgacttcctggtggacttcgacaactaccactcgacccactcggaagagaaccgcgagctgtccagcgcgatctacctgaaactgcgcgacgccgggcacatcgacacccgcccggtgacccagtacttcgacccggaaaagcagatgttcctcgccgaccgcttcatcaagggcacctgcccgaagtgcggcaccgccgaccagtacggcgacaactgcgaggcctgcggcgcgacctacgccccgaccgaactgaaggacccgaaatcggcgatctccggcgccaccccggtgctcaaggaatcgctgcactacttcttcaagctgccggacttcgaggccatgctcaagcaatggacccgcagcggcgcccttcaggagtcggtggccaacaagctcgccgaatggctggacagcggcctccagcagtgggacatctcgcgtgacgcgccgtacttcggcttcgagattcccgacgctcccggcaagtacttctacgtctggctggacgcgccgatcggctacatggccagcttcaagaacctctgcgcgcggcgtcccgagctggacttcgacgcgttctggggcaaggactccggcgccgagctgtaccacttcatcggcaaggacatcgtcaacttccacgcgctgttctggccggccatgctcgaaggcgccggctaccgcaagccgaccgcgctgaacgtgcacggctacctgaccgtgaacggccagaagatgtccaagtcgcgcggcaccttcgtcaaggcgcgcacctacctcgaccacctggacccggaatacctgcgctactactacgcgtccaagctcggccgcggcgtcgaggacctcgacctgaacctcgaggacttcgtgcagaaggtcaactccgacctggtcggcaaggtcgtcaacatcgccagccgctgcgccggcttcatccacaagggcaacgccggcgtgctggtcggcgccgatccggcgccggaactgctcgccgccttccgcgaggccgcaccgggcatcgccgaggcctatgaggcccgcgacttcaatcgcgccatgcgcgagatcatggccctcgccgaccgcgccaacgcctggatcgccgaacaggcgccctgggcgctggccaagcaggaaggccagcaggacaaggtccaggccgtctgcggcctgggcatcaacctgttccgccagttggtgatcttcctcaagccggtgctgccgaagctggccgccgccgccgaagccttcctcaacgtcgccccgctgacctgggccgaccaccagaccctgctggccaaccaccagttgaacccgttccagcccctgatgacccgtatcgagcccgcgaaagtagaagccatgatcgaagcctccaaggaagacctcgccgccgcatcccaacccgccggcaacggcgagctggtcaaggaacccatcgccgcggagatcgacttcgacgctttcgccgcggtcgacctgcgcatcgccctgatcgagaagtgcgaattcgtcgaaggcgccgacaagctgctgcgcctgtcgctggacatcggcgacgcgaagcgtaacgtgttctccgggatcaagagcgcatatcccgacccgagtgccctggaaggccgcctgacgctctatgtggccaacctggcgccgcgcaagatgaagttcggggtgtccgagggcatggtcctggccgccggcccgggtggcgaggagatctacctgctgagtccggacagcggcgccaagccgggccagcgcgtcaagtaa

SEQ ID NO: 30302 - DNA, 636 bp, Pseudomonas aeruginosa
gtgcgcctgcaagtcacccgtaaacgcgacatccaggtggcctgcggccagtccaacacctggcagttcaagggccggatcaaccaggccagccccatctacgagcgtgcgcagcccgtcgaagtcggccacgtggtgttcttcgtcaaggacgtcaacgcctgcgaacgcttctaccgcgagcgcttcggcttcgtctgctccgatcgctatccgaatcgcggcgccttcctgcgttgcgcggaggagggcggccaccacgacctgttcatgctgcaactgccgcaaccgcgcgccggcctgaaccacgtggcgttcaccgtgcgcgatatccatgaggtgttcggcggcggcatgcacatcgcccgctgcggctgggataccgagatcggcccgggtcggcatccggtgtcctcggcgtacttctggtacttccggaaccccgccggcgccctcgtcgagtactacgccgacgaggaccaactgaccggcgagtggcaggcccgcgagttcgaacctggccctacggtgttcgccgaatgggccatcgccggtggcctggacggcaatacccggcgacagaaaagcgtcgaggcaccgcagggccggttcctcaccgacaaacccaggagttga

SEQ ID NO: 30303 - DNA, 1452 bp, Pseudomonas aeruginosa
atggatgctgaatcgctggaaatgcttgcccgttcctcgtgcaccgcgcatccgcagagcttcggcggcgcaccggccgagtcgtcctgcaagcacgaacacagtcacatcgttgactctaaaacccatggcggcggctacgccggtccggtgagccgacggatcttctgtagccactgccgcctgcaacgctggctcgacgtggaggcggcgctggcgctggcgcaggccgatgtcggcgtcattccgcccgaggccgcgctggagatcgcgaaggccgccaggctttcggccgttgacctgcagcagatcgccgacggcgtggccagcaccgggcactcgctgatgcccctgctgggtgcgctgcaacggaactgcagccccagcgcgcgcgagtacgtgcatttcggcgcgaccacgcaggatatccaggacaccgcgcagtccctggaaatgcgcgatgtgctggatgaaacggagcgggcgctggacatcctcctggaccggctctcggtgctggcgagcgggacccgcaatgcgctgatggtcgccaggacccactcgatcccggcgttgccgaccaccttcgggctgaaggtggccggctggatcgacgagttgctgcgtcaccgcgaacgcctgggcgaggcgcgcaagcggatcctggtggtgcaactgttcggcggcgtgggcacgatggccgccttcggcgacgaggccatgctcctgctcgaaagcttcgcgcggcggctgtcgctggacgtgccgctggcgggttggcacgtgtcccgcgaccgggttaccgagttcgtcagcaccctggccatggtcaccgcgtccctggcgcggatcgccgacgagatccgcaccctgaaccgctgggagatcggcgagctggaggtgggctggacgcagcagcagatcggtagcagcaccatgccccacaagcgcaatccggaaggctgcgagcaggtcgtggtgctggcccggctggccaaggcccaggtcctgctcgcgttggacgccatgatcctcgagcacgagcgggactaccgcggcacgcgcctggaatggtgtgcggtggcggacgtttcccactatgcgctgatggcgctgtcgctgctgaccgacaccatcgacgggctcacggtccacgacgagaccatggcgcggacggcgaatgcatacagcgatgcgatctgtaccgaggcgttcgtcttcgagatggccaagcaactgggcaagagcagcgcttacgaaatcatcttcgagatcacccaggcctgccagcgcaagcggattccgatgcgccaggcgctcgagtcggatccgcgggtgggcgccgtcatgccgaaggaaaccctggccaggctgttcgagccgcggacccatctcggcatggccgggaccatcgtcgacaaggtgctggacaaggtcgccagccaccactga

SEQ ID NO: 30304 - DNA, 1434 bp, Pseudomonas aeruginosa
atgccaagtcacattacggaatcccgtatacacgggggcgcctactcgtccccggcattcgccgcgatcttttccgataccaaccaggtgcggaggtggctggatgtcgagcgagccttggcggcgacccaggccgagatgggcatcatcccccacgaggcggcgcgggagatcgaccgcgccgcccaggtggagcgcttcgacctcacccaactgggccgcgaaagcctggagacagggcacctgctggtgcctaccatccgcgccctggcgaggtcgtgcgagggtagctggggggagtacgtgcactatggcgtgaccacccaggacatcctcgacaccgggctgatgctgcaggtcaaggaagcctggggccatgcgctcgggctcctgcactcgatccgtggccatctgctggcgcttgccctgcgccaccagcacacgccgatggttgcacgcacccacgggcagcaggcgctgcccacgaccttcggctacaaggtcgccgtctgggtggatgaaatcgaccgtcacctggcgcgcttcgacgaagcgcgcgaacgcgtcctggtcggcaacctgaccggtgccgtgggaaccctggcgtcgttcggcgcccagggcttcgagctacagcggcgaaccctggccaggcttggcctcggcgcgccgtcgaccagttggcacagcgcccgggaccgggtgctggaggttgccgggttgctggtccaggtgtcggtgacgctgggccgggtggcgaacgagatctaccacctgcagcgcagcgaaatcgacgaggtacgcgagggcagccggccgggacaggtgggcagcagcaccatgccgcacaagcggaacccgtcgtcggtcgacctggtcagcgcgctgtcgcggctggtgcgggcacagatggtggcgctcaccgatgccgcgttccagttgcacgagcgcgacggcaccgcctggcgcatcgagtgggcggcgttgccggagctgttcgtctacgccggcgccttgctgacccgcatggaggcggtgctggccgaggggctcgaggtgcgcgaggaacgcatgcgcgccaacctcgacctgctgggtgggctgatcctgtcggagcgggtcatgctcgcgctggcggggcagttcggcaagcagaccgcccacgaactgctccatgagataacccaggcctcccagcggcagggcgttccgttccgcgaggcgctgctcgggcagccaaggttgcgcggctgtttcagcgccgaggcgctcgaagaactgctcgaccccgtcggctacgtcggcctcgccgcggagatggtcgacctggtcgccgacaaaccacgaaccggcgcgtcgggcgacaggcccgaaggcgccgcctcttcccaaggaaatcccggtcagtcccagtacgtgatggaggataggtga

SEQ ID NO: 30305 - DNA, 1047 bp, Pseudomonas aeruginosa
atgtccgaccgtctcaccctcctgcgccccgacgactggcacattcacctgcgtgacggtgccgcgctggccaataccgtcggcgacgccgcccgcaccttcggccgcgccatcgtcatgccgaacctggtgccgccggtgcgcaacgccgccgaagccgacgcctaccggcagcgcatcctcgccgcccgtcccgccgccagccgcttcgagccgctgatggtgctgtacctcaccgaccgcaccagcaccgaggaaatccgtaccgccaaggccagcggcttcgtgcatgccgccaagctctatccggcaggcgccaccaccaactcggactctggcgtgacccgcatcgacaatatcttcgaagcgctcgaggcgatggccgaggtcggcatgccgctgctggtgcatggcgaggtgacccgcgccgaggtcgacgtattcgatcgcgagaagcagttcatcgacgagcacctgcgccgggtggtcgagcgcttcccgaccctgaaagtggtcttcgagcacatcaccaccggcgacgccgcccagttcgtccgggaagccccggccaacgtcggcgcgaccattaccgcccatcacctgctgtacaaccgcaaccacatgctggtcggcggtatccgtccgcacttctattgcctgccgatcctcaagcgcaacacccaccaggaagccctgctggacgccgcggtgagcggcaatccgaaattcttcctcggcaccgactcggcgccgcacgcccgccacgccaaggaagccgcctgcggttgcgccggctgctacagcgcctacgccgccatcgagctgtatgccgaggccttcgaacagcgcaatgcgctggacaagctggaaggcttcgccagcctgcacggcccggacttctatggcctgccgcgcaacaccgaccggatcaccctggtccgcgaggaatggcaggcgcccgccagcctccccttcggcgacttcgacgtggtgccgctgcgcgccggagagacactccgctggaaactgctggaggccggggcatga

SEQ ID NO: 30306 - DNA, 1989 bp, Pseudomonas aeruginosa
atgacctcgaaagccgtcgtcttcgcctaccacgacatcggttgcaccggtatcgaagccctgctcaatgccggctacgagatcgccgccgtcttcacccatgccgacgacccacgggaaaacaccttctacgcctcggtcgcacgcctctgcgccgagcgcggcattccgctgcacgcgcccgaggacgtgaaccatccgctgtggctggagcgtatccgccaactgcgcccggacttcctgttctccttctactaccgccgcctgctcggcgccgagctgctcgcctgcgccgcacgcggcgcctacaacctgcacggttcgctgctgccgcgctaccgcggacgcgccccggcgaactgggtgctggtcaacggcgaaacgcagaccggggtgaccctgcatcgcatgatcgagcgcgccgacgccgggccgatcctcgcccagcaggccgtcgccatcgaccccgaggacaccgccctgagcctgcacggcaagctgcgcaaggccgccggcgccctgctgcgcgacagcctgccgctgctcgccctcggcgtgctgccggaagtcgagcaggacgagagccaggccagccacttcggccggcgcaccccggcggacggcctgctcgactggcacaggccggcacggcagttgtacgacctggtgcgcgcggtgacccagccctaccctggcgccttctgccaggtcggcgaacagaagctgatcgtctggagcgccgaggtggtcgccggcaaccacggccgcgagccgggcagcgtactgtcctgcgacccgctgcggatcgcctgcggcgaggactcgctggtgctgcgcttcggccagcgcggcgagcgcggcctgtacctggccggcacgcaactggccaccgagctgggcctggtcgagggcgcgcgcctgcgtggcgcggcatgcagtccgcagcgccgcacgcgggtgctgatcctcggggtcaacggcttcatcggcaaccacctgtccgaacgcctgctgcgcgacggtcgctacgaggtccacggcatggacatcggctccgacgccatcgaacggctcaaggccgacccgcatttccacttcgtcgaaggcgacatcggcatccattcggagtggctcgaataccatgtgaagaaatgcgacgtgatcctgccgctggtggccatcgccacgcccatcgagtacacgcgcaacccgctgcgggtgttcgaactggacttcgaggaaaacctgcggatcgtccgctactgcgtgaaatacggcaaacgcgtggtgttcccttccacctccgaggtctacggcatgtgccaggacccggacttcgacgaagaccgctcgaacctggtggtcgggccgatcaacaagcagcgctggatctactcggtgtccaagcagttgctcgaccgggtgatctgggcctacggccagcagggcctgcgcttcaccctgttccgtccgttcaactggatgggcccgcgcctggaccgcctggattcggcgcggatcggcagctcgcgggcgatcacccagctcatcctgcacctggtcgaaggcacgccgatccgcctggtcgacggcggcgcgcagaagcgctgcttcaccgacgtcgacgacggcatcgaggccctcgcgcggatcatcgacaaccgcgacggccgctgcgacgggcagatcgtcaacatcggcaacccggacaacgaggcgagcatccgccagctcggcgaggaactgctgcgccagttcgaggcccacccgctgcgcgcgcagttcccgcccttcgccggcttccgcgaggtggagagccgcagcttctacggcgacggctaccaggacgtggcccaccgcaagccgagcatcgacaacgcccggcgcctgctcgactggcagcccaccatcgaactgcgcgagaccatcggcaagaccctcgacttcttcctccacgaagcgctccgcgagcgcgaggcacaggcgtga

SEQ ID NO: 30307 - DNA, 414 bp, Pseudomonas aeruginosa
atgaacgcgctacgcggctggctggcggcgctgggcagcgtgctgctggccagcgccgcccagctcggcatgcgctggggcatgagccgcctgccgctaccggaagcctgggccgggcaaacgccggagcgcgccgcgctgctcgcggtagccctggcggtggcagcctacgccgcctccctgctgtgctggctggccgccctgcgccacctgccgctgggccgcgcctacagcctgttgagcgccagctacgcgctggtctacctgctggcggcgagcctgccggcgttcgatgaaaccttcagtaccagcaagaccctgggcgtaggcctggtggtgctcggcgtgttgaccgtcaacgcccgccgcaccgctgccgcgcccgcgcatcatccgtcgaggaaagcaccatga

SEQ ID NO: 30308 - DNA, 1395 bp, Pseudomonas aeruginosa
atgaagatcagcgtattcggcagtggctatgtaggactggtgcaggccgccgtcctcgccgaagtgggccacgatgtactgtgcatggacatcgaccggaacaaggtcgaacgcctcgcgcagggcctcgccagcatctacgaacccgggctcgacgccttgctgcgcgaaggcctggacagcggccgcctgcgtttcagcagcgatgcgcgcctggccgtggaacacggccgggtgcaattcatcgcggtcggcaccccgcctggcgaggacggcgcggccgatctcggcgcggtcttcgtggtggccgatgccatcgccgagcatcgccgcaagcccgtcatcgtggtggagaaatcgaccgtcccggtaggcaccggcgaccgcctgcgcgcgcacatcgagcggcgcctggaagccgacggacgcgagctggaattcgagatcgtctccaacccggaattcctcaaggaaggctccgccgtcgccgactgccggcgcccggaccgcatcgtggtcggctgcgacaacgaagaggtgcgccaggtgatgcgcgaactctacgagccgttcaaccgcaaccacgaccgcatgctgttcatgggcctgcgcagcgccgaactgaccaagtacgcggcgaacggcatgctggcgaccaagatcagcttcatcaaccagatcgccgaactggccgaacacctaggcgccgacatcgaggcggtgcgccagggcatcggcgccgacccgcggatcggctaccacttcatctaccccggctgcggctacggcggctcctgcttccccaaggacatgcgcgcgctgatccacagcgccgagcaggcgcattgctccagcgacctgttgcaggcagtggaagcgatcaaccggcggcagaagcacaagctgttcgaacgcatccgggtgttctacgacggcgacctgcgcggcaagaccttcgccctctggggcctggccttcaagccgaacaccgacgacatgcgcgacgcgcccagccgcgaactgatggaagcgctctggcgccacggcgcgcaggtgcgcgcctacgatcccgaagccatgcaggaaacccagcggctctatggccacgacgaacgcctgagcctgatgggcacccccgaggcgaccctgggaggcgccgatgcgctggtcatctgcaccgagtggcagcaattcaaggcaccggatttcgagctgctcaaggagcgcctgaaggccccggtgatcttcgacgggcgcaacctctacgaccccgagcgcatggcccgccacggcttccactactacccgatgggacgcgggcagtcctgctcgttgccgatcaacgaggccagcctcgcacaggaagatggcatgcgcctgttgcgccaggcctga

SEQ ID NO: 30309 - DNA, 1758 bp, Pseudomonas aeruginosa
atgaaactagcgatcgtcaccgcctgccctggcggacaggtcaccagcgtgctcgccgcgcgcctgctgcggggcgccgccgagcgcctgggctgggaaacctgcgtcgaggcgaatgccgggtcgaggcccgagggcgaactgagcgccgaacagatcgccgaagccgactgggtcctgctggtcggcgtcgagccgctggcggcggcgcgtttcgtcggcaagccggtgtatcgcgcgcgtcccgccgaggcgctggccgatccgcgcgccttcctccagcgggccgccgccctggcgagcgtggaggtcgccggggacgaggccggcctggttgcgccggaggccggagcggcaccgcggattgtcgcggtgaccgcctgtccgaccggcgtggcgcacaccttcatggccgccgaggcgttgcagctcgcggcggggcaactgggcttcgcgttgcaggtcgagacccagggctcggtcggcgcgcgcaacccgctcgacccggcggacatcgccgccgccgacgtggtcctgctggccgccgacatcgacgtggacacggcccgtttcgccggcaagaagatctaccgttgcggcaccggcgtggccctcaagcaggcccgcgcgacgctcgagcgggcgctggcggaagggcaggtcgagagcgcgggcgcagccagcgcggtggtcgccagggacgagaagcgcggggtgtacaagcacctgctgaccggggtgtcgttcatgttgccgatggtggtcgcgggcggcctgctgatcgccctgtcgctggccttcggcatcgatgcctacaagcagccgggcagcctggcggcggtgctgaggacggtcggcgacacggctttcgtcctgatggtgccgatgctcgccggctacatcgcctattccatcgccgaccgcccgggcctggcgccgggcatgctcggcggcctgctcgccgggaccctcggcgccgggttcatcggcgggatagtcgccggcttcatcgccggctatgcggcgcgggccatcagccacgggctgaggctgccggcgagcctggaagcgctgaagccgatcctggtcatcccgttgctggccagcctggtcaccggcctgctgatgctctacgtggtcggcaagccggtggccgggatgctcgcggcactgaccgggttcctcgacggcatgggtacctccaatgccatcctcctcggcctgctgctcggcgggatgatgtgcgtcgacctcggcggaccggtcaacaaggccgcctacgccttttccgtcggcctgctctcgtcgcacagctacgcgccgatggcagcggtgatggcggcgggcatggtgccgccgatcggcatgggcctggcgaccctgctggcgcggcgcaagttcgccgagagcgagcggcaggccggcaaggcagcctcggtgctggggctgtgcttcatctccgaaggcgccatcccgttcgccgccaaggacccgttgcgggtgatcccggcgagcatcgccggcggcgcgctgaccggcgccctgtcgatgtatttcggctgcaagttgcaggcgcctcacggcgggttgttcgtgatgctggtgcccaacgcgatcaaccacgccctggcgtacctgctggcgatcgtcgccggcagcctgcttaccgggctgctctacgccgtgctcaagcgcggcgccgagccgggactggcgttggggacctcgtcctcgcgggagccggcggctggcggatag

SEQ ID NO: 30310 - DNA, 2871 bp, Pseudomonas aeruginosa
atgctcgaactcgatacccggcagatccgcatgggccagcgcgccgcggacaaggccgaagccctgcgcctgctcggcgcggcgctggtcgccgacggcctggccgcgcccggctatgccgagggcctgaaggcgcgcgaggcacaaggctccacctacctcggccagggcatcgccataccccatgggaccccggatacccgcgagctggtcttcagcaccggtgtgcgcctgctgcaattccccgagggagtggactggggcgatggccagcaggtctacctggccatcggcatcgcggcgaagtccgacgaacacctgcagctcctgcaattgctcacccgcgccctcggcgaggccgacctgggaccggcgctgagcgcggccgccagcgccgaggaagtcctcggcctgttgcagggcgcgccgcaggaactggcgctggacgcacaactggtcggcctcggccagaacgccgaggacctcgacgaactggcctggctcggcgcgcgcctgttgaagaaggccggctgcgtggagaacggcttcgccgccgtgctccagcagaccgaaccgttgccgctgggcgacgggctgtgctggttgcacagcgaacaattggtgaagcgccccgggctggccttcgtcactccggcgcaaccgttgcagcaccaggggcaactggtcaccgggctgttctgcctggccagcctgggcgaagcgcaccaggcgctgctcgaacgcctgtgcgacctgttgctggaagggcgtggcgccgagctggtgcgcgccaccagcagccgcagcgtactcgcggcgctcggtggcgagctgccgccggactggcccagcgcgcgagcggtcctggccaacccgcatggcctgcatgcccgcccggcgcaggcgctggcgcagctggccaagggtttcgccggcgagatccgggtacgcctggccgacagtgaggcggcccccgtctcggcgaagagcctgagcaagctgctcgccctcggcgcgcgacgcggccagacgctggagttcagcgccgagccggcgatcgccgaggacgcgctgccagccttgctggccgcggtgcgcgaggggctcggcgaggaggtcgaagcgctggcggaggaggccttgcccgatgccgtcggcgaggcggaagaggatgcccggccggcgccgctgcgcgccggcgagcgcctgcaggcaatcgccgcgtcgccgggcatcgccagtggtccggcgcatgtccaggtggcgcagcgcttcgagttccagccgcgcggcgagtcaccggcccatgaacgcgagcgcctgctgcgggccaagcgggcggtggacgaggagatcgtcggcctggtcgaacgcagcacggtgaaggcgatccgcgagattttcgtcacccaccgggagatgctcgacgatccggaactggccgagcaggtgcaactgcgcctgaatcgcggcgaaagcgccgaagcggcctggagtcgggtggtggaagacagcgcggcgcaacaggaggcgctgcacgacgcgctgctcgccgagcgcgccgccgacctccgcgacctcggccggcgggtgctggccaggctctgcggggtggaggcgccgcgcgagccggagcagccgtacatcctggtgatggacgaggtcggcccctccgatgtcgcccgcctcgacgcccagcgggtcgccggcatcctcacggcgcgcggcggcgccacttcgcacagcgcgatcatcgcccgcgccctcggcattccggcattggtcggcgccggcgcggcggtgctcggcctggagcctggcacggcactgctgctggatggcgagcacggctggctgcaggtggcgccgagcaccgaacagttgcagcaggccgccgccgagcgcgacgcccgccagcagcgccaggcccgcgccgacgcgcagcggctggagcctgcgcggacccgcgatggccacgcggtggaagtctgcgccaaccttggcgacaccgccggcgccgcgcgcgcggtggagctgggcgccgagggcgttggcctgctgcgcaccgagttcgtcttcatgaacaacgcccgcgcgccggacctggcgacccaggaagcggaataccgtcgggtgctcgacgccctcgacggacgtccgctggtggcgcggaccctggatgtcggcggggacaagccgctgccgtactggccgattccccacgaagagaatccctatctgggcctgcgcggtatccgcttgaccctgcagcgaccgcagatcctcgagacccagttgcgcgcgctgttccgcgccgccggggagcggccgctgcgggtgatgttcccgatggtcggcagcctcgacgaatggcgccaggcgcgtgacctggcgctgcgcctgcgcgaggaaatcccgctggccgacctgcaactggggatcatggtcgaggtgccctcggcggcgttgctcgcgccggtgctggcccgcgaggtggacttcttcagcgtcggcaccaacgacctgacccagtacaccctggctatcgatcgcggccacccgagtctttcggcccaggccgacggtctgcatccggcggtgctgcaactgatcgacatgaccgtccgcgccgcccacgccgagggcaagtgggtcggcgtctgcggcgaactggcggccgacccgctggcgttgccgctgctggtcggcctgggagtggacgagctgagcgtctcggcgcgcagcatcgccctggtcaaggccggcgtgcgcgaactgcagctggtcgctgcgcgcggcctggcccgcaaagccctgggcctggcgagcgccgccgaggtccgggccctggtggaagcggaggtgcagtaa

SEQ ID NO: 30311 - DNA, 1014 bp, Pseudomonas aeruginosa
atgaaagctgtcggttactaccaatccctgcccatcgaccatcccgacgccctgctcgacctcgaactgcccgagcccacgccgggcccgcgcgacctgctggtggaggtccgcgccatctcggtcaacccggtggataccaaggtccgccagcgcgcccagccggaagccggccaggccaaggtgctgggctgggacgcggcgggcgtggtgcgcgcggtcggcagcgaggtcagcctgttccgtcctggcgatcgggtctggtacgccggggacatcacccgccccggtagcaacagcgagctgcatcgggtcgacgagcgcattgccgggcacctgccgaaaagcctcgacttcgcccaggccgcggccctgccgctgaccaccatcactgcctgggaactgctcttcgagcgcttgcagatcgccgaaggcaaggccgaccagggccagagcctgctggtggtcggtgccgccggcggggtcggttcgatcctggtccaactggcccggcaactgaccggcctgaacgtgatcggcaccgcttcgcgcgcagagacccaggcctgggtccgcgacctcggcgcgcaccatgtgatcgaccacggcaagccgctggccgaagagctgaagcggatcggtgtcgccgaggtcagccacgtcgccagcctgacccacaccgaccagcacctcgaacagatcgtcgccgcgctgcgcccgcaaggccgcctggcgctgatcgacgacccggcgtcgctggacatcggcaagctgaagcagaagagcctgtcgctgcactgggagttcatgtacacccgctcgatgttccagaccgacgacatgatcgagcagcaccggctgctggagcgggtcgccgggctgatcgacgaaggcgtgttgaagaccaccgtcggcgagcatttcggccgcatcgacgcggccaacctgcgccgcgcccacgcgctgctggagagcggccgggccaagggcaagatcgttctcgaagggttctga

SEQ ID NO: 30312 - DNA, 840 bp, Pseudomonas aeruginosa
atgaccaccgccgccccgaccccgtccctgttcggccaatgcctggccgagttcctcggcaccgccctcctcatcttcttcggcaccggttgcgtcgcggccctgaaggtcgccggcgccagcttcggcctgtgggaaatcagcatcatctggggggtcggcgtgagcatggcgatctacctcagcgccggcgtctccggcgcccacctgaacccggcggtgagcatcgcgctgtggctgttcgccggcttcgaggggcgcaagctgccgttctacatcaccgcccaggtggccggtgcgttctgcgccgcagcgctggtctacaccctctacagcagcctgttcatcgagttcgaacaggcgcagaacatcgtccgcggcagccaggacagcctggccctggcctcggtgttctccacctatccgcacccggcgctgtcggtcggccaggcgttcctcgtcgaagtggtgatcacggccatcctcatggcggtgatcatggcccttaccgacgacggcaacggcctgccgcgcggtccgttggcgccgctgctgatcggcctgctgatcgccgtgatcggtagcgccatgggcccgctgaccggtttcgcgatgaacccggcgcgcgacttcggccccaagctgatgacctacctggccggctgggggcccatcgccttcaccggcggccgcgagattccctattttctggtgccgatcttcgccccgatcctcggtgcctgcctcggcgccggcggctatcgtgtactgatcgcgcgccatctgccgagcgccgcggcgcccgccgaagccgagccggagaaggttcgcgcttcctga

SEQ ID NO: 30313 - DNA, 1518 bp, Pseudomonas aeruginosa
atgaccgacaagcacaacaagaaatacgtcgtcgccctggaccagggcaccaccagctcccgcgccatcgtcttcgaccgcgatgccaacgtggtcagccaggcccagcgcgagttcgcccagttctatccgcaggccggctgggtcgagcacgacccgatggaaatctgggccacgcagagttcgaccctggtcgaggccctcgcccaggccagcatcgagcacgaccaggtggccgccatcggtatcaccaaccagcgcgagaccacggtggtctgggaccgtcacagcggtcggccgatccacaacgccatcgtctggcagtgccggcgcagcgcggcgatctgcgcgcagctcaagcgcgacgggctggaagactacatccgcgaaaccaccgggctggtcaccgatccgtacttctccgggaccaagctgaagtggatcctcgacaacgtcgaaggcgcccgcgaacgcgcgcgcaacggcgacctgttgttcggcaccatcgacacctggctgatctggaagctcaccgaaggcaaggtccacgtcaccgactacaccaatgcctcgcggaccatgctgttcaatatccacagccgcgactgggacgcacggatgctcgaggtgctcgacattccccgctcgatgctacccgaggtgcgcaactcttcggaggtctacggcaacgcccggatcggcggggtcggcggcggcgagctgccgatcgccgggatcgccggcgaccagcaggccgccctattcggccagatgtgcgtggaaccgggccaggcgaagaacacctacggcaccggctgcttcctgctgatgcacaccggcgacaaggcggtgaagtccacccatggcctgctcaccaccatcgcctgcggtccgcgcggcgaggtcggctacgccctggagggcgcggtgttcaacggcggctccacggtgcagtggttgcgcgacgaactgaaggtgatcaacgactccttcgattccgaatacttcgccaccaaggtcaaggacagcaacggcgtctacctggtaccggccttcaccggactcggcgcgccctattgggacccctatgcgcgcggcgcggtgttcggcctgacccgtggagtcaaggccgaccacctgatccgcgctaccctggaatccatcgcctaccagacccgcgacgtgctcgacgccatgcagcgcgatgccggcgaacgcctgcgcgccctgcgcgtcgacggcggggcggtggccaacaacttcctcatgcagttccaggccgacatcctcggcacccgcgtggaacgtccggtgatgcgcgagaccaccgccctcggcgccgcctacctggccggcctggcttgcggcttctggagcagcctcgacgagctgaagagcaaggcggtgatcgagcgggtgttcgagccggagtgcgacgagccccggcgcgaaaagctctatgccggctggaagaaagcagtggagcgcactcgcggctgggacgacggcgaactgtga

SEQ ID NO: 30314 - DNA, 1533 bp, Pseudomonas aeruginosa
atgagcgagccatcgatcgttctcatcggtatcgtcggtaccggtgccatgggccagggcatcgcccagctcgctgcctgtgccggactgtcggtgctgctctacgacagccgccagggggtggcgctgcaagcgcgcgagcagatcgccacggtccttgcccggcaggtggagcggggccggctggaggcggaggctgtcgagcgcgcgatgggcaatctgcgggtggtcgaggacttgcgggtcctaggcggctgccagttggtgatcgaggcgatcgtcgagaacctggaggccaagcaggcgttgttccgccaattggaagaggtggtcggcgacgaagcgatcctcgccagcaatacctcctcgctgtcggttaccgcgatcgcctcggcctgtcgcgatcccggccggatcgccggtctgcacttcttcaatccggtgccgctgatgcgtctggtggaggtgatcgagggtctcgccacccgcaccggcatcgccgagcgactgtgcgccctggtggcgaccttcggccaccaggcggtgcgtgccacggacagccccggcttcatcgtcaaccatgccggacgggccttcggcaccgaggcgctgcgtatcctcggcgagggcgtggcgccggtggcggcgatcgacgaagtcctgcgcgagggcgccggcttccgcatgggcccgttcgagctgttcgacctggtcgggttggacgtcagcctgccggtgatggagtcgatctaccggcagtactacgaggagccgcgttatcgtccgcatcccttgctgcgccagatgctcgccgccggccgcctggggcgcaagagcggccagggcttctaccgctacgacggcgctgggcaggtgcccgtcgccgccccggcggttgcgccaggcgcggcgttgccgccggtgtggctgggcgtcgacgacgaacatgaccgcgcgccattgctgatgttgctacaacgtctgggcgccgaggtggagagcggcgagcgtccttccggggcgccgttgtgcctgcttgcgccactgggcgccgacgtcagcgccgcagcgcggcggttcgccgtcgatccgacgcgcagcctggccatcgacgtgctgtcggacctggagcgacaccgctgcctgatggcctgcccggcgacccgagcggagctgcagcaggcggctcgcaccctgttcgcacgggacggcgtgggcgtcacgctgattcgcgacagcgccgggttcatcgtccagcgcaccctcgcctcgatcgtcaatctcgcctgcgacatcgcccagcagggtatcgcttcggtggagcacatcgacctggcggtgcgcctcggtctcggctatccgctggggccgctggagtggggcgaccgactgggcgccgggcgcgtgctgcgcatcctcgaacgcctgcatgcgctcagcggcgacccgcgctatcgccccagtccctggctgcgccggcgcgcccaactgggcctttccctgcgccagccggacagcccgttggcctcctga

SEQ ID NO: 30315 - DNA, 1323 bp, Pseudomonas aeruginosa
atggccagactcaagcgcaccctgtcgctgggttccgtggtgctgttcggcatcgcctacatgacccccatcatcgtcctcgggactttcggcatcctcgccgagaccacccagggacacgtccccgccgcctacatcgccgcttccctggcgatgctcttcaccgccctcagctacgggcgcatggccgcggccttccccgtggccggctcggcctatacctacgtgcgcaaggccatcgattcccggctcggcttcatcgccggctgggcggtgctgctcgactacctgttcctgccgatggcgatctggctgatcggcgccgcctacctgcactcggcctttcccgcggtacccaacgcggtctgggtgctggcgttcatcggcgtgaccacgacgatcaacatcgtcggcctgcgcctggcgaagaacgtcaatggcctgctgatgctggtgcagttcctggtcctcggcgccttcgtcgcactctgcgtgcactacgtgctgggcgacccgggcaagccgttatggtcactgcaaccgttgctcggtggcgacctgcaggtgccgctggtgatgagcggtgcggcgatcgcctgctactcgttcctcggtttcgacgcggtcagtaccctgaccgaggaaacccgcgacccgcggcgcaacatcccgcgggcgatcctgctgatcaccctgctgggcgggttgatcttcatcgtcacctcgtacttcgtgcaactggcgcacccgtcgttcgccttcgacagcgcggactcggcggcctacgagatcgcccgcaacatcggtggcgacctgttcgtgaccttcttcctggtcggcctgatcgtcggccagttcacctccggtctctcggcccaggccagcgcctcgcgcctgctcttcgccatgggccgcgacggcgtccttccgcggccgttcttcggtcgtctcggcaagcgcttcgagacgccggcgaacagcatcatcctgtgcggtgtggtggccttgctggcgctacagatggacgtgaccacctccacgtcgttcatcaacttcggcgccttcctcgccttcagcctggtcaacctgtcggtggtcttccactactaccttggcgccgagcgccgcggtccacgggaaaccctgttgttcctggtattccctggcatcggcctggtcgccgacctgtggttgatggccagcctcgaccatctggcgatcatcctcggcctctgctggctggcgctgggcgcggtgtacctggcggcgatcacccacggtttccgcgagccgccgccggagatgcgtttcgaggagggctga

SEQ ID NO: 30316 - DNA, 264 bp, Pseudomonas aeruginosa
atgaaacccggcatccatcccgaataccgtcccgtcctgttccatgacacctcggccgacgtgtacttcctgatcggctccaccgcggagaccgacaagacccatacccataccgacggcaagacctatccctacgtgacgctggacgtttccagcgcctcgcacccggtctacaccggcgaacagcgcaagaccaagagcgaaggccgcgtggccgggttcaacaagcgtttcgccggcttcgtcggcggcaagggggcctga

SEQ ID NO: 30317 - DNA, 1611 bp, Pseudomonas aeruginosa
atgaatctgtcgctactcagtcgctatgcgtttttcgcctgtatcgccctgttcaccttgctcagcctgccgttcctcggcagcaccgaatggctctggccattcaccctcctgggcgtggccctgagcctgctcggcctgttcgacctgatccagacgccacacgcggtgcgccgcaactatccgatcctgggcaacatccgctatctggtggaaggcatccgcccggagatccgccagtacctgctggaagccgacggcgacgccctgcccttctcccgcgcccagcgctcgctggtctactcgcgggcgaagaacgaaagctcggagaagcccttcggcaccctgatcgacgtgtacaccgccggctacgaattcatcagccactcgatgcgtccggcgccactcagcgatccctgcgagttccgcgtcgacatcggcgggccacaatgcagcaagccgtactccgcttcgctgttcaacgtctcggcgatgagtttcggcgccctcagcgccaacgccattcgctcgctgaaccgtggcgcgcagatgggcaacttctaccacgacaccggcgagggcagcatcagtccctatcaccgcgagaacggcggcgacctggtctgggaactgggcagcggctacttcgggtgccgcacccgcgatggcaagttcgaccctgagcgcttcgccgcccaggccctcgacccgcaggtgaagatgatcgagatcaagctcagccagggcgccaagccgggacacggcggtatcctgcccaagcacaaggtcacccccgagatcgccgccacccgtggcgtgccgatgggtgaggattgcgtttcgccgtcgcgccacagcgccttctccacgccgatcgagctgatgcagttcatcgcccagctgcgcgaactgtccggcggcaagccggtcggcttcaagttctgcctgggccatccatgggagttcatgggcatcgccaaggccatgctggagaccggcatcctccccgacttcatcgtcgtcgacggcaaggaaggcggcaccggcgcggcgccgctggagttcaccgaccatatcggcgtgccgctgcgcgaaggcctgctgttcgtccacaacaccctggtcggcctcaacctgcgcgacaagatcaaggtcggcgccagcggcaagatcgtcagcgccttcgatatcgccagcgtcctggccaccggcgcggattgggccaactcggcgcgcggcttcatgttcgccatcggctgcatccagtcgcagagctgccataccaacaagtgcccgaccggcgtcgccacccaggacccgctgcgccagcgcgcgctggtggtgccggacaaggccgagcgggtgcgcaacttccatcgcaacaccctcaagggcctggccgagatgctcgccgcggcgggcctggaacatccctcgcagctcgaagccaagcacctggtgcgacgcatcaccgacaccgagatccgcctgttctcgcagctgcactacttcctcaagccgggcgaactgctttccggcaagatcgagggcgagttctacgagcgcatgtggaacatggcgcgggccgacagcttcgacgcggcggcctga

SEQ ID NO: 30318 - DNA, 372 bp, Pseudomonas aeruginosa
gtgtcgccttcccccttcaaaggccagaccggcctcaagcgtatcctcaacgccaccggctattccctcgcaggtttcctcgccgccttccgcggtgaagccgccttccgccaactggtgctgctcaacgtggtgctgatcccggtggccttcctcctcgacgtcagtcgcggcgaacgcgcgctgatgatcgcggtgtgcctgctggcgctgatcgtcgagctgctcaactcggcgatcgaggccaccgtcgaccgcgtctcgctggaacgccaccctctgtcgaagaatgccaaggacatgggcagcgccgcgcagttcgtggccctcaccgtgatcaccgtgacctgggcgaccatcctgctgggctga

SEQ ID NO: 30319 - DNA, 1404 bp, Pseudomonas aeruginosa
atggcatcactgacgtttctaggcgccgcccaggaggtcactggctcctgttatctgctggaaaccctcgatggcgtgaaggtcctgctcgaatgcggcatgcgccaggggcgccgcgaagccgacaacggcaaccgcgcgcccttccccttcgatcccgcgagcatcgacgcggtggtcatctcccacgcccacctggaccacagcggcctgctgccgcgcctggcggccgagggcttcaagggcccgatcttcgccaccgaggccacctgcgaactgctggaactcatgctgctggactccgcgcacatccaggaaaaggacgccgagtgggagaaccgctggcgcaaccggatcggcaagccgagcatcaagccgctgtatacccaggccgacaccgaacgcgcgctcaagctgcgccggccgatcagcctcggcagcaccgtggcggtcgctcgtggcgtgcgggtgacctttcacaacgccgggcacatcctcggctcgtcgatcgtcgaagtgcaattccacgaccaggtgcaaccgcgccgcctggtgttttccggcgacctcggcaacacctgctcgccgttgatgcgagcgccctcgccgctgagccgggccgacgtggtgatgctcgaatccacctacggcgatcgcgatcaccgcgacagcaacgacaccctggaggaactggcggcgattctcgaccaggcgcatcgcgacggcggcaacgtgctgatcccgtcgttcgccgtcggtcgcacccaggacctgctctactacctcggccgcttctaccaggagggccgcctgccgcaacaggcggtattcctcgacagcccgatggccgcccgtgccaatggcatctacctgcgccacagcaacgagttcgacgaccgcgaccgcgagtacattcgcggcaccggcaccacccgcctggaggaatggctgccggtgctgcgcgtcacccgcagcgccgacgagtcgatggcgatcaaccggatcaagagcggcgcggtcatcatcgccggcagcggcatgtgcaccggcggccgtatcgtccatcacttcaagcacaacctctggcgcccggaatgccatgtggtattccccggcttccaggcgcgcggcaccctgggccgcaacatcgtcgacggcgccagcgcggttcgcgtgttccaccagcgcatcgcggtcaaggcgcagatccataccctcggcggcttctccgcccacgccgggcaatcgcagctgctcgactgggtcggtcacttcgcccaccgtccagcgctatacctgatacatggcgagcgggaaaagatggaagcgctgcagagcgcgatccgcgagcgtctcgactgggatgccgagataccggaacccggcgaacgcatcgagatctga

SEQ ID NO: 30320 - DNA, 462 bp, Pseudomonas aeruginosa
atggcgatcgtgctcgatacgcccgtcgccgtgcggcgggcggccatggatctgctggcgcgccgtgagcacgggcgcgccgagctttcccgcaagttgcgccagcgtggcgcgtctgccgagttgatcgatcctgccctcgaccgcctggccgaggaaggtctgctcgacgaatcccgctatctcgaaagcttcatcgccagtcgcgcccgtagcggccatgggccgttgcgcatccgtgaggaactggcgcagcgcggtctgccgcgcgccgatatcgaaagggcgctgggtgcctgcgaggtcgactggagtgcgcaattgcgtgaggtctggcgccgcaagttcgcccgcctgccgcaggacgccagggaaaaggcccagcagggccgcttcctggcgtaccggggttactccatggagtcgatcagccgcctgttgaacggccgcagcgacgattga

SEQ ID NO: 30321 - DNA, 1041 bp, Pseudomonas aeruginosa
atggacgagaacaagaagcgcgccctggccgcggccctgggacagatcgaacgccaattcggcaaaggcgcggtcatgcgcatgggcgaccatgagcgccaggcgatcccggccatctccaccggctccctgggtctggacatcgccctcggcatcggcggcctgcccaagggccggatcgtcgagatctacggtccggaatcctcgggcaagaccaccctgaccctctcggtgatcgccgaggcccagaaacagggcgccacctgtgccttcgtcgacgccgagcacgcgctcgatcccgactatgccggcaagctgggcgtcaacgtcgacgacctgctggtctcccagccggacaccggcgagcaggccctggaaatcaccgacatgctggtgcgctccaacgcggtcgacgtgatcatcgtcgactccgtggccgcgctggtacccaaggccgagatcgaaggcgagatgggcgacgcccacgtcggcctgcaggcacgcctgatgtcccaggcgctgcgcaagatcaccggcaatatcaagaacgccaactgcctggtcatcttcatcaaccagatccgcatgaagatcggcgtcatgttcggcaacccggaaaccaccaccggcggtaacgcactgaagttctacgcctcggtccgcctggacatccgtcgtaccggcgcggtgaaggaaggcgacgaggtggtgggtagcgaaacccgcgtcaaggtggtgaagaacaaggtttccccgccgttccgccaggccgagttccagatcctctacggtaagggcatctaccgtaccggcgagatcatcgatctgggcgtgcaattgggcctggtcgagaagtccggcgcctggtacagctaccagggcagcaagatcggccagggcaaggcgaacgccgccaagtacctggaagacaatccggaaatcggttcggtactggagaagaccattcgcgaccagttgctggccaagagcggcccggtgaaggccgacgccgaagaagtggctgacgccgaagccgattga

SEQ ID NO: 30322 - DNA, 2568 bp, Pseudomonas aeruginosa
atgaccgacctctcccagcacacgccgatgatgcagcagtacttcaaactgaagcatcagcaccccgaccaattgatgttctatcgcatgggcgacttctacgagctgttctacgaggacgcgaagaaggccgccaaactgctcgacatcaccctgaccgcacgcggccagtccggcggcaaggcgatcccgatggcaggcattcccttccattcggcggagggctacctggccaagctggtcaagctcggcgagtcggtggcgatctgcgagcagatcggcgacccggccaccagcaaggggccggtggagcgccaggtggtgcggatcatcacccccggcacggtgagcgacgaggcgctgctcgacgaacgccgcgacaacctgctggcggcgatcctcggcgacgagcgcctgttcggcctcgccgtgctggacatcaccagcggccgcttcagcgtccaggagataaaaggctgggaaaccctgctggccgaactggagcgcctcaacccggccgagctgctgattccagacgactggccacagggcctgccggcggagaagcgccgcggcgtacgtcgccgcgcgccatgggacttcgatcgcgactcggcgcacaagagcctctgccagcaattcggcacccaggacctgaaaggcttcggctgccagaacctgaccctggccatcggcgccgccggctgcctgctcgcctacgccaaggaaacccagcgtaccgccctgccgcacctgcgcagcctgcgccacgaccgcctcgatgacacggtgatcctcgacggtgccagccgccgcaacctggagctggatatcaacctcagcggtggccgcgagaacaccctgcaatcggtggtcgaccgctgccagaccgccatggccagccgcctgatgagccgctggctgaaccgtccgttgcgtgaccgcgcggtactggaagcccgccaggagtccatcgcctgcctgctggaacgctaccgcttcgagaacctgcaaccgcagctcaaggaaatcggcgacctcgaacgcatcctcgcccgcatcggcctgcgcaacgcccgccctcgcgacctggcgcgcctgcgcgacgcgctggcggcgctgccggacctgcagaacgccatgaccgaactggaagcgccgcacctgcaggcgctggccaccaccatcggcacctatcccgaactcgccgaactgctggccaaggcgatcatcgacaacccgccagcggtgatccgcgacggtggcgtgatcaagaccggctatgacgccgagctggacgagctgcaggcgctgagcgaaaacgccgggcaattcctgatggacctggaagcgcgcgagaaggcccgcaccggcctgcccaacctgaaggtcggctacaaccgcatccatggctacttcatcgagctgccacgggtgcaggccgaacaggcgccggccgactacatccgccggcagaccctgaaaggcgccgagcgcttcatcacgccggaactgaaggccttcgaggacaaggcgctgtcggcccagagccgcgccctggcccgcgagaaggcgctctacgaagagctgctggaacgcctgatcggccacctcgctccgctccaggacagcgcctcggcgctggcggaactggacgtgctggcgaatctcgccgaacgcgcgctgaacctcgacctgaatcgcccgcggttcgtcgaacacacctgcctgcacatcgagcagggccgccatccggtggtcgagcaggtgctggagacaccgttcgtggccaacgacctggcgctggatgccgacacccggatgctggtgatcaccggtccgaacatgggcggtaaatccacctacatgcggcaaaccgcgctgatcgtgctgcttgcgcacatcggcagcttcgttccggctgcacgctgcgagctgtccctggtggaccgcatcttcacccgcatcggctcgtccgacgaccttgccggcggccgctcgaccttcatggtggagatgagcgaaaccgccaacatcctgcacaacgccaccgacaagagcctggtgctgatggatgaggtcggccgcggcaccagcaccttcgacggcctgtcgctggcctgggcagcggccgaggacctggcccggactcgcgccttcaccctgttcgccacccactatttcgaactgaccgtactgccggaaagccagcccgcggtagccaacgtgcacctgaacgcgaccgagcacaatgaacgcatcgtgttcctgcaccatgtactgccgggaccggcgagccagagctacggcctcgcggtggcccagttggccggcgtgccggccccggtaatccagcgcgcccgcgaacacctcaagcgcctggaaaccaccagcctgccgcacgagatgccgagccagcagagcggcaagcccgcctcgccgatgcagagcgacctgttcgccagcctgccgcacccggtgatcgatgaattgtcgaggatcaatcccgacgatatcagcccgcggcaagctctcgatctgttatatgcatggaagatgcgggtctga

SEQ ID NO: 30323 - DNA, 474 bp, Pseudomonas aeruginosa
atgcgaattggccatggctacgacgtgcatcgcttcggcgagggcgacttcatcaccctcggcggcgtgcgcattccccacaaacatgggctggtcgcccactccgacggcgacgtgctgctgcacgccttgtccgatgcgctgctcggcgcggcggcgctgggcgacatcggcaagcacttcccggacaccgacccgcggttcaagggcgccgacagtcgcgcgctgctgcgacacgtggtcgccatcgtcgccgagaagggctggaaggtcggcaacgtcgacgccacgatcgtcgcccaggcgccgaagatggcgccgcacatcgagaccatgcgcgggttgatcgccgaggacctcggcgtcgcggtcgaccaggtcaacgtcaaggccaccactaccgagcggctaggtttcaccggacgcgaagagggcattgctgtacatgcggtcgctttgctgatggcccgatga

SEQ ID NO: 30324 - DNA, 852 bp, Pseudomonas aeruginosa
gtgaaggattccctcgaactgatcggcagccagaagaccttcggcggctggcaccagcgttaccgtcatttttcccggaccctgaactgcgagatggtcttcgccatctacctgccgccccaggccgagccggaggcggcgctgccggccctgtactggctgtccgggctgacctgtaccgacgagaacttcatgcagaaggccggcgcccagcgggtcgccgccgaactgggattggtactggtggcgccggataccagcccgcgcggcagcggtgtccccggcgatcccgacggcgcctgggacttcggcctgggcgcaggcttctacctgaacgccacgcaggagccctgggccgcgcactaccgcatgcacgactacgtggtgcacgagttgccggcgctgatcgaggcgcatttcccggtgtcccggcggcgcggcatcagcgggcactcgatgggtgggcatggcgcgctggtttgcgcgctgcgcaacccggggcgctacctgtcgctgtcggccttcgcgccgatctgccatccgagcgattgtccctggggccagaaggcgttctcccgctacctgggcgaggacccggcggcctggcgcgagtgggatgcctgtgcgttgctcgagggtgcgtccgaacgcttgccgatcctggtcgaccagggcgagcgcgacgacttcctcgccgtccagctcaagccggaagcgctacgcaatgcggcggacaaggccggccacccgctggagctgcgtctgcaaccaggttacgaccacagctactacttcatcgccagtttcatcgaggatcacctgcgccatcatgccggggttctcaacggttga

SEQ ID NO: 30325 - DNA, 705 bp, Pseudomonas aeruginosa
atgacgacttccgaccttcccgccttctggacggtgatccccgccgccggcgtgggttcgcgcatgcgcgccgaccgcccgaagcaatatctcgatcttgccggtcgcaccgtgatcgagcgtaccctcgattgtttcctcgaacacccgatgctcaggggcctggtggtctgcctggccgaggacgatccctactggcccgggctggactgcgccgccagccggcatgtgcagcgcgccgccgggggcgccgagcgcgccggctcggtgttgaacggcttgctgcgcctgctggagttgggggcacaggccgacgactgggtgctggtgcatgacgccgcgcggccgaacctgacccgcggcgacctcgaccgcctgctcgaagaactcgccgaagatccggtcggcgggctgctggcggtgccggcgagggacactctcaagcgctccgaccgcgacggccgggtcagcgaaaccatcgaccgctcggtggtctggctggcctatacgccgcagatgttccgcctcggcgccctgcaccgggcgctggccgatgcgttggtggccggcgtggcgatcaccgacgaggcttcggcgatggagtgggccggctatgcgccgaagctggtggaagggcgcgccgacaacctgaagatcaccaccccggaagacctgctgcgcctgcagcgcagttttccgcactga

SEQ ID NO: 30326 - DNA, 1290 bp, Pseudomonas aeruginosa
atggcaaagatcgtcgacatcaagggccgtgaggtcctggactcccgcggcaaccctaccgttgaagcggacgtgatcctggacaacggcatcgtcggcagcgcctgcgcgccttccggtgcttccaccggttcccgcgaggccctcgagctgcgcgatggcgacaagagccgttacctgggcaagggcgtgctgaaagccgtggccaacatcaacggcccgatccgcgacctgctgctgggcaaggacgcggccgaccagaaagccctcgaccacgcgatgatcgagctggacggcaccgagaacaaggccaagctgggcgccaacgcgatcctcgcggtgtccctggctgccgccaaggccgccgcacaggccaagggcgtaccgctgtacgcgcacatcgccgacctcaacggcactcccggccagtactccatgccggtgccgatgatgaacatcatcaacggcggcgagcatgcggacaacaacgtcgatatccaggaattcatggtccagccggtcggcgcgaagaacttcgccgaggcgctgcgcatgggcgccgagatcttccatcacctcaaggccgtgctgaaggcccgtggcctgaacaccgccgtcggtgacgaaggcggcttcgcgccgaacctgtcgtccaacgaagacgccctggccgccatcgccgaggccgtcgagaaggccggctacaagctgggcgacgacgtgaccctggccctggactgcgcctccagcgagttcttcaaggacggcaagtacgacctggaaggcgaaggcaaggtattcgacgccgccggtttcgccgactacctggccggcctgacccagcgctacccgatcatctccatcgaggacggcatggacgagtccgactgggccggctggaaaggcctgaccgacaagatcggcgccaaggtccaactggtcggcgacgacctgttcgtgaccaacaccaagatcctcaaggaaggcatcgagaagggcatcggcaattcgatcctgatcaagttcaaccagatcggttcgctcaccgagaccctggaggccatccagatggccaaggccgccggctataccgcggtgatctcgcaccgctccggcgaaaccgaggactcgaccatcgccgacctggccgtgggtaccgccgccggtcagatcaagaccggttcgctgtgccgctccgaccgcgtgtccaagtacaaccagttgctgcgcatcgaagagcaactgggcgccaaggcgccgtaccgtggtcgcgcggaattccgcggctga

SEQ ID NO: 30327 - DNA, 846 bp, Pseudomonas aeruginosa
atggcacagaagatcgttcgcgtcggcgatatccagatcggcaacgacctgccgttcgtgctgttcggcggcatgaacgtgctggagtcgcgcgacctggccatgcaggtctgcgaagaatacgtacgggttaccgagaaactcggtatcccctatgtgttcaaggccagcttcgacaaggccaaccgttcctcgatccactcgttccgtggtccgggcctggaagagggaatgaagatcttcgaagagatcaagaagaccttcaaggtaccggtcatcaccgatgtccacgagccgttccaggcccagccggtggccgaggtctgcgacatcatccagctgccggccttcctctcgcgacagaccgacctggtggtggcgatggccaggaccaacgcggtgatcaatatcaagaaggcccagttcctcgcgccccaggagatgaagcacatcctgaccaagtgcgaggaagccggtaacgaccgcctgatcctctgcgagcgcggctcctccttcggttacaacaacctggtggtcgacatgctcggcttcggcatcatgaagcagttcgagtacccggtattcttcgacgtcacccacgccctgcagatgcctggcggtcgcgcggactccgccggcggccggcgcgcccaggtcaccgacctggccaaggccgggctcagccagaagctcgccgggctgttcctcgaggcccatccggaccccgagcacgccaagtgcgacggtccgtgcgcgctgcgcctgaacaaactcgaagccttcctgtcccagctcaagcaactggacgagctgatcaagagctttcctgcaatcgagactgcctag

SEQ ID NO: 30328 - DNA, 1629 bp, Pseudomonas aeruginosa
atgacgcgctacatcttcgtcacgggtggtgttgtttcttcattggggaaaggcatcgcttcggcttctctggctgcgatcttggaagcgcgtggcctgaagatcacgatgctcaagctggacccttacatcaacgtggacccgggcaccatgagcccgttccagcacggtgaggtcttcgtgacccaggacggcgccgagaccgacctggacctgggccattacgagcgcttcgttcgtaccaccatgacccagaacaacaacttcaccaccggccgcgtctacatggacgtgttgcgcaaggaacgccgcggcgactacctgggcgccaccgtgcaggtgatcccgcacatcaccgacgagatcaagcggcgcatcatcaagggcgccggcgatgccgacgtcgccctggtggagatcggtggcaccgtcggcgacatcgagtcgcagccgttcctcgaggcgatccgccaactgcgcgtcgagatcggcgccaagcgcgcgatgctgatgcacctgaccctggtcccgtacatcgccaccgccggcgagaccaagaccaagccgacccagcactcggtcaaggagctgcgctccatcggcctgcaaccggacgtgctggtctgccgttccgaccacccgatcgacgtctcctcgcggcgcaagatcgcgctcttcaccaacgtcgaggagcgcgcggtgatcgccctggaagacgtcgacaccatctaccgcatcccgtcggtgctgcatgcccagggcctagacgacatcgtcgtcgagcgcttcggcctggagtgcgggcaggccgacctgtccgaatgggaccgggtggtcgatgccaagctcaaccccgagcgtgaagtcaccatcgccatggtcggcaagtacatggaactgctggacgcgtacaagtcgctgatcgaggcgatgacccacgccggcatccagagccgcaccaaggtcaacctgcgctacatcgactccgaagacatcgagcagcagggcaccagcctgctggaaggcgtcgacgccatcctggtcccgggcggcttcggcctgcgcggcgtggaaggcaagatcagcaccgtgcagtacgcccgcgagaacaagattccctacctgggcatctgcctgggcatgcaggtcgcggtcatcgaatacgcccgcaacgtgctcggctggagcgacgccaactccaccgagttcgacaagtccagcggccatccggtggtcggcctgatcaccgaatggcaggacgcgaccggcgccaccgagatccgcaccgaagcttccgacctgggcggcaccatgcgcctgggcgcccaggagtgccagctgcagaccggcaccttggtgcacgactgctatgccaaggacgtgatcgtcgagcgccatcgccatcgctacgaagtgaacaacaacctgctgccgcaactggaacaggccggcctgaagatttccggccgctccggcgacggcgccctggtggaagtggtcgaggccccggagcatccgtggttcgtcgcctgccagttccacccggagttcacctccacaccgcgtgatggccacccgctgttcagcggtttcgtcaacgccgcgctgaaatattccgggaaggcctga

SEQ ID NO: 30329 - DNA, 951 bp, Pseudomonas aeruginosa
atgaacccgaactttcttgatttcgaacagccgatcgccgacctgcaagccaagatcgaagagctgcgcctggtgggcaacgacaatgcgctgaacatcagcgacgaaatctcgcgtctgcaggacaagagcaaggcgctcaccgaaaacatcttcggcaatctgtccagttggcagatcgcccagctcgcgcgccatcccaagcgtccctataccctcgactacatcggctacctgttcagcgatttcgaggaactgcacggcgaccggcatttcgccgacgacccggcgatcgtcggcggcgttgcccgcctcgacggttccccggtgatggtcatcggccaccagaagggccgcgaagtccgtgagaaggtccggcgcaacttcggcatgccgcgtccggaaggctatcgcaaggcctgccgcctgatggaaatggccgaacgcttcaagatgccgatcctcaccttcatcgacacgcccggcgcctacccggggatcgatgccgaggaacgcggccagagcgaggcgatcgcctggaacctgcgggtgatggcgcgactgaagacgccgatcatcgccaccgtgatcggcgagggcggttccggcggcgcgctggccatcggtgtctgcgaccagttgaacatgctgcaatactccacctattcggtgatctcgccggaaggctgcgcctccatcctctggaagaccgccgagaaggcgccggaagccgccgaggccatgggcatcaccgccgagcgcctgaaaggcctgggcatcgtcgacaaggtcatcgacgaaccgctgggcggcgcccatcgcgatccggcgagcatggccgaatcgatccgtggcgaactgctggcgcaactgaagatgctccagggcctggaaatgggtgagttgctggagcgtcgttacgaccgcctgatgagctacggcgcgccgtaa

SEQ ID NO: 30330 - DNA, 3522 bp, Pseudomonas aeruginosa
atgaccgtatccttcgttcacctgcgtctgcataccgaattctccctggtcgacggcctggtccgggtcaagcccctggccaaggcagtggcagggctgggcatgccggcggtggcggtcaccgaccagagcaacatgtgctcgctggtgaagttctacaagaccgccatgggcgccggcatcaagccgatctgcggggccgacatctggctcgccagccgcgaggaagatggcccgctcagtcgcctgagcctgctggcgatgaacgcgaagggttatcgcaacctcaccgagctgatttcccgcggttggagcgaaggccagcgcaacggcgagatcatcatcgaacgcgactgggtcaaggaggcggcggaaggcctgatcgcgctgtccgcggccaaggagggcgagatcggccacgcgctgctcgacggcgaggaagccaaggccgaggcgctgttgcgcgagtggatggaggtgttccccgagcgcttctacgtcgaagtgcaacgtaccagccgggtcaacgacgaggagcacctccacgcggcggtggctttggcgtcacgctgcaacgcgccgctggtggcgaccaacgacgtgcgcttcatcaagcaggaagacttcgaggcccacgagacccgcgtctgcatcggcgagggtcggaccctcgacgatccgcggcggccgcgtacctattcggaccagcaatacctgaagtcgccggcggaaatggccgagctgttcagcgacctgccggaagcgttggaaaacaccgtcgagatcgccaaacgctgcaacatcgaggtgcagctgggcaagtacttcctgccggacttccccacgcccaatggcatgggcatcgacgactacctgcggcacgcctccttcgaaggtctcgaggagcgcctggaggtgctgttgccgaaggacaccccggactacgaggccaagcgccaggtctatgtcgatcgcctgaacttcgaactcgatatcatcatccagatgggtttccccggttacttcctcatcgtgatggacttcatcaagtgggcgaagaacaacggcgtaccggtaggccccgggcggggctcgggcgccggctcgctggtggcctacgtgctgaagatcaccgacctcgatccgctggcctatgacctgctgttcgaacgtttcctcaacccggaacggatctccatgcccgacttcgacgtcgacttctgcatggagggccgcgaccgggtgatcgactacgtggccgacgcctacgggcgcaacgcggtgagccagatcatcaccttcggcaccatggcggcgaaggcggtggtacgcgacgtggcgcgggtccagggcaagtcctacggtctcgccgaccggctgtcgaagatgatcccgttcgaagtcggcatgaccctggataaggcctacgagcaggaagaaatgctccgcgacttcctcaagagcgacgaggaagccgccgagatctgggagatggccctcaagctggaaggcatcacccgcggtaccggcaagcacgccggtggcgtggtgatcgcgccgaccaagctgaccgacttctcgccgatcgcctgcgacgaggaaggcggcggcctggtgacccagttcgacaaggacgacgtggaggcggccggcctggtgaagttcgacttcctcggcctgcggaccctgaccatcatcaagtgggcgatggagatcatcaaccgcgagcaggccaagaagggcctggagccggtgaacatcgacttcatcccgctggacgacaagccgacctattcgctgctgcagaaggccgagaccactgcggtgttccagctcgaatcgcgcggcatgaaggagctgatcaagaagctcaagccggactgcctggaagacctcatcgcactggtggcgctgttccgcccgggtcctctgcagtcgggcatggtggacgacttcatcaaccgcaagcacggtcgcgccgagctgtcctatccgcaccccgattaccagtacgccggcctggagccggtgctcaagcccacctacggcatcatcctgtaccaggaacaggtgatgcagatcgcccaggtcatggccggctataccctcggtggcgcggacatgctgcgccgggcgatgggcaagaagaagcccgaggaaatggccaagcagcgcggcggtttcatcgagggttgcaagaacaacggcatcgatgccgacctcgcgggcaacatcttcgacctggtggaaaaattcgccggctacggcttcaacaagtcgcactcggcagcctacggcctggtctcctaccagaccgcctggctgaagacccacttcccggcgccgttcatggccgcggtactcaccgcggatatgcagaacaccgacaaggtggtgacgctgatcgaagaatgccggcacatgaagctgcgcatcgtggcgccggacgtgaacaactccgagttccgcttcaccgtcgacgacgatggccggatcgtctatggcctgggcgcgatcaagggcgtcggcgaggggccggtggaggcgatcaccgaatgccgcgccgaaggcgggccgttcaacaccctgttcgacttctgcgaccgcgtcgacctgaaacgcatcaacaagcgcaccctggaagcgctgatccgcgccggtgcgctggatcgcctggggccgcactaccacgacgagctaaaggcctaccaggctaccgtcgacctcaaccgcgccgtgctgctggcggcgatggaggaagcgatccaggccgccgagcagaccgcgcgcagccacgacagcgggcacatggacctgttcggcggagtcttcgccgagccggaggcggatgtctacgccaaccaccgcaaggtcaaggagctgaccctcaaggaacgcctgaagggcgagaaggacaccctcggcctgtacctgaccggccatccgatcgacgagtacgaaggcgaggtgcggcgcttcgcccgccagcgcatcgtcgagctgaagccggcgcgcgatacccagacggtggccgggctgatcgtcaacctgcgggtgatgaagaacaagaagggcgacaagatgggcttcgtcaccctcgacgaccgctccggacggatcgaggcctcgctgttctccgaagccttcgccgcggcccagtcgctgctgcagaccgacgcgctggtggtggtcgagggcgaggtcagccaggacgacttctccggcggactgcgcctgcgcgccaagcgcgtgatgagcctggaggaggcgcgtaccggcctggcggagagcctgcggatgaagctgcacgccgacctgttgaagggcgatcgcctgcgctggctgggcgagctgttcaaccgccatcgcggttcctgcccgatcaccctggactacaccagcgccgacgccaaggccctgctgcagttcggcgagagctggcgggtggatccggcggacgatctgatccaggcattgcgtgaccagttcgggcgcgacaacgtcttcctcaattatcgttaa

SEQ ID NO: 30331 - DNA, 606 bp, Pseudomonas aeruginosa
atgcaactgggtctggatttcaatctggtggaggatctggtcgcgggcgtcgacgaggtcggtcgcggtccgttgtgcggcccggtggtcaccgccgcggtgattctcgacccgagccgcccgatcctcggcctgaacgactcgaagaagctcagcgaagcccgccgcgaggcgctgttcgaagagatccgcgagaaggccctggcctggtgcatcgcccgcgccgaggtcgaggagatcgaccggctgaacattctgcatgccaccatgctcgccatgcagcgcgcggtcgaaggcctcagcgtgattccgcggctggccctgatcgacggcaatcgttgtccgaaactggcggtgccctgcgcgccggtggtcaagggcgacagccaggtgccggcgatcgctgcggcgtcgatcctggccaaggtcagtcgcgaccgggaaatggtcgagctggaccgggtctatccgggctatggcatggccgggcacaagggatatccgaccgcggtccatctcgaggcgctttcccgcctcggcccgacgccgatccatcgacgctcgtttgcgccggttcgcgaattgctggacgtctctgttcaataa

SEQ ID NO: 30332 - DNA, 441 bp, Pseudomonas aeruginosa
atgatggacatcaacgagattcgcgaatacctgcctcatcgctatcctttcctgctggtggatcgggtggtagagctggacatcgagggcaagcgcattcgcgcctacaagaatgtcagtatcaatgagccgttcttcaacggacatttccccgagcacccgatcatgccgggcgtgctgatcatcgaggcgatggcccaggcggccggtatcctcggtttcaagatgctcgacgtgaagcccgccgacggcaccctttactacttcgtcggttcggacaagctgcgcttccgccagccggtcctgccgggcgaccaactgcaactgcacgccaagttcatcagcgtgaagcgcagcatctggaaattcgactgccacgctaccgtcgacgacaagccggtatgctcggctgaaatcatctgtgcggaacgcaaactatga

SEQ ID NO: 30333 - DNA, 1062 bp, Pseudomonas aeruginosa
atgatgagtaccttgtcctacaccctgggccagctggccgcgcatgtcggcgcggaagtccgtggcgacgcggacctgccaatccagggcctggcgaccttgcaggaggccggaccggctcagctgagcttcctggccaacccgcagtatcgcaagtacctgcccgaaagccgtgccggcgccgtcctgctgacggctgccgacgccgacgggttcgccggtaccgcgctggtggtggccaacccctacctggcctatgccagcctgtcgcacctgttcgatcgcaaaccgaaggcggccgccggtatccatcctaccgccatcgtcgcggcggacgccgaggtcgatccgagcgccagcgtcggcgcctatgcggtgatcgagagtggcgcccgcatcggcgctggcgtcagcatcggcgcgcactgcgtgatcggagcccgtagcgtgatcggcgaaggcggctggctggcgccgcgagtcacgctctaccacgacgtcaccatcggcgcgcgggtgagtatccagtcgggcgcggtgatcggcggcgaaggtttcggtttcgccaacgagaagggcgtctggcagaagatcgcccagatcggcggggtgaccatcggtgacgacgtcgagatcggcgcgaacaccaccatcgaccgtggagcactgtccgatacgctgatcggcaacggtgtgaagctggacaaccagatcatgatcgcgcacaacgtgcagatcggcgatcataccgccatggccgcttgcgtcggcatttccggcagcgccaagatcggcaggcattgcatgctcgccggcggcgttggcctggtcggccatatcgagatctgcgacaacgttttcgtgaccggcatgaccatggtgacccgctcgatcaccgagccgggatcgtattcctccggtaccgccatgcaaccggcggccgaatggaaaaaaagcgccgcgcgcattcgtcaactggacgacatggcgcgtcgacttcagcagctggaaaaacgcctggctgccgtgacctcaagcggtgacgcttcatctgatgcgtaa

SEQ ID NO: 30334 - DNA, 756 bp, Pseudomonas aeruginosa
atggaaaagacccggaaggatgtgtgcgtgccacgccacgtggccattatcatggacggtaacaatcgctgggcgaagaagcgtcttctgcccggcgtcgccggccacaaggccggtgtcgatgccgtcagggcggtgatcgaggtctgcgccgaggcaggggtcgaggtcctcaccctgttcgcgttctccagcgagaactggcagcgtccggcggacgaagtcagcgcgctgatggagctgtttctcgtggccctgcgccgcgaggtgcgcaagctcgacgagaacggcatccgcctgcgcatcatcggcgatcgcacgcgtttccatccggagttgcaggcggccatgcgcgaagcggaagccgccactgccggcaatacccgtttcctcctccaggtcgccgccaactacggcggccagtgggacatcgtccaggccgcacagcgcctggcgcgcgaggtccagggcgggcacctggcggcggacgatatctccgccgagctgctccagggctgcctggtgaccggcgaccagccgctgcccgacctgtgcatccgcaccggcggcgagcatcgcatcagcaatttccttctctggcagctggcctacgccgagctgtatttctccgacctgttctggcccgacttcaagcacgcggcgatgcgggctgccctggcggatttctccaagcgccagcgccgcttcggcaagaccagcgagcaagtcgaggccgaggcccgtccgtcatgctga

SEQ ID NO: 30335 - DNA, 558 bp, Pseudomonas aeruginosa
atgatcaacgagatcaagaaggaagcgcaggagcgcatgggcaagaccctggaagcgctgggccatgccttcgcgaagattcgtaccggtcgcgcgcatccgagcatcctggatagcgtgatggtttcctattacggggccgatacgccgctgcgccaggtcgccaacgtcaccgtggaagactcccgtaccctggccctggccgtgttcgacaagagcatgatccaggcggtcgagaaggccatcatgacctccgacctggggctcaacccggccaccgccggcaccaccatccgcgtaccgatgccggccctgaccgaggagacccgcaagggctacaccaagcaggcgcgtgccgaggccgagcaggcgcgggtttccgtgcgcaacatccgtcgcgatgcgctggcccagttgaaggacctgcagaaggaaaaggaaatcagcgaggacgaagagcgccgcgccggcgacgacgtgcagaagctgaccgacaagttcatcggtgagatcgagaaggcactggaagccaaagaagcggacctcatggctgtctga

SEQ ID NO: 30336 - DNA, 738 bp, Pseudomonas aeruginosa
atggctcagcaactgagcgctcgtcaacctcgctataaacgcattcttctaaagttgagcggcgaagccctgatgggctcggaggagttcggcattgatcccaaggtgctggaccgcatggcgctggaaatcggccagttggtcgggatcggcgtgcaggtcggcctggtcatcggcggcggcaacctgttccgcggcgcggccctgtccgcggccggcatggaccgggtgaccggcgaccacatggggatgctggccaccgtgatgaacggcctggcgatgcgcgatgcgctggagcgctcgaacatccccgcgctggtgatgtcggcgatctccatggtcggtgtgaccgaccactacgaccgccgcaaggccatgcgccacctcggcggtggcgaggtggtgatcttctccgccggtaccggcaacccgttcttcaccaccgactcggcggcttgcctgcgcgccatcgagatcgacgccgacgtggtccttaaggctaccaaggtcgatggcgtgtacactgccgacccgttcaaggacccgaatgccgagaagttcgagcgcctgacctatgatgaagtgctcgaccgcaagctcggcgtgatggacctgaccgccatctgcctgtgccgtgaccagaacatgccgctgcgggtgttcaacatgaacaagccgggcgcattgctgaatattgttgttggtggtgccgaaggcaccctgatcgaggagggttga

SEQ ID NO: 30337 - DNA, 870 bp, Pseudomonas aeruginosa
atggcagaaattactgcagccatggttaaagaactgcgcgagcgtaccggcttgggcatgatggagtgcaagaaggcgctgaccgccgctggcggcgacatcgagaaggccatcgacgacatgcgcgctgccggtgcgatcaaggctgccaagaaggccggcaacattgccgccgaaggctcgatcgccgtcaagatcgctgccgacaacaaggccgccgtgatcatcgaagtcaactcccagaccgacttcctggccctccaggacgacttcaagggcttcgtcgccgagagcctggaaaaggccttcaacgagaagctgaccgacgccgctccgctggtcgaagcacgtgaggaagctcgtctggccctggtcgccaagaccggcgagaacgtcaacatccgccgcctgacccgcgtcgagggcgacgtggtcggcgcctacctgcacggccaccgcatcggtgtcgtggtcaacctgaaaggcggcaacccggaactggccaaggacatcgccatgcatgtcgccgccagcaacccgcagttcctgagcgcttcggaagtttccgaagaagcgatcgcgaaagagaaggaaatcttcctggcgctgaacgccgacaagatcgccggcaagccggagaacatcgtcgagaacatggtcaagggccgcatcagcaagttcctcgccgaagcgagcctggtcgagcagcctttcgtgaagaacccggaagtgaaggtcggcgacctggccaagcaggccggtgccgaaatcgtttccttcgttcgttacgaagtgggtgaaggcatcgagaaggccgaagtggacttcgctgccgaagttgccgctcaagtagccgccaccaagcagtaa

SEQ ID NO: 30338 - DNA, 741 bp, Pseudomonas aeruginosa
atgtcccaagtcaacatgcgcgatatgctgaaggccggtgtgcacttcggccaccagacccgttactggaacccgaaaatgggcaagttcattttcggcgcgcgcaacaagatccatatcatcaacctcgaaaagaccctgccgatgttcaacgaggccctgaccttcgttgagcgcctggccgctggcaagaacaagatcctgttcgtcggcaccaagcgttccgccggcaagatcgttcgcgaggaagccgctcgttgcggtatgccgtacgtcgaccatcgctggctgggcggcatgctcaccaactacaagaccatccgtcagtcgatcaagcgcctgcgcgacctggaaacccagtcccaggacggcaccttcgacaagctgaccaagaaagaagccctgatgcgcagccgtgacctcgagaagctcgagcgcagcctgggcggcatcaaggacatgggcggcctgccggacgctctgttcgtgatcgacgtcgaccacgagcgcatcgccatcaccgaagccaacaagctgggcatcccggtcatcggcgttgtcgataccaacagcagcccggaaggcgtcgactatgtaattcccggtaacgatgatgccatccgcgccgtgcaactctacctgaactcgatggccgaagcggtaatccgcggcaagcagggcgctgccaccagcgccgacgagttcgtcgaggaagcgccggccgaatccgccgaaggctga

SEQ ID NO: 30339 - DNA, 2703 bp, Pseudomonas aeruginosa
atgccgcaggtggatcccgaattgttcgatcgcgggcagttccaggcggaactggccttgaagtccagcccgatcgccgccttcaagaaggccatccggcaattccgcgaagtgctcgacaaccgcttcaacagcggccgcgacatccgccgcctgatcgaagatcgcgcctggtgcgtcgaccagatcctgcaacaggcctggcagcgcttcgactggggagacgacgccgacatcgccctggtcgccgtgggcggctacggccgcggcgaactccacccctactccgacgtcgacctgctgatcctcctcgacagcgaggaccaggagagcttccgcgaaccgatcgaaggcttcctcaccctgctctgggacatcggcctggaagtcggccagagcgtgcgctcggtgcagcagtgcgcggaggaagcacgcgccgacctgacggtgatcaccaccctcatggaatgccgcaccatctgcggccctgacagcctgcgccagcgcatgctgcaggttaccggcagcgcgcacatgtggccgagcaaggagttcttcctggccaaacgccacgaacagcagcgccgccacgccaagtacaacgacaccgagtacaacctcgagcccaacgtcaagggctcccccggcggcctgcgcgacatccagaccatcctctggatggcccgccgccagttcggcagcctcaacctgcacgccctggtgcgcgaaggcttcctggtggaaagcgagtgcagcatgctggcttccagccaggagttcctctggcgggtccgctatgccctgcacatgctcgccgggcgcgccgaggatcgcctgctgttcgatcaccagcgcagcatcgcccgtctgttcggctacgaagacaacgacgtcaaactggcggtcgaacgcttcatgcagaagtactaccgggtggtgatggcgatctccgagctgaacgacctgatcatccagcacttcgaggaagtcatcctgccctgcgagcagccggtgcagatccagccgctgaacagtcgcttccagttgcgcgacggctacatcgaggtgacgcacccgaacgtcttcaagcgcaccccgttcgccctcctggaaatcttcgtgctgatggcccagcacccggaaatcaagggcgtgcgcgccgacaccattcgcctgctgcgcgacagccgacacctgatcgacgacgagttccgccacgacatccgcaacaccagcctgttcatcgagctgttcaagagcagccagggtatccaccgcaacctgcggcggatgaaccgctacggcatcctcggccgctacctgccggagttcggccatatcatcgggcagatgcagcacgacctgttccatatctatacggtggacgcccacaccctcaacctgatcaagcacctgcgcaagctgaatcggccggagatggccgagaaatatccgctggcgagcaagatcatcgatcgtctgcccaagccggaactgatctacatcgccggtctctaccacgacatcgccaagggccgtggcggcgaccactcggaactcggcgcggtggacgccgaggccttctgccagagccaccagttgccgctctgggacacccaactggtgtcctggctggtgcagaaccacctggtgatgtcgaccaccgcgcaacgcaaggacctctccgacccgcaggtgatcttcgatttcgcccaactggtcggcgaccagacccacctcgactacctgtacgtgctcaccgtggccgacatcaacgccaccaacccgacgctctggaactcctggcgcgccagcctgctccggcagctctacaccgagaccaagcgcgccctgcgccgcggcctggagaacccggtggaccgcgaggagcagatccgccagacgcagaccgcggccctcgaccaactggtacgcaacggcatcgaccaggacgatgccgagcagttatggagccagctcggcgacgactacttcctgcgccacaccgccggcgacgtggcctggcacaccgaggcgatcctccagcacccggacgacggcacgccgctggtgctgatcaaggaaaccacccagcgcgagttcgagagcggttcgcagatcttcatctacgccgccgaccagcacgatttcttcgcggtcaccgtggccgccatggaccagctcaacctgagcatccaggacgcgcggatcatcacctccaccagccagttcaccctcgatacctatatcgtgctcgacgccgacggcgactccatcggcaacaacccggagcgcatcgccgagatccgcgaggggcttatcgacgcattgaagaaccccgacgactacccgaccatcatccagcgccgggtgccgcgccagctcaagcacttcgccttcgccccgcaggtgaccatctccaccgacgcgctgcgccaggtctcggtgctcgaagtcatcgcccccgaccgccccggcctgctggcgcggatcggcggcatcttcctggatttcgacctgtcggtgcagaacgccaagatcgccaccctcggcgagcgcgtggaggacgtcttctacatcaccgatgcgcgcaaccagccgctcgccgaccccgacctgtgcaaacgcctgcaggccgccctggtcgagcagctgtcacaagacaacggacgggacaccctgcctacccggataaacttctga

SEQ ID NO: 30340 - DNA, 1746 bp, Pseudomonas aeruginosa
atgtcggatagctgcctaccgatcgcgatggtgcaatcggcgcagtcgcatcgtccagggacgaagccggagatccccgccctcatgcaaaccgtgtacaccgttctgaccctgctgctggtcgtcggcgccacccgcctggctgcccagttgctgcccttgccgctaccattgatccagatcgccgccggggccctgctggccttgccctccctcgggctgcacattgccctcgacccggagctgttcctcttcctgttcattccgccgctgctgttcgtcgatggctggcgtattcccaagcgggaagtctggcggatgcgctggccgatcctgatgatggcgttcggcctggtgttcttcaccgtggtcggcgccggctatttcatccatctgctgatcccggaaattcccctggcggcttccttcgccctcgccgccgtgctgtcgcccacggacgccctggcggtctcggcgatcacccaggggcggctgcccaagcgcctgatgcacctgctggagggcgaggcgctgatgaacgatgcctctggcctggtggcattcaagttcgccatcgccgcggcgatgaccggcgtgttctcgctggtggacgccagcctcaacttcctcgtggtcgcggtcggcggcctggccatcggggtgttcctcagctggtcgctgggccgcatccgcgcctggatgatctcccgtggctgggacgacccggcgacccacgtggtactgatgctgttgctgccgttcgcctcctacatggtggcggaacacctgggcgtctccgggattctctcggcggtggcggccggcatgatgcagagctgggtcgacctgctgccgcggcagacttccacgcgcctgctcaaccgcagcgtctggtcgatgctggagttcgccttcaacggcgtggtgttcctgctgctcggcctgcagttgccggacatcatgaagtcggtggccaaccaccacggcgacctgctctggcgttcctcgctgctgctggcctacgtggcggcgatcaccgccgtactgatgctgatccgctacggctgggtctatggctactggaagctgtcgctgcgcatcgatcgctggcgcggcaagagcccgcccgggctgagcggcatctccctgcgccgtctctccgccctcagtgcattgagcggcgtgcgtggtgcggtgaccctggcggcggtgctgtcggtaccgatgagcctgatggatggcagcgccttcccgcagcgcgatctgatcatcttcatcgccaccagcgtgatcctgatttccctgatcggcgcgaccatcggcctgccgctgctgctgcgcgggctgccggcgagcaacaatggcgcccacgagcgcgagcggcgcgaggcctggcgcaagaccgcggaggcggcgatccgggccctggagagcgaggaattgccgcaggtggaaggcaacgatgcggcgaatacttcgcgggtcgccgaggcgcgtgcgcagatcatggccgaataccgccagtcgctggataccgcaccgaccaccgatgaggcccgcgaccaggcccaagccctggagatcgccgacaaggccttgcgcctgaaggcgttgcgcgcgcagcgcctggaactgtaccggcagcggcgcaacaacgagatcgacgacgagaccctgggcgacatcctgcgcgagctggaccagcaggaaagctggctgaccaatcgcttcgcccgctgggtgtga

SEQ ID NO: 30341 - DNA, 1848 bp, Pseudomonas aeruginosa
atgaaacgcgtgttgtcctctggcgccgggctgttgctgatcgcgctggcgttcctggccttcaacatggtctccggcctgctgttcagcggcgcgcggctcgacctgaccgagcagaagctctacaccatcagccccggcaccaagcggatcctggccggcctcgacgagccgatcaacctgtacttcttctattcggatagcggtgcccgggaactggtgccgctgcgcaactacgccaggcgcgtcgaggaactgctgcgcgcctacgagcgcgaggcgaacggcaggattcgcctgcaggtgatcgatcccgagccgttctccgagaacgaggacaaggccaccgagttcggcctgcaaggaattcccctgcagcagggcggcgacaacctgtacttcggcctggccggcagcaacgccctggacggagtccaggtcatacccttcttcccgctcgatcaggaggagttcctcgaatacgacatcagccgcctggtgcagaccctggcacagccgcagcggccggtggtcggcctgatgtcgtcgctgccgctcaatggcggcttcgacatggccagccggcagccgacctcgccgtggatggtcatggaggaaatccgccagcaattcgacctgcgcagcctcaagagcgatgccacggaaatcccgccggaggtctcggtgctgctgctggtgcatcccaagcagttacccgagcagacgctatacgccatcgaccagttcgtcctgcgcgggggcaagctgctggcgttcgtcgaccccttcagcgaggccgacagcggcagcgatttcgccgctacgctggatggcgacaagtcgtccgacctcgcgccgctgttcgaggcctgggggctgcgcctgctgccgggcaaggtgctcggcgacggcgcctatgcgatgtccatcagtcttggccgggaccagcgtccggcccggcatccggcctggctcagcttgccgcgcgaggcgctggaccaggacgacatcgccactgccggcctggaaagcctgaccctggcgacgcccggcatcctcgaaaggctccccggagcgagcaccagcttcacgcctttgctgcaaagctcggcccaggcgatgccgttcgatgcctcgcgcttcggcctgctgcgtgaccccggcgatctgatgcgcgagctgcgcccgagcggccggcggcatactctcgccgcccgtatccaggggccggcgaagagtgccttcgcggagggcatcgaggggcatcgcgaaggcctgaaggaggcgcgcaacatcaatgtcatcgtcgtggccgataccgacctgctcagcgatcgcatgtgggtccaggtgcaggacttcttcggccagcgcgtgccgcagccctgggccgacaacggcgcgctggtggtcaacgcgctggacaacctgtcgggcaccgacgcgctgatcagcgtgcgctcccgcggccggttcagccggccgttcgtggtggtcgagcgcctgcagcgcgaggccgagacgagcttccggcagaaggaggagcagctcaagcagcgcctcgccgataccgagcagcaactcgccgccctccagcagggtgccgacccggagaaggccgtcgaactgacgcccgaacagcaggccacggtgcgccagtacatgcaggagaagctgcgcatccgcaaggagctgcgcgaggtgcagtaccagttgaacgccgatatcgacgcactgggccgcaccctgaagctggtcaatatcgccctggttccctcgttgctcacggtcggcgtgctgctcggctggctctggcggcgccggcgcatggcccggggagggcattga

SEQ ID NO: 30342 - DNA, 924 bp, Pseudomonas aeruginosa
atgatcgaaacaagaaacctcggcaaacgcttcggctcgcgggtggcggtggacgacctgtccttccaggtggagacgggggaggtactgggcttcctcggtccgaacggcgccggcaagtccaccaccatgaagatgctcaccggcttcctggcgccctgcgccggcaccgcgagcattttcggcttcgacatccgcaaccgcacgctgcaggcgcagcggctgatcggctacctcccggaaggttcgccctgctacgcggaaatgaccgtgcagggcttcctcgatttcatcgccgagatccgtggctaccgtggtgccggcaagcgcgagcgggtcgcccgggcactggggctgctggaactggacgaggtgcgccggcagaccatcgaaactctctccaagggcttccgccggcgtgtcggcctggcccaggcgatcctccacgaaccgcgggcgctggtgctcgacgagcccaccgacgggctcgatccgaaccagaagcaccaggtccgcgaactgatccgcggcctcgcgcaggagcgcatcgtgatcatctccacccatatcctcgaggaagtctcggcgctgtgcagccgcgccctggtgatcggcggcgggcggctgctggcggacagcacgccgctggagctggccagccgctcgcgctaccaccaggcggtgacgctctacagcgacgagcccctggatgccgtggcgctggcggtgctgccgggcgtggcgggcatcgaggagaaccccgccgaaggcagcctgaccgtcctggcgcagccgggcgcggtgatctttccccaggtcagcgggctggtcgccgagcgcggctggcggatccgcgaactggacgtggagcgcggccggctcgacgaggtattccgcaacctgacccgggggacggaggcatga

SEQ ID NO: 30343 - DNA, 399 bp, Pseudomonas aeruginosa
atgaaaaaactgccattgctgctcgccgccagcattctcgccggctgcggtacccagcaatcgacttcgaacgccagcttcgatggtgaggtcttctaccgcgagcgtatcgccctgccgccctcggcgcgcctgagcgtgagcctggaagacgtgtccctggccgacgccccctcggtgcagttggccagccagacccgcgagatcaccagccaggtgccgctggcgttccacctggagtacgacccgaagcaggtcaagccgggccacagctatgcggtgagcgcgcgcatcgagctgaacggccagttgctgttcatcaacaccacccgccactcggtgaaactcgacggcagcgacccgcagccctatcgcgtgcaggtcgaatcggcgcgctga

SEQ ID NO: 30344 - DNA, 1278 bp, Pseudomonas aeruginosa
atgcagcagaccatcgattgtccgattcgccggcgcctggcgcacctgccctgggccaacgacgggcgtgccggtgtccgccactggctggagatgcagcgcgatccgctggcctggttgcagaagatgcacgtcgcgcagccggacctcgcggttgcccgcatgggcccgcagcgcctctggtgcctgttccatccgcaggcggtgcaggaattgatggtcgatcgccgcgatgacctgcaacgctggcagccggcgctgtgcatgctgaaacagtggaacgggcgcagcttcatgatgcgtgagggcgcccccgcccaggcccggcgcaaggaggtacggccgcacctggcgccgccgccggccagcgaggttcgccgcctggccgcggagtggggcgagcgggtggaggaggggcgcgaatacgacctcgacctggaaatggctgcgttcagcgtcaccctcagcggtcacgcgctgtttgacgtcgacctgcaaccgtcggcctatcggatcgccaaggcggtgcgcctgctgtcgcgggtggcattgctggaaatgagcaccggcctgccgctgggccactggttcccgagcaaactgtgtccgcgcaagcgctgggcgctgggccagttgcgcgaggcggtgggcgaggtggcggagcgctcgccgcggccgctggcggacctacgcgatgaactctgcaccctgctcatggcgtcccaccagtccactggagtgaccctgacctggagcctgttgctgctggcccagcgtcccgagttgctcgcgcggctacgcgccgagctggcgggagtgaattggacggcgatccgctcggtcgccgacctgcgcgattgcgcgctgctcagggcggtcctgcaggagtgcctgcgcctgtacccgccggcctacggcctggcgccgcggcaggtgacggcggacatcgaggtgttcggccagcggctgaagcgcggcgacgtgaccatggtctcgagctggatcacccagcgcgatccccgttggttcgaggcgccgctggagttccgtcccgagcgcttcctcgaaccggcgcgctggccgcgcggcgcctacttccccttcggcctcggcgaccgcgcctgccccggcaccgcgatggcgatgatcgatctggcggcggcgctggcctactgggtcgagcactgggacatcatgcacgacggcgacctggcgccgcgcggctggttttccctgcgtccgcagcgagcgcgggtgcgtttccgccgtcgcgcctga

SEQ ID NO: 30345 - DNA, 648 bp, Pseudomonas aeruginosa
atgcgtgtgattctgctcggggcacccggtgccggcaaaggcacccaggcacggttcatcaccgagaagttcggcattccgcagatctccaccggcgacatgctgcgcgccgcagtcaaggccggcagcccgctcggccagcaggtgaaaggcgtgatggacagcggcggcctggtatccgacgacatcatcatcgccctgatcaaggaacgcatcaccgaggccgattgcgccaagggcttcctgttcgacggcttcccgcggaccatcccgcaggccgaagcgctgaaggacgccggcgtgaccatcgaccatgtggtcgagatcgccgtcgacgacgaggagatcgtgtcgcgtatcgccggtcgtcgcgtgcatccggcctccggccgcgtgtaccacaccgagcacaacccgccgaaggtcgccggcaaggacgacgttaccggcgaagagctgatccagcgcgaggacgacaaggaagagaccgtgcgtcaccgcctgtcggtctaccattcgcagaccaagccgctggtcgacttctaccagaagctgtcggccgccgaaggcaccccgaaataccacagcatcgccggcgtcggctcggtcgagcagatcaccgcgaaagtgctttcggccctgagctga

SEQ ID NO: 30346 - DNA, 522 bp, Pseudomonas aeruginosa
atgaccgaggtccgcgtctggcagggagacatcacccgtcttgcggtggatgccatcgtcaacgcggcgaactcctcgctgctcggtgggggcggtgtcgacggcgccatccaccgcgccgccggtgccgaactggtggcggcctgccgcctgctgcacggttgcaagaccggcgaggcgaagatcacccgtgggttccgtctgccggcggcccacgtgatccacaccgtcggcccggtctggcgcggcggcgacaacggcgaagcggagctgctggccagctgctaccggcgcagcctggcgctggccgagcaggccggggcggccagcgtcgcgttccccgccatcagctgcggcatctacggctatcccttggagcaggccgcggccattgccgtcgaagaggtctgccggcaacgcccggcgcacagcagcctggaggaaatcgtcctggttgccttcgatagctcgatggccgagcgctaccagcgcttgctcggcgagcggcctgtggcccgctga

SEQ ID NO: 30347 - DNA, 1506 bp, Pseudomonas aeruginosa
atgagcgaccaacaactcgaccagcacgaactgcaacaggaagaaaacaagctgatcgcccagcgcaaggaaaaacttgccgccgtgcgcgaagcccgggccatcgccttccccaacgacttccgccgcgacgcctacttcgcggacctgcagaaacagtacgccgacaagaccaaggaagagctggaagccgcagcgatcccggtcaaggtggccggtcggatcatgctcaaccgcggttccttcatcgtcctccaggacagcagcgagcgcctgcaggtctacgtcaaccgcaagaccctgccggaagaaaccctggccgagatcaagacctgggacctgggcgacatcatcggcgccgaaggcgtgctggcccgctcgggcaagggcgacctgtacgtcgacatgaccagcgtgcgcctgctgaccaagtcgctgcgtccgctgccggacaagcaccatggcctgaccgacaccgagcagcgctaccgccagcgctacgtcgacctgatggtcaacgaggaaacccgccacaccttccgcgtgcgttcccaggtcatcgcccacatccgccgtttcctcagcgagcgcggtttcctcgaagtggagaccccgatgctgcagaccatccccggcggcgccgcggccaagccgttcgagacccatcacaacgcgctggacatggccatgttcctgcgcatcgccccggagctgtacctcaagcgcctggtggtcggcggtttcgagaaggtcttcgagatcaaccgcaacttccgtaacgaaggcgtctcgacccggcacaaccccgagttcaccatgctcgagttctaccaggcctacgccgactacgaagacaacatggacctgaccgaggaactgttccgcgaactggcccagtcggtactcggtaccaccgacgtgccctacggcgacaaggtcttccacttcggcgagccgttcgtgcgcctgtcggtgttcgattcgatcctcaagtacaacccggagatcaccgccgccgacctcaacgacgtcgagaaggcgcgggccatcgccaagaaggccggcgccaaggtcctcggccacgaaggcctgggcaagctgcaggtgatgattttcgaggaactggtggagcacaagctggagcagccgcacttcatcacccgctaccccttcgaggtttcgccgctggcccgccgcaacgacgaagacccgagcgtcaccgaccgcttcgagctgttcatcggcggccgcgagatcgccaatgcctattccgagctgaacgacgccgaggaccaggccgagcgcttcatgttgcaggtcaaggagaaggacgccggcgacgacgaggcgatgcactacgacgccgacttcatcaatgccctggaatacggcatgccgccgaccgccggcgaaggcatcggcatcgaccgcctggtgatgctgctgaccaactcgccgtcgatccgcgacgtgatcctgttcccgcacatgcgcccgcaggcctga

SEQ ID NO: 30348 - DNA, 1716 bp, Pseudomonas aeruginosa
atgcgtatcgaaccccgccccctgcccgaaaccctgcccgatctcggcgaccttccgccattgctggcgcgcctgtacgcggctcgtggcgtgcgttgcgccgaggagctggacaagggcctggcgcggctgattccctaccagcggctgaaaggcatcgaggagggcgtggcgctgctggtggacgccctggagggcggccagcggattctcatcgtcggcgacttcgacgccgacggcgccaccgccagcagcgtcggcgtgctggccctgcgcatgctcggcgcggcctgggtcgattacctggtgccgaaccgcttcgagtacggctacggcctgaccccggagatcgtcggcgtggccctggagaagcgtcccgacctgctggtgacggtggacaacggcatctccagcgtggacggcgtccaggcggcgaaagccgcggggctcaaggtgctggtcaccgaccaccacctgcctggcccggaactgccggcggcggatgcgatcatcaaccccaaccagccgggctgcgaattccccagcaaggccatggccggggtcggggtgatcttctatgtgatgctggcgttgcgggcgcgcctgcgcgagctggactggttcgcccggcgcgggctgaaggaaccgaacctcgccgagctgctcgacctggtggcgctgggcagcgtcgccgatgtggtgccgctcgatgccaacaaccgcatcctggtccaccagggcctcgcgcgcatccgcgccggccgcgcccggccgggcttgcgcgcgctgctggaggtggccgggcggcctccggtacggatcacctccaccgacctgggtttcatcctcggtccgcgcctgaacgcggcgggtcggctcgacgacatgtccctcggcatcgaatgcctgctctgcgacgacgaagcgctggcccgcgacatggcggtgcagctcgaccagttgaaccaggaccgcaaggccatcgagcagggtatgcagcgcgaggcgctggcgcagctcaaggagctgagcctggagcaactgccgttcggcttgtgcctgttcgacgccgactggcaccagggcgtgatcggaatcctcgcctcgcgcctgaaggagcgctaccaccggccgaccatcgccttcgccgatgccggcgacggcagcctgaaaggctcggcacggtcgattcccggcttccacatccgcgacgcgctggacgcggtagccgcccgtcatcccgggctgatcagcaagttcggcggccacgcgatggctgccggactatcgttgccgcaggaaaacttcggcgctttctccgccgccttcgatgccgaagtacgccgccaactggccgaggaggacctggccgggcgcctgctctccgatggccagttgagcatccaggagttccacctggagctggcgcgcgcgttgcgccaggccggtccctggggccagcactttcccgagccgatgttccacggggtgttccagctggtgcagcagcggatcgtcggcgagcgtcacctgaagctggtgctgaaaagcgaatgcggctcgctgcaactggatggcattgccttcaacatcgaccgcgagcagtggcccaaccctaccgtgcgctgggccgagctggcctacaagctcgacgtcaacgaattccgcggccaggaaagcgtgcaactgatgatcgtccacatggcccctcgctga

SEQ ID NO: 30349 - DNA, 1410 bp, Pseudomonas aeruginosa
atgcgttacatcagcacccgcggccaagcgcccgccctgaacttcgaagatgtcctcctcgccggcctggccagcgacggcggcctctacgtcccggaaaacctgccacgcttcaccctcgaggagatcgcctcctgggtcggcctgccctaccacgagctggccttccgggtgatgcgcccgttcgtcgccggcagcatcgccgatgccgacttcaagaagatcctcgaggaaacctatggcgtcttcgcccatgacgcagtggcgccgctgcgccagttgaacggcaacgaatgggtgctggagctgttccacggcccgaccctggccttcaaggatttcgccctgcaactgctcggccgcctgctcgaccatgtgctggccaagcgcggcgagcgtgtggtgatcatgggggccacctccggcgataccggctccgcggccatcgaaggctgccgccgttgcgacaacgtcgacatcttcatcatgcacccgcacaaccgcgtgtccgaggtgcagcgccggcagatgaccaccatcctcggcgacaacatccacaacatcgccatcgaaggcaacttcgacgactgccaggagatggtcaaggccagcttcgccgaccagggcttcctcaagggtacccgcctggtagcggtgaactcgatcaactgggcgcggatcatggcccagatcgtctactacttccatgccgcgctgcagctcggcgcgccgcatcgctcggtggcgttctcggtgccgaccggcaacttcggcgacatcttcgccggctacctggcgcgcaacatgggcctgccggtcagccagctgatcgtcgcgaccaaccgcaacgacatcctgcaccgcttcatgagcggtaatcgctacgacaaggacaccctgcatccctcgctgtcgccgtcgatggatatcatggtctcgtccaacttcgaacgcctgctgttcgacctgcacggccgcaacggcaaggccgtcgccgaactgctggatgccttcaaggccagcggcaagctgtcggtggaagaccagcgctggaccgaggcgcgcaagctgttcgactccctggcggtcagcgacgagcagacctgcgagaccatcgccgaggtataccgctccagtggcgagttgctcgacccgcacaccgccattggcgtgcgtgccgcccgcgaatgccggcgcagcctgagcgtgccgatggtgaccctgggcactgcgcatccggtcaagttccccgaagcggtggagaaggccggcatcggccaggcaccggcgctgcctgcgcacctcgccgacctgttcgagcgcgaggagcgctgcaccgtattgccgaacgagctggccaaggtacaggccttcgtcagccagcacggcaatcgcggcaagccgctctga

SEQ ID NO: 30350 - DNA, 897 bp, Pseudomonas aeruginosa
atgagtaccctcgaacatcccctgatcgaccgtttcctcgatgccctgtggctggaaaaaggccttgccgacaacacccgcgaggcttatcgcaacgacctccagcagttcaacgcctggctcgatggccgcgggctgcgcctggagggcatcggccgcgacgccatcctcgatcacctggcctggcgcctggaacagggctacaaggcccgctcgaccgcgcgcttcctctccggcctgcgtggcttctatcgctattgcctgcgcgacggcctgatcgccgaggatcccaccttgcaggtggacctgccgcaactgggcaagccgttgccgaaatccctctccgaagcggacgtcgaggcattgctggcggcgccggaagtcgacgacccgctgggcctgcgcgatcgcaccatgctcgaagtgctgtatgcctgcggcctgcgggtcagcgaactggtcggcctgaccctggagcaggtcaacctgcgccagggcgtggtcaaggtgttcggcaagggcagcaaggagcgcctggtgccgctcggcgaggaagccatcggctggctcgaacgctacctgcgcgaggcccgcggcgacctgctcggcgggcggcccagcgacgtgctgttccccagcctgcgcggcgaacagatgacccgccagaccttctggcatcgcatcaagcatcacgcgcaggtggcggcgatcggcacgtcgatttcgccgcacaccctgcgccacgccttcgccacccacctgctcaaccatggcgccgacctgcgggtggtgcagatgctgctcggccacagcgacctgtcgaccacccagatctatacccatatcgcccgggcccgcctccaggatctgcacgcacgccaccacccgcgaggctga

SEQ ID NO: 30351 - DNA, 351 bp, Pseudomonas aeruginosa
atgaccaacaagatcattcagcagatcgaagctgaacagatgaacaaagagatcccggcgttcgcccccggcgataccgtgatcgtccaggtcaaggtgaaggaaggagaccgtcagcgtctgcaggccttcgaaggcgtcgttatcgccaagcgcaaccgtggcctgaacagcgccttcaccgtgcgcaagatctccaacggcgtgggcgtggaacgtaccttccagacctacagcccgatcgtcgacagcctgagcgtcaagcgtcgcggcgacgtgcgcaaggccaagctgtactacctccgcgccctgtccggcaaggccgcgcgcatcaaggaaaaactggtctaa

SEQ ID NO: 30352 - DNA, 759 bp, Pseudomonas aeruginosa
atggacaagcgtttgtgggtgggcgtcgtcagcatctttccggagatgttccgcgcgatcagtgactatggcatcaccagccgtgcggtaaagcaggggttgctcacgctgacctgctggaatccacgggactacaccgaggaccgccaccagacggtggacgaccggcccttcggcggtggccctggcatggtgatgaagatcaagcctctggagggcgcgctggcggatgccaggcaagccgccgggggcaggaaggcgaaggtgatctacctttcgccgcaaggccgccagctgacgcaggcgggcgtacgcgaactggccgaagaggaagcgttgatcctcatcgccgggcgctacgaaggcatcgacgagcgcttcatcgaagagcacgtcgatgaagaatggtcgatcggcgattatgtcctgtccggcggtgagttgccggccatggtgctggtcgatgcagtgacgcggttgctgcccggtgcattgggtcatgcagattccgccgaggaggactccttcacggatggcctgctcgactgcccgcactacacccgacccgaggtgtacgcggacaaacgtgttcctgaagtgttgctcagtggcaaccatgaacacatccggcgttggcgtttgcagcaggcccttgggcggacctgggaacgacgcgccgatcttctggatagccgctcgctttctggagaagagcagaagctgctggcggaatatatccgtcagcgggacgatagttaa

SEQ ID NO: 30353 - DNA, 528 bp, Pseudomonas aeruginosa
atgccgacacccgccgacgacctggtcgtgatcggcaagatcgtttcggtgtacggcatccgcggtgaggtgaaggtgtattcctttaccgacccgttggacaacctgctggactatcgccgctggacgctccggcgcgacggcgagattcggcaggccgagctggtcagggggcgcctgcatggcaaggtcctggccgccaagctcaaggggctcgacgatcgcgaagaggcccgcaccttcaccggttacgagatctgcatcccgcgtagcgagttgccctctctcgaggaaggtgagtactactggcaccagctggaaggcctgaaggtgatcgaccagggcaggcagttgctcggcgtgatcgaccatctgctggaaaccggtgccaacgatgtcatggtggtcaagccctgcgcgggcagcctggacgaccgcgagcgcctgttgccctacaccgggcagtgcgtgctgtcgatcgacctggccgctggcgagatgcgggtggactgggacgcggacttctga

SEQ ID NO: 30354 - DNA, 252 bp, Pseudomonas aeruginosa
atggtaaccatccgtcttgctcgtggcggctccaaaaagcgccccttctaccacctgaccgtgaccaacagccgcaatgcgcgcgatggtcgcttcgtcgagcgcatcggtttcttcaacccggttgcgactggtggcgaagtgcgtctgtccgtcgaccaggagcgtgctacctactggctcggccagggtgcacagccgtctgagcgcgttgctcagctgctcaaggacgctgccaaggcaaacgcctaa

SEQ ID NO: 30355 - DNA, 1374 bp, Pseudomonas aeruginosa
atgttcgaaaaccttacagaccgcctctcgcagacgcttcgccatgtcaccggcaaggccaagctgaccgaggacaacatcaaggacactctgcgcgaagtgcgcatggccctgctcgaggccgacgtggccctgccggtggtcaaggacttcgtcaacaaggtcaaggagcgcgccgtcggtaccgaggtctcgaagagcctgaccccgggacaggcgttcgtgaagatcgtccgcgccgagctcgaggagctgatgggggcggccaacgaggacctggcgctgagcgtcgcgccgccggcggtgatcctgatggccggcctgcagggcgcgggcaagaccaccaccgcgggcaagctggcgcgcttccttaaggaacgcaagaagaagtcggtgatggtggtttccgccgacgtctaccgacccgccgctatcaagcagctggaaaccctggcgggcgaggtcggcgtaaccttcttcccttccgacgtcagccagaagccggtggccatcgccgaggcggcgatccgcgaggcgaggctgaagttcatcgacgtggtgatcgtcgataccgcaggccgcctgcacatcgatgccgacatgatggacgagatcaagcaggtgcacgcggcgatcaagccggcggaaaccctgttcgtggtcgatgccatgaccggccaggatgccgccaacaccgccaaggccttcaatgacgccttgccgctgaccggcgtggtcctgaccaaggtcgacggcgacgcgcgtggtggtgccgcgctctcggtgcgggcgatcaccggcaagccgatcaagttcctcggcatgggcgaaaagagcgaagcgctcgatccgttccatcccgaccgcgtggcctcgcgcatcctcggcatgggcgacgtgctcagcctgatcgaacaggccgagcagaacctcgaccgcgacaaggccgagaagctggcgaagaagatcaagaagggcaagggcttcgacctggaagacttccgcgaccagttgcaacagatgaagaacatgggcggcctcggcgggctcatggacaagctgccgatgctcggcggggtcaacctggcgcagatgggcaatgcccagggtgctgcggagaaacagttcaagcagatggaggcgatcatcaactcgatgacgcccggcgaacggcgcgatccggaaatgatcagcggctcgcgcaagcgccgcatcgcccttggctccggtacccaggtgcaggacgtcggccggctgatcaagcagcacaagcagatgcagaagatgatgaagaaggtcaccgccaagggcggcatggccaagatgatgcgaggcatgggcagtatgttcccggggggcatgcccaagctttga

SEQ ID NO: 30356 - DNA, 801 bp, Pseudomonas aeruginosa
atgcatcccctgctgcccagcctcatcgctgctgttctctatctcggcaccgccgcctaccagggtgcctgtgtgtccaagcgcaccgcgccgggcaaacccctgctgctcctgttcggactcctggcactggtcgcccacgccttcagcctctaccagcaattgctgaccccggccggcctggtgctggacttcttcaacgccgccagcctgatcgccgccgcggtaattctcctgaccctgctggcgaccttgcggataccggtggagaacctgctcctccttctattcccgctgggcgccctcaccaccctgctggcggtactcatcccccacggcaccgtcgagccgatcaacgaacagccgggcatcctggcccacatcctgctctcgatcctggcctacggcctgctcaccatcgcggtgttccaggcgctcttgctgctgctccaggactaccgcctcaagcacaagcatccgtccgggctgatccgcaacttcccgcccctgcaaaccatggaaagcctgctgttcggcttcctctggggcggctggtcgctgctttcgctgtcgctgctgtccggatggctgttcgtcgacaacctgttcgcccagcacctggcgcacaagaccatcctgtcctgcttcgcctgggtggtcttcgccgtgctcctctggggtcgccaccagctcggctggcggggccacaaggcgatccgctggaccctggccggtttctgcctgttgatgttggcgtacttcggcagcaagctggtgcgggaattcatcctgcacatctga

SEQ ID NO: 30357 - DNA, 612 bp, Pseudomonas aeruginosa
atgaactgcacgctcgacgagctgcgccaacgcatcgaggcgcaccgcccccgccaactggataccgaccagcgcttcccccaagcggccgtgctggtgcccatcacccgcagcgacgatccggagctggtgctgaccctgcgcgccgccggtttgtccacccatggcggcgaggtcgccttccccggcgggcggcgcgacccggaagatgccgacctggtgcgcaccgccctgcgcgaggcggaggaggagatcgccttgccgccgggcctggtggaagtggtcgggccgctgagcaccctggtctcgcggcatggcatcgaggtcactccctatgtcgccttcattcccgacttcgtcgagtaccagcccaacgacggcgagatcgccgcggtgttcaacgtgccgctgagtttctttcgcgacgacccgcgcgaggtcacccaccgtatcgactacttcggccgcagctggtacgtgcccagctatcgcttcggcgagttcaagatctggggcctgacggccatcatggtggtggagttggtcaacctgctgtacgacgaccccatcgacctgcacacgccgccggcttcgttcatcaaactgagttga

SEQ ID NO: 30358 - DNA, 744 bp, Pseudomonas aeruginosa
atgaagacagcccacgacctgctcctggccctgcgtcccgacgaggcgcaacccacccccctctatctgcaactggcgcgcaatctcgagagcgcgatccatgccggccagtggaaagcggaggaagcgctgccctccgaacgcaacctcagcgaaaccctgaacatttcccgcgtcaccgcgcgcaaggccctcgaagtactcttcgagcagggcctgatccgccgcaaccagggctccggcaccttcattacgccgcgtctcgaacaaccgttgtcgcgtctctccagcttcagcgagatgctccgcctgaaaggcttcacccccggctccacctggctggagcgcggcatcgccctgcccacccacgacgaactgatccgcctcggcctctcgccgaccgagaaggtcacgcgcatgaagcgcctgcgcaaggccgacggcacagtgatggcgatcgagaacagcaccctgccggcgcgcctgctgccggacccgacagcggtcggcgattccctctacgaatacctggacggcatcggtcgcccagtggtccgcgccctccagcacgtgcgcgcgatcaactcgtccgcgtccgatgccgcgctggtcggcatcgcgccgggcaccgcgatgctgctgatgacccggatcggctacctcgaggacaacaccccgatcgagctgaccgacacctactgccgcaacgactactacgacttcgtcgccgaactgcgacgctga

SEQ ID NO: 30359 - DNA, 1092 bp, Pseudomonas aeruginosa
atgctcgaaggcaacattctcaccccgcaaggctgggtcctcggccgcctacacatccaggacgggcgtatccagcggatcgaaggcgagccctgcgatccggccggcaacgccgatccgtacctgctgccaggcttcatcgacctgcatgtgcacggcggcggcggccgcgacatcatggaaggcggcgacgccttcgccaccatcgcccgcacccaccggcgcttcggcacgacctcgctgctggccaccaccatgaccgcaccgcgcgaggagatcgccgacatcctcagccagctcggcgcttactgccgccgctcgctggagggcggttcacggatactcggcgtgcacctggaaggcccctacatcaactccggcaagctcggcgcgcagcccaacttcgcccatgccgcggtgctcgaggaagtcgaggactacctgcgccgcgcgccgatccgggtgatcaccatcgcccccgagatcgccggacaccggccgctgatccgcgccctcgccgagcgcggcgtacgcctgcagatcggccataccctgggcagctacgaggacggcgtggccgcactggaagccggcgccagcagcttcacccacctctacaacgcgatgaccggcctgcaccaccgcgaaccgggtatcgtcggcgcggccctggcccacgcacgctacgccgagctgatccccgacctgctgcatgtccatcccggcgccatcagggtggccctgcgttcgatcccgtgcctgtactgcgtgaccgactccaccgccgccgccggcatgcccgacggccagtacaagctcggcagccacacggtgaccaagtgcctgggcggcgtgcgcctgcccgacggcactctggccggcagcaccctgaccatggaccaggcgctgcgcaacctggtgaagatcggcctgcccctggccgaagcctcgcaacgcctttcgcaattccccgccgattacctcggcctcgccgagcgcggccgcctggcgcccgcagcctgggccgatgtggtgcgcctggatcgctccctggaactcgacgccgtgatggtggaaggagaactcgaatga

SEQ ID NO: 30360 - DNA, 2529 bp, Pseudomonas aeruginosa
atgaacaacaagaatctcgccctcaaagcgcccctgagcggccccgtgatgccgctcaaccgagtacccgacccggtgttttccagcggcaccctgggcgaaggcatcgccatcgacccgctcaacgactgcctgcacgcgccctgcgccgggctggtcagccacttggcgcgaacccgccacgcgctcagcctgcgcgccgacaacggtgccgagctgctgctgcacgtcggcctcgacaccgtacagctgcaaggcgaaggcttcgaggcgctggtcgaggaaggtgcgcgggtgatcgagggccagccgctgctgcgcttcgacctggaccgcgtcgcccgcggcagccgcagtctgatcacggtgatgatcctgaccaacggcgacggcttccaggtacgcccgctgaccaccaacccggtggaggtcggcgcgccgctcctgcaactgagtccggagaaggccgagcaacgtccggccaatcccgcgcctggcgaaggctccgcgcagcgccaggtccgcgggcgggcgcgggtcgcccatcatggcggtctgcacgcacgcccggcagcgctgctacgcaagaccgcgcagggcttttccagccaggccgaactgcacttcgccgggcaggtggccagcgtcgacagcctggtcggcatcatgggcctgggggtcgccgaacaggacgaggtagaggtgatctgtcgcggcgaagacagcgaggcggccctcggcgccctgctcgcggccctcgccagcgccaccgcgggggctccgaaggatgccccgcgcgccatcgccccgggcgagccggcgcgacctgcggctgtcgccggtaccctggccggcgtctgcgcttcgcccggcctggccagcggtcccctggcgcggctcggcgccatcagcctgccggcggatgacggccggcatcgtcccgaggaacagcacctcgccctggaccaggccctgcaacgggtgcgcgacgacgtacaggggagcctgcagcaggccaggctcggcggcgacgagaacgaagcggcgatcttttccgcgcatctcgcgctgctggaagacccgggtctgctggacgccgccgacatgctgatcgaccagggcgtcggcgccgcccacgcctggcaccgggcgatccaggcccagtgcgagattctccaggcgctgggcaacctgctgctggccgagcgcgccaacgacctgcgcgacctggaaaaacgcgtgctgcgggtactgctcggcgacaccgcgccgttgcgggtgcctgctggggccatcgtcgccgcccgggagatcaccccctccgacctcgcgccgctggtggatgccggcgcggctggcctgtgcatggccgaaggcggcgccacctcccacgtggccatcctcgcccgcagcaagggcctgccgtgcctggtggcgctcggcgccgggctgctggagctggaggaaggccggcaggtggtgctggacgccggccagggccggctggaactcagccccgacgctcgacgcctggagcaggtcgccttgcaagtggcgcagcgcgaggaacaacgccgccgccagcaggccgatgcgcagcgcgaggcgctcacccgcgacggccggcgcatcgagatcggcgccaacgtcgcctcgccgcgcgaggccgccgaagccttcgccaacggcgccgacggggtcggcctgctacgcaccgagtttctcttcctcgagcgccgcgccgcgcccgacgaagaggagcagcgcaacgcctaccaggaggtcctggacgccatgggccagcgcaaggtgatcatccgcaccatcgatgtcggcggcgacaagcacctcgactacctgccgctgccggtggaagaaaacccagcactgggcctgcgcggcatccacctcggccaggcgcgcccggagctgctcgaccagcagttgcgcgcgctgctgagggtcgaaccactggaacgctgccggatactgctgccgatggtcagcgaggtcgacgaactgcgcgccatccgtcgccgcctcggcgagctggccacgcagttggggatcgagcgcctgcccgaactcggggtgatgatcgaagtgccctccgccgccctgctcgccgatcaactggccgaacacgccgacttcctctccatcggcaccaacgacctgtcgcagtacgccctggccatggaccgttgccacgccggcctggccgaccgcatcgacgccctgcacccggcgctgctgcggctgatcgcccagacctgcgccggagcagcccgccacggccgctgggtcggcgtctgcggtgcgctggcctcggacccgctggcgacaccggtactggtcggcctcggggtcgaggaattgtccgtcgggccgaacctggtcggcgagatcaagacccgggtgcgccagctcgacgccgctgaatgccgccgccacgcccaggcgctactggacctgggcagcgcccgggcggtgcgcgacgcctgcctgcaacactggccgctggcctga

SEQ ID NO: 30361 - DNA, 1713 bp, Pseudomonas aeruginosa
atgcccccgttcctgatcgaaagcctgcaacgcctgggccgcgccctgatgctgccgatcgcgatcctgccgatcgccggcctgctgctgcgcctgggcgacgtcgacctgctcgacattccgctggtccacgacgccggcaaggcgatcttcgccaacctggcgctgatcttcgccatcggcatcgccgtcggtttcgctcgcgacaacaatggcaccgccggcctcgccggcgccatcggctacctggtgatgatctcggtgctcaaggtgatcgatccgggcatcgacatgggcgtgctctccggcatcatcagcggcctggtggctggcgccctgtataaccgcttcaaggacgtgaagctgccggaatacctggcgttcttcggcggccgccgcttcgtgccgatcgccaccgggatcagcgcggtctgcctgggcctgctgttcggggtgatctggccaccgctgcaacagggcatcaacggcctcggccaactcatgctggaaagcggcagcttcggcgccttcgccttcggcgtgctgaaccgcctgctgatcgtcaccgggttgcaccacatcctcaacaacctggtgtggttcgtcttcggtagcttcaccgacccggaaaccgggcgcgtcgtcaccggcgacctggcgcgctatttcgccggcgacccgaagggcggccagttcatggccgggatgttcccggtgatgatgttcggcctgcccgccgcctgcctggcgatgtaccgcaacgcccgtccggagcggcgcaagctgatcggcgggctgctcctgtcgatggccttgaccgccttcctcaccggcgtcaccgagccggtggagttcgccttcatgttcctcgcgccgctgctctacctgctgcatgcgctgctcaccggcctgtccatggccctcaccgacctgctcgatatccgcctcggcttcaccttctccggtggcgccatcgacctcgccctgggctggggccgttccacccacggctggatgctctggccgctgggcctgctctatgccggcatctattacctggtgttcgacttctgcatccgccgcttcaacctgaagaccccgggccgcgaagacgacgcgagcagcgaatcgggcgacaacgccgaagccgagcgcgccccggcattcatccgcgccttgggtggcgcagccaacctcgaagtggtggacgcctgcaccacgcgcctgcgtctgcgcctggtcgaccgcaacaaggcctcggacgcccaactcaaggccctcggtgcgatggccgtggtacgtccgggcaaggccggcagcctgcaggtggtggtcggcccacaggccgacagcatcgccgacgagatccgccgcgccctgcccttcgatacgcaaccgggcgaagccgtaccgccgctgggcagtccgcacacagccgaagaggtggtggcgatgcaggccaccgtcgacgccgccgaagcccaggcctggctcggcgccctcggcggcgccggcaacctgcgcgaggtacgggacgtcgcactgacccgcctgcgggtcagcgtggcggacgaacgcaagctggccaccgagcaactgcgtcgtctcggcggacagggcgtcagttccctcgccggcggcatctgccatatcctggtgggcccccgcgccgcggccctgagccaggccctgcaaccgctgctgcggcgctga

SEQ ID NO: 30362 - DNA, 3897 bp, Pseudomonas aeruginosa
atgctgatcctgcgcggcgctcccgccctttccgctttccgccacggcaaactgctcgagcaactgacccagcacgtacctgccgttaccgggctgtacgctgagttcgcgcatttcgccgacgtcaccggcgcgctcaccgccgacgaggagcaggtgctggcgcggctgctgaaatacggcccgagcgtgccggtgcaggagcccagcggacggctgttcctggtggtgccgcgcttcggcaccatctcgccgtggtcgagcaaggcctccgacatcgcccgcaactgcggcctggcgaagatcgaccggctggagcgcggcattgcctactatgtgcagggcgaactgtccgagagcgacgcccagcaggtcgccgcccgcctgcatgaccgcatgacccaactggtgctggaccgcctggaaggcgccgccgagctgttcagccatgcgcagccccgcccgctcaccgccgtcgacgtgcttggcggcggtcgcgccgcgctggagaaggccaacgtcgagttgggcctggccctggccgaggacgagatcgactacctgctgaagagcttcggcgaactggggcgcaacccgcacgacgtcgagctgatgatgttcgcccaggccaactccgagcattgccggcacaagatcttcaatgccagttgggacatcgacgggcaggcccaggacaagagcctgttcggcatgatcaagaacacctacgagatgaaccgcgaaggcgtgctgtccgcatacaaggacaacgccgcggtcatcgtcggccatgtcgccgggcgtttcttccccgatccgcagacccgcgaatacgccgccagccgcgagccggtgcagatcctgatgaaggtggagacccacaaccacccgaccgccatcgcgccgttccccggtgcctccaccggttccggcggcgagatccgcgacgagggcgccaccggccgcggcgccaagccgaaggccggcctgaccggcttcaccgtgtccaacctgcagatccccggtttcgaacagccctgggaagtgccctacggcaagcccgagcgcatcgtcaccgcgctggacatcatggtcgagggcccgctgggcggcgccgcgttcaacaacgagttcggccgtccggcgctgaccggctacttccgtaccttcgagcagaagatcgctacccctcacggcgaggaagtgcgcggctaccacaagccgatcatgctcgccggcggcatgggcaacattcgcgacgaacacgtgcagaagggcgagatcagcgtcggcgccaagctcatcgtccttggcggcccggccatgctgatcggcctgggcggcggcgccgcctcttcgatggccaccggcgccagctccgccgacctcgacttcgcctcggtgcagcgcgacaacccggaaatggagcgacgttgccaggaagtgatcgaccgctgctggcagctcggcgagcgcaacccgatcagcttcatccatgacgtcggtgccggcggcctgtccaacgccctgccggaactgatcaacgacggcggccgcggcggtcgcttcgagctgcgcgcggtgcccaacgacgagccgggcatgagcccgctggaaatctggtgcaacgagtcgcaggagcgctacgtgctgtcggtggacgccgccgacttcgagaccttcaaggccatctgcgagcgcgagcgctgcccgttcgcggtggtcggcgaggccatcgagcagcgccagctgaccgtcgccgacagccatttcgacaacaagccggtggacatgccgctggaagtcctgctcggcaaggcgccgcgcatgcaccgcgcggtcacccgcgaggccgagctgggcgacgatttcgacgccgccgggctggagctgcaggaaagcgtcgagcgcgtcctgcgccatcccgccgtggccagcaagagcttcctgatcaccatcggcgaccgcaccatcaccgggctggtggcccgcgaccagatggtcgggccctggcaggtgccggtggccgactgcgccgtcaccgccaccagcttcgacgtctacaccggcgaggccatggcgatgggcgagcgtaccccgctggcgctgctggacgccccggcttccggacgcatggccatcggcgagacggtcaccaacctggctgccgcgcgtgtcggcaagctgtccgacatcaagctttccgccaactggatggccgccgccggccaccccggcgaggacgcgcgcctgtatgacacggtcaaggccgtgggcatggaactgtgcccggaactgggcatcaccatcccggtgggcaaggactcgatgtccatgaagacccgctggcaggacaatggcgaggacaagagcgtcacttctccggtctcgctgatcgtcaccggcttcgccccggtcgccgacgtgcgccagagcctgaccccgcaactgcgcctggacaagggcgagaccgacctgatcctgatcgatctcggccgcggcaagaaccgtctcggcggctcgatcctggcccaggtccacggcaagctcggccgcgccgtgccggacgtcgacgacgccgaggacctgaaagccttcttcgcggtgatccaggggctcaatgccgacggccatatcctcgcctaccacgaccgttccgacggcggcctgatcaccagcgtgctggagatggccttcgccggtcactgcggcgtcgagctgaacctcgatgccctggccgatagccgcgaagagctggcggccgtgttgttcagcgaggaactgggcgcggtgatccaggttcgcgagggtgccactccggaagtcctcgcgcagttcagcgccgccggtctcgacgactgcgtggcggtgatcggccagccggtcaacggctacgagatcaacctgaactacaacggcgagaccgtctacagcgcccagcgccgcatcctgcaacgcatctggagcgagaccagctaccagatccagcgtctgcgcgacaacgccgactgcgccgagcaggagttcgacgcgctgctggacgaagacaaccccgggctgtcgatcaagctcagctacgacgtcaacgacgacatcgccgcgccctacatcaagaagggcgtgcggccgaaagtggcgatcctccgcgagcagggcgtcaacggccaggtggagatggccgcggcgttcgaccgcgccggcttcgccgcgatcgacgtgcacatgagcgacatcctcgccgggcgggtcgacctggacgccttcaagggcctggtggcctgcggtggcttctcctacggcgacgtgctcggcgccggcgagggctgggccaagtcgatcctcttcaacgcccgcgcccgcgacggcttccaggcgttcttcgcgcgcaaggacagcttcgccctcggcgtctgcaacggctgccagatgatgtccaacctgcacgagctgattcccggcaccgagttctggccgcacttcgtgcgcaaccgttccgagcagttcgaggcgcgggtggcgatggtccaggtgcaggagtcgtcgtcgatcttcctgcagggcatggccggttcgcgcctgccgatcgccatcgcccatggcgaaggccatgcggagttcgagtcggaggaagcgttgctcgaggccgacctttccggctgcgtgtcgctgcgtttcgtcgacaaccacggcaaggtcaccgaagcctacccggccaaccccaacgggtcgccgcgcggcatcaccgggctgagcagccgcgacggccgggtcaccatcatgatgccgcaccccgagcgggtgttccgcgccgtgcagaattcctggcgtccggacgactggcaggaagacggcggctggctgcgcatgttccgcaacgcccgggtctgggtggactga

SEQ ID NO: 30363 - DNA, 1578 bp, Pseudomonas aeruginosa
atgtcccaagacattcacgcccaccgtatcctgatcctcgatttcggctcccagtacacccaactgatcgctcgccgcgtgcgcgagatcggcgtgtattgcgaaatccatcccttcgacatgagcaacgaggcgatcatcgccttcgcgccgcgcggcatcatcctcgccggtggccccgagtcggtacacgaagccgacagcccgcgcgcgccgcaggcggtgttcgacctgaaggtgccgctgttcggcatctgctacggcatgcagaccatggccgagcagatgggcggcaaggtgcagggctccgacctgcgcgagttcggctacgcccgcgtcgacgtggtcggcaaggcgcgcctgctggacggcatcgaggaccacgtggacgacgacggcgtgctcggcctcgacgtgtggatgagccacggcgacaaggtcaccgagatgccggccggcttccacatcctggccagcaccccgagctgcccgatcgccgccatggccgacgatgcccgcgcctactacggcgtgcaattccacccggaagtcacccacaccaagcagggcctgcgcattctctcgcgcttcgtcctcgacatctgcggttgcgccgcgctgtggaccccctcgaacatcgtcgacgacgccatcgccaccgtgcgcgcccaggtcggttcctccaaggtcctgctcggcctctccggcggcgtggactcctcggtggtcgccgcgctgctgcacaaggccatcggcgaccaactgacctgcgtgttcgtcgacaacggcctgctgcgcctgcacgaaggcgaccaggtgatggccatgttcgccgagaacatgggcgtgaaggtgatccgcgccaacgccgaggacaagttcctcggccgcctggccggcgtcgccgacccggaagagaagcgcaagatcatcggccgcaccttcatcgaagtcttcgacgaagaagccaccaagctgcaggacgtgaagttcctcgcccagggcaccatctaccccgacgtgatcgagtcggccggcgccaagaccggcaaggcccacgtgatcaagtcgcaccacaacgtcggcggcctgccggaggacatgcagttcgaactggtcgagccgctgcgcgaactgttcaaggacgaagtgcgcaagatcggcctggagctgggcctgccctacgacatggtctaccgccacccgttccccggcccgggcctgggcgtgcgcatcctcggcgaggtgaagaaggagtacgccgacctgctgcgccaggccgaccacatcttcatcgaggaactgcgcgccttcgactggtaccacaagaccagccaggcgttcgtggtgttccagccagtgaaatcggtcggcgtggtcggcgacggccgtcgctacgcctgggtcgtcgccctgcgcgcggtggagaccatcgacttcatgaccgcgcgctgggcgcacctgccctacgaactgctggagaaggtctcgaaccgcatcatcaacgagattgccggtatctcccgggtcacctacgacgtgtcgagcaagccgccggcgactatcgagtgggaatga

SEQ ID NO: 30364 - DNA, 1380 bp, Pseudomonas aeruginosa
atgcgtaacgatcccttccaacggctcggcctcgatcgcgaggtgctgaccgtcagccaactgaaccagcgcgcccgcctgctgctggaagacgtgttcccgcaggtctgggtcgagggcgagctgtccaacctcgcccggccggcctccggccatgtctacttcaccctcaaggacagcaacgcgcagatccgctgcgcgctgttccggcagaacgccctgcgcgtacgccaggccttgcgcgacgggctggcggtaaaggtgcgcgggaagatctcgctgttcgagggacgcggcgactaccagttgatcgccgataccgtcgagccggccggcgacggcgccctgcgcctggccttcgaggcattgaaggaaaaactcgccggcgaaggcctgttcgccagcgaacgcaagcgtccgctgcccgcccatccgcgccgcatcggtatcgtcagttcgcccagcggggcggtgatccgcgacatcatcagcgtgtttcgccgccgcgcaccgcaggtcgagctgaccctggtgcccaccgcagtgcagggccgcgaggccgtcgcacagatcgtccgcgcgctgcaactggccgaccggcaaggcttcgacgcgctgatcctggcccgtggcggcggttccctggaagacctctggtgcttcaacgaagaagcggtggcgcgcgccgtggcggcctgcgccacgccaatcgtcagcgcggtcggccacgagaccgacgtatcgatcagcgacttcgtcgccgacgtgcgcgcgccgacgccttcggccgccgccgaactgctggcgcccaacgccggcgacctgcagcagcgtctcgacggcctgcgccggcgcctggtgctgcgcatgcgcgaccagttgctgcgcgaacgcctgcgcctggaaggcgtcgcccgccgcctgcgccatcccggcgaacgcctgcgccagcaggcgcagcgcctggacgacctggacatgcgcctgcgccgtgccttcgagcgccagctggcggtccgccacgaacgtctggtccgcctggagacacgtctcgccgcacagcatccgggccgcaccctggcgctgctccggcagaagctcgacagcctcgccgcgcgcctgccgcgcgccgcccgtgaggtactgaaggatcgtcgtcagcgcctcgaaggactggcgcagacgctcaacgtggtcagcccgctggcgaccctgggccgcggctacagcatcctcctcgacgagcgtggccgggcgatccgcgatgccggccagacccagccgggacagcgcctgaaggcgcgcctggcggaaggcgaactggaggtgcgggtcgaggacaaccaccggacgccggtgaccctgtcgctgctggactga

SEQ ID NO: 30365 - DNA, 1482 bp, Pseudomonas aeruginosa
atggttcccgttattgccctggtgggtcgcccgaacgtcggcaagtccactctgttcaaccgcctgaccaagtcgcgcgacgccatcgtggcggagtacgcaggcctgacccgcgatcgccagtacggcgaggcgcgctggcagggccgcacctatatcgtcatcgataccggaggcatctccggcgatgaggaaggcatcgatgcgaaaatggccgagcaatcgttgcaggccatcgaggaggcggatgccgtcctgttcctggtcgattcgcgcgccggcatgaccgccgccgaccagatgatcgccgagcacctgcgcaagcggaacaagcgcagcttcctgatcgccaacaaggtcgacaccatcgatcccgatctcgctcgcgccgagttcagcccgctgggcctgggcgatgcgctgccgatcgccgccgcccacggtcgcggcatcaaccatatgctgcaggaagccctggggatcttccccaaggacaacgcggaggaagaaggcgagggcgagccggcgagcgaagaggtcgccgaaggcgaggaaccgacccggattcccggtcccagcgagaaggacgggatcaagatcgccatcatcggccggcccaacgtgggcaagtcgaccctggtcaaccgcatgctcggcgaagagcgggtgatcgtctacgaccaggccggcaccacccgcgacagcatctacatcccgttcgagcgcaacgaggagaagtacaccctgatcgacaccgctggcgtgcggcgtcgcggcaagatcttcgaggcggtggaaaagttctcggtggtgaagaccctccaggcgatccaggacgccaacgtggtgatcttcgtcatggacgcccgcgaaggggtggtcgagcacgacctcaacctgctcggcttcgtcctcgagaccggccgtgccctggtcattgccctgaacaagtgggatggcatggaggcggccgagcgtgactacgtgaagaccgaactggagcggcgcctgctgttcgtcgacttcgccgacatccatttcatttcggccctgcatggcaccggcgtcggccatctctacaagtcggtccaggagtccttccgttcggcggtgacccgctggccgaccagccgcctgaccagcatcctcgaggacgccgtgcaggtgcaccagccgccgatggtcaacggtcgccggatcaagctgcgctacgcccacctgggcggcgccaatccgccgctgatcgtgatccacggcaaccaggtggacgcggtgccgaaggcctatacccgctacctggagaagacctaccggcgggtattgaagctggtcggtacgccgatccgcatcgagtacaagggcggcgagaacccctacgagggcaagaagaactcgctcaccgcgcgccaggtcaacaagaagcgccggctgatgtcgcaccacaagaaagccgagaagaagaagaaggacaagcgccgctga

SEQ ID NO: 30366 - DNA, 1143 bp, Pseudomonas aeruginosa
atggtgcaatggaaacacgcggcgctgctcgccctggccctggcggtcgtgggttgcagcagcaacagcaagaaggaactcccgcccgccgaactgaccgacttcaaagaggaagtcgtgttgagcaagcagtggagccgctcggtcggtgatggtcagggcgacctgtacaacctgctcgaaccggccgtcgatggttccaccatctacgccgcgtccgccgaagggcgggtgatggcgatccagcgcgagaccggcgacgtgctctggaagaaggacctggaacgtccggtttccggcggtgtcggcgttggctacggcctggtgctggtgggtaccctgcgcggtgacgtgatcgccctcgacgaagccaccggcaagaagaagtggaccaagcgagtcaacagcgaagtgctgtcggcgccggccaccaatggcgacgtggtggtggtgcagacccaggacgacaagctgatcggcctcgatgcggccagcggcgaccagcgctggatctacgaaagcaccgtgccggtgctgaccctgcgcggcaccggcgcgccgctgattgccggcaacatggccctggctggcctggccagcggcaaggtagtggcggtcgacgtacagcgcggcctgccgatctgggagcagcgggtagcgattccccaggggcgttccgaactggatcgcgtggtggacatcgacggcggcctcctgctgtccggcgacaccctctacgtggtcagctaccagggccgtgccgcggcgctggacgtgaacagcggccgcctgctctggcagcgcgaagcgtcgagctacgtcggcgtcgccgaaggcttcggcaatatctacgtcagccaggccagcggttcggtggaaggcctggactcgcgcggcgcttcttcgctgtggaacaacgacgccctggcgcgtcgccaactgtcggctccggcggtgttctccagcaacgtggtggtcggcgacctggaaggctacgtgcacctgctgagccaggtggacggtcgcttcgtcggtcgcgagcgggtcgacagcgatggcgtgcgggttcgtccgctggtggtcgggagctggatgtacgtgttcggcaacggtggcaagctcgtcgcctacaccatccgctag

SEQ ID NO: 30367 - DNA, 1290 bp, Pseudomonas aeruginosa
gtgagcaagtccctgcaagccattcgtggcatgaacgacatcctgccggaacagactccggcctggcgctatctggaacgcaccttcgccggcctgctggacggttacggctacagcgagatccgcctgcccatcctcgagttcaccgaactcttcgcccgcggcatcggcgaaggcaccgatgtggtcgacaaggagatgtacaccttcctcgaccgcaacggcgaatccctgaccatgcgtccggaaggtaccgccggttgcgtgcgcgccgtgctggagcacggcctgagcggcggtggccaggtgcagaagctctggtacaccgggccgatgttccgttacgagaaaccgcagaaaggtcgctaccggcagttccaccagatcggcgtggaagtcttcaacctgcccggtccggacatcgacgccgagttgatcatcctcacctggcgcctgtggcagaagctcggcatggccgacgcggtgaccctgcagctcaacaccctcggctccagcgaggcccgcgcacgctatcgcgaggccctggtggcctatctgcaggagcgcttcgagcaactcgacgaagacagccagcggcgcatgaccaccaatccgctgcgaatcctcgacagcaaggtggagagcacccaggcgttgctggttggcgcgccgaccctgcacgactatctcgacgaagaatcgatcgcccacttcgagggtctcaaggcccgcctggatgctgtcggacttcgctacgaaatcaaccagaagctggtgcgcggcctggactattactgccgcacggctttcgagtgggtcaccgacaagcttggcgcccagggcaccgtttgcggcggtggccgctacgacgggctggtcagccagttcggcggcaagccgaccccgggtgtcggtttcgccatgggcgtggaacgcctggtgctgctgctggaaaccttgggggtgatccccgccgaactgaaccgtccggccgacctctacgtctgcgccttcggcgaaccggccgagctggccgccctgaccctggccgaacagttgcgcagcgccattcccggcatacgcctgctggtcaacgccggcgccggtagcttcaagagccagttcaagaaggccgacaagagcggcgcgcgctttgccctgatcctcggggaggacgaggtggccaatcgcgtggtaggtttcaagcccctgcgtgacgagggcgagcaacaaagcattgcctgggatgctctgcccgagcacctggcagcctgtctggcacaggcttga

SEQ ID NO: 30368 - DNA, 1116 bp, Pseudomonas aeruginosa
atgagcattcatagcgcttctccgatcattcgccgcaagtctcggaaaatctgggtcggcaacgtcccggtgggcggcgatgcgccgatcgccgtgcagagcatgaccaacaccgagacctgcgacgtcgctgccaccgtcgcgcagatccgccgcctggaagatgccggcgcggacatcgtgcgggtttccgtccccgacatggacgccgccgaggcattcggcaagatcaagcagcaggtcaacgtgccgctggtcgccgacatccacttcgactatcgcatcgccctgcgcgtcgccgagctgggagtggactgcctgcgcatcaatccgggcaacatcggtcgcgaggaccgggtcaaggccgtggtcgatgccgcgcgcgagcgcaacatcccgatccgtatcggcgtcaatgccggttcgctggaaaaggacctgcagaagaaatacggcgaaccgaccccggaagccctgctcgaatcggccatgcgccacgtcgatcatctcgacaagctggacttccagaacttcaaggtcagcgtcaaggcctccgacgtcttcatggccgtcgccgcctatcgcctgctggccaggcagatcgagcaacccctgcacctgggcatcaccgaggccggcggcctgcgctccggcacggtgaagtcggcggtggggctgggcatgctcctggccgagggaatcggcgacaccatccggatttccctggctgccgatccggtcgaggagatcaaggtcggtttcgacatcctcaagtccctgcacctgcgctcccgtggcatcaacttcatcgcctgcccgagctgttcgcggcagaacttcgacgtggtgaagaccatgaacgagctggaagggcgcctggaggacctgctggtgccgatggacgtggccgtgatcggttgcgtcgtcaacggtccgggcgaagccaaggaggcccatgtcggcctcaccggcggcactccgaacctggtgtatatcgacggcaagccgtcgcagaaactgaccaacgacaacctggtggacgagctggaacggctgatccgccagaaggcggccgagaaggccgaggccgatgcgagcctgatcgcccgcggctga

SEQ ID NO: 30369 - DNA, 1044 bp, Pseudomonas aeruginosa
atgatgaaagcgccgcagcccgaagtcgtagccaccgcttcccgtcagaaccccggggaaaccctgcgccaggcgcgcgagcagaagggcctgtcgctgtcgcaggtggccgggcaactgaacctgaccgagaattcgctgcgtcagctggaaaacggcgcgttcgacaagctgccgggacacaccttctcgcgcggttacatccgcgcctacgccaagctcatgggcctcgaccaggccgagctggtcaacagcttcgaccatttcaccggcaccaatgccagcggcagcaccgtacagagcctgggacgggtcgccgagccggtgcgcctgtcgcgcaacgtgctgcgtatcgtcagcctgttgctgctcgccctgctgatcggcttcggctacttctggtggcaggagcattccgcgcgcacgccggaaaccgccggtctgagccttgagcatgtcgaagtggaaagcgccgacggcaccaccgagatccataccctggacgagcctgaagaccaggcggtgatcgaagcgcagaaggaaggcgagcaagcgcccgccgaggtttctccggaagtcgctgcccaggccgagggagcgccgccggtggcgagcgagggcgcgcaggttcccgccgctccggcccagggcacccccgccgcaccccagcagcccgttaccgccgcgcctgccggcacggctcccgctcccggtactgctccagccgttccagcgacggccagtccggccgccccgccagcgccgagcgaacctgccgccgcgcccgtggtggccggcgagggccagggggtggtcaaggtacagttcgtcgccgattgctggacccaggtcaccgacgccaacggcaaggtcctggtcagcgcgctgaagcgcaagggcgacagcctggaactggccggcaaggccccgctggagctgcgcctcggtttcgctcgcggcgcccaggtcagctacaacggccagccggtggacgtgacccccttcgtccgcggcgaaacggcccgtctgaaggtaggacaatga

SEQ ID NO: 30370 - DNA, 387 bp, Pseudomonas aeruginosa
atggcatatagcgaaaaggtcatcgaccactacgaaaacccgcgcaacgtcggcaagctcgacgctgccgatcccaacgtcggcaccggcatggtcggcgcgccggcctgcggcgacgtgatgcgcctgcagatcaaggtcaacgagcagggcgtgatcgaagacgccaagttcaagacctacggttgcggttccgcgatcgcctccagctccctcgccaccgagtggatgaagggcaagaccctggacgaggcggaaaccatcaagaacaccaccatcgccgaagagctggccctgccgccggtgaagatccactgctccgttctcgccgaagacgccatcaaggccgccgttcgcgactacaagcagaagaagggtttgctctaa

SEQ ID NO: 30371 - DNA, 492 bp, Pseudomonas aeruginosa
atgcgtctgaccaccaaaggccgctacgccgtaaccgccatgctcgacctggcgctgcatgctcagcaaggtccggtctcgctggccgatatctccgaacgccaaggcatttccctgtcctatctcgaacagctgttcgccaagttgcgccgtggcaacctggtgaccagcgtgcgcggcccgggcggcggctaccagctgtcccgccatatgtcgggcatccatgtggcgcaggtgatcgacgcggtcaacgaatccgtcgacgcgacccgctgccaggggcagggcgattgccactccggcgatacctgtctgacccaccacctgtggtgcgacctcagtttgcagattcatgagttcctcagcggcatcagcctggccgatctggtcagccgccaggaggtccaggaggtcgcgctgcgccaggacgaacgccgttgctcaggcaagacgcctcgtctcgacaagattgaagcgtccgccatcgactga

SEQ ID NO: 30372 - DNA, 777 bp, Pseudomonas aeruginosa
atgttcgaacgtgtgcgtgaagatatccaaagcgtattccaccgtgatccggcggctcgcaacgcactcgaggtcctcacctgttatccgggcctgcacgccgtctggctgcatcggctggcccacggcttgtggacgtccggctggaagtggctggcgcgcctggtgtccaatttcggccgctggatgaccggcatcgagatccacccgggggccaggatcggccggcgcttcttcatcgaccacggcatgggcatcgtcatcggcgaaaccgccgagatcggcgacgacgtcaccctctatcagggtgttaccctgggcggcaccacctggaacaagggcaagcgccaccccaccctcggcaacaacgtagtggtcggtgccggtgccaaggtgctcggcccgttcaccgtcggcgagggcgccaaggtcggctccaacgccgtggtgaccaaggaagtcccgccgggtgccaccgtggtcggcattcccgggcggatcatcatgcgcgaggactccgagcagcaggccaagcgccaggcgatggcggagaagctcggcttcgatgcctatggggtcagccaggacatgccggacccggtggcgcgtgccattggtcagttgctcgatcacctgcaggccgtcgacggccggctcgagggcatgtgccaggcgctcaccgccctgggtagcgactactgcgcgaaggacctgccggtattgcgcgaggaagatttcgccggagtcaaggatgaggacggcaatccggccgcgtaa

SEQ ID NO: 30373 - DNA, 1119 bp, Pseudomonas aeruginosa
atgaacttcgagctgctggcgaccgacggcaaggcccgtcgcggccgcctgaccttcccccgcggcgtggtcgagaccccggccttcatgccggtgggcacctacggcacggtgaagggcatgttgccgcgcgacatcgaggacatcggcgcgcagatcatcctcggcaacaccttccatctctggttgcgcccgggcaccgaggtgatccagcgccacggcgacctgcacgacttcatgcagtggaaaggcccgatcctcaccgattccggcggtttccaggtgttcagcctgggagccatgcgcaagatcaaggaggagggcgtgaccttcgcctcgccggtggacggcgccaaggtcttcatggggccggaggagtccatggcggtgcaacgcgccctgggctcggacatcgtgatgatcttcgacgaatgcacgccgtacccggccgaccatgacgtcgccaagcgctccatggagctgtcgctgcgctgggccaagcgctcgaagatcgcccatggcgatagcccgtcggcgctgttcggcatcgtccagggcggtatgcacgaggacctgcgcctgcgctcgctggatggcttgcaggagatcggcttcgacggcctggccatcggtggtttgtcggtgggcgagccgaaggaagagatgatccgcgtgctcgatttcctgccgccgcagatgccggccgacaagccgcgctacctgatgggcgtgggcaagccggaagacctggtggaaggcgtgcgccgcggcgtggacatgttcgactgcgtgatgccgacgcgcaatgcgcgcaacggccacctgttcgtcgacagcggggtgatcaagatccgcaactcggtacacaagcacgacgactccacgctcgacccgacctgcgactgttacacctgcaaacatttttcccgcgcctatctgcaccacttggacaagtgcggggaaatgctcggtagcatgctcaataccatccacaacttgcggcattatcagcgggttatggctggtttgcgcgaggcaatccaacagggtacattggccgcctttgtcgatgccttctatgccaagcgcggccttcccacgccgccgctggatgcctga

SEQ ID NO: 30374 - DNA, 1044 bp, Pseudomonas aeruginosa
atgcgtgtcgccgattttcatttcgacttgcccgaggccctgatcgcccgtcatcccctgcctgaacgccgcgcaagccgcctgttggcgctggatggcccgacgggaaccctcgcccacagacaattcgccgatctcctggactacctgcgtccgggcgacctgatggtgttcaacaatacccgggtaatcccggcgcgcctgttcggccagaaggaatccggcggcaagctggaagtcctggtcgagcgcgtgctcgaccagcaccgggtgcttgcccacatacgcgccagcaaggcgcccaagcccggcacgcggatcctcgtcgaaggcggtggcagcgcggagatgctgcaacgccacgacgccctgttcgaactcgcgttcgccgaacccgtgctgcctttgctggagcgggtcgggcacatgccgttgcctccctatatcgaccgaccggacgatgcggccgaccgcgagcgctaccagaccgtctacgcccagcgcgccggtgcggtggcggccccgaccgccggcctgcacttcgatgaggcgctgctcgaggcgatccgcgcgaagggggtggataccgccttcgttaccctgcatgtcggcgccggtaccttccagccggtgcgtgtcgagcgtatcgaggaccatgtgatgcaccgcgaatggctggaggtcggccaggacgtggtggacgcggtttccgtctgccgggcccgcggcggccgggtagtcgccgtcggcaccaccagcgtgcgctcgctggaaagcgcggcacgcgacggtgagctgaagcccttcagcggcgacaccgacatcttcatctacccgggccggccgttccatgtggtcgatgccctggtcaccaacttccacctgcccgaatccaccctgctgatgctggtctcggccttcgccggctacccggagaccatggccgcctacgccgcggcggtggcgcagggctatcgcttcttcagttacggtgatgccatgttcatcacccgcaatcccgcgccccgcggacccgaggactga

SEQ ID NO: 30375 - DNA, 1488 bp, Pseudomonas aeruginosa
atggaattccttgttaaaagcgtacgcccggaaaccctgaaaaccgccaccctggtgctcgccgtaggcgaaggccgcaagctcggcgccagcgccaaggcggtcgacgacgccaccggcggcgccatcagcgcagtgctcaagcgtggcgacctggccggcaaggtcggccagaccctgctcctgcagagcctgcccaatctcaaggccgagcgcgtgctgctggtcggcgccggcaaggagcgcgaactgggcgaccgccagtaccgcaagctggcctccgccgtgctgtcgaccctcaagggcctggccggcgccgatgccgcgctggccctcggcgatctcgcggtgaaaggccgcgatgcccacgcgaaggcgcgtctgctggtggaaaccctggccgatggcctgtacgtgttcgatcgctacaagagccagaaagccgagccgctgaaactgaagaagctgaccctgctcgccgacaaggccgacagcgccgccgtcgagcaaggcagcaaggaagcccaggccatcgccaatggcatggccctgacccgtgatctcggcaacctgccgccgaacgtctgccatccgacgttcctcggcgagcaggccaagggcctggccaaggagttcaagggcctgaaggtcgaggtcctcgacgagaagaaactgcgcgagctgggcatgggctcgttcctcgccgtcgcccagggcagcgaccagccgccgcggctgatcgtcctgcaatacaacggcgcgaagaaggaccaggccccgcacgtgctggtcggcaagggcatcaccttcgacaccggcggcatcagcctcaagccgggcctgggcatggacgagatgaagttcgacatgtgcggcgccgccagcgtcttcggcaccttccgcgcggtgctcgaactgcagttgccgatcaacctggtcggcctgctggcctgcgccgagaacatgcccagcggcggagccacccgtccgggcgacatcgtcaccaccatgagcgggcagaccgtcgagatcctcaacaccgacgccgaagggcgcctggtgctgtgcgatgcactgacctacgccgagcgcttcaagccgcagtcggtgatcgacatcgccaccctcaccggcgcctgcatcgtcgccctgggcagcaacacctcgggccttatgggcaacaacgaagcgctggtcaggcaactgctcaaggccggcgagttcgccgacgaccgcgcctggcaattgccgctgttcgacgaataccaggaacagctggacagcccgttcgccgacatcgccaacatcggcgggccgaaggccggcaccatcaccgccggctgcttcctctcgcgcttcgccaagaaataccactgggcgcacctggacatcgccggcaccgcctggatcagcggcggcaaggacaaaggcgccaccggccgcccggttccgttgttgacccagtacctgctggaacgggccaagtga

SEQ ID NO: 30376 - DNA, 429 bp, Pseudomonas aeruginosa
gtgacccgggtcgatttctacgtgatccccagcgccgatccgtcggcgcgcctgcaggtcgcctgccgcctggccgagaaggcctggcggcagggcatgcaggtctacctgcattgcgccgacgaggcgcagcgcagcgagttggacggccgcctgtggagcttccgcggcgaggccttcattcctcacagcctggccgaggaagacgccgaggcgcccgtcgccctgggcctgggcgagcccccggggaaccatcgcgacctgctgatcaacctgaccctcgaggcccccggcttcgtcccgaacttttcgcgggtggccgaactggtggtcgaggagccggcgatccgccaggcggcacgggataaattccgcttctaccgggagcagggctatcctctacaggaccatcgcctgccgcgtatctga

SEQ ID NO: 30377 - DNA, 2853 bp, Pseudomonas aeruginosa
atggacaagacttaccagccgcacgccatcgagacttcctggtacgagacctgggagtccaacgactacttcgctccgagcggcgaaggccagccctacaccatcatgatcccgccgccgaacgtgaccggcagcctgcacatgggccatggcttcaacaacgcgatcatggacgcgctgatccgctaccgccgcatgcagggccgcaacaccctgtggcagccgggcaccgatcacgccggcatcgccacccagatggtggtcgagcgccagctcggcgcccagggcgtgagccgccacgacctcggccgggagaagttcctggagaaggtctgggaatggaaggaacagtccggcggcaacatcacccggcagattcgtcgcctgggctcctcggtggactggtcgcgcgagcgcttcaccatggacgacggcctctccgaagcggtcaaggaagccttcgtgcgcctgcatgaagacggcctgatctaccgcggcaaacgcctggtgaactgggacaccaagctgcacaccgcgatttccgacctggaagtggaaaaccacgacgagaagggccacctctggcacctgcgctacccgctggtgaacggcgcgaagaccagcgaaggcctggattacctggtggtcgccaccacccgtccggaaaccctgctgggcgacgccgcggtcgcggtgcacccggaagacgagcgctacgccaagctgatcggccagttcgccgaactgccgatcgtcggccggcacatcccgatcatcgccgacgagtacgtcgaccgcgaattcggcaccggctgcgtgaagatcaccccggcccacgacttcaacgactacgaagtgggcaagcgccacgacctgccgctgatcaacatcttcgacaagaacgccgcggtgctggcccaggcccaggtgttccacctcgacggcagcgtcaacccgaacctcgaccccagcctgccgcagagctacgccggcatggaccgcttcgccgcgcgcaaggccatcgtcgccgagttcgaggccatgggcttgctcgagaaggtcgacgaccacgcgctgaaagtaccgaagggcgaccgctccggcaccgtcatcgagccctggctgaccgaccagtggtacgtcagcaccaagccgctggccgaagacgccatcgccgccgtggaagacggccgtatccagttcgtgcccaagcagtacgagaacatgtacttctcctggatgcgcgacatccaggactggtgcatcagccgccagctctggtggggccaccgcatcccggcctggtacgacgaggccggcaacgtctacgtcggccgcgacgaggtcgaggtgcgcaccaagcacaagctcggcaacgaggccgagttgcgccaggacgaagacgttctcgacacctggttcagctccggcctgtggaccttctccaccctcggctggccgcagcagaccgagttcctcaagaccttccaccccaccgacgtactggtcaccggcttcgacatcatcttcttctgggtcgcgcggatgatcatgctcaccatgcacctggtgaagaaccccgacggcaccccgcagatcccgttcaagaccgtctatgtccacggcctggtgcgcgacggccagggccagaagatgtccaagtccaagggcaacgtactcgacccgctggacatcgtcgacggcatcgacctcgataccctgctgcaaaagcgcaccagcggcatgatgcagccgaagctggcggagaagatcgccaagcagacccgcgccgaattccccgaaggcatcgccagctacggcaccgacgccctgcgcttcaccttctgctcgctggcctccaccggccgcgacatcaagttcgacatgggccgcgtcgaaggcttccgcaacttctgcaacaagatctggaacgccgccaacttcgtcatcgagaacaccgatggccaggacaccggggtcaacggcgagccggtcgagctgtcctcggtcgaccgctggatcatctcccagttgcagcgcaccgagcaggaagtcacccgccagctcgacgccttccgcttcgatctggccgcccaggccctctatgagttcatctgggacgagtactgcgcctggtacctggagctggtcaagccggtgctgtgggacgagaacgcccccatcgagcgccagcgcggcactcgtcgcaccctgatccgcgtgctggagacggccctgcgcctggcgcacccgttcatgccgttcatcaccgaggaaatctggcaacgcatcaagggccaggccggcaaggaaggcccgaccctgatgctgcaaccctggccggtggccgacgaaggcaggatcgacgccgccgccgaaggcgacatcgaatgggtcaaggcgctgatgctcggcgtgcggcagatccgcggcgagatgaacatctccatggccaagcgcatcgacatcatcctcaagaacgcctcgcccagcgaccaccgccgcctggccgacaacgagccgctgctgatgaaactggccaagctggaaagcatccgcgtgctggaagccggcgaggaagcgccgatgtccgccaccgccctggtcggcgacatggaagtattggtgccgatggccggcctgatcgacaagagcgccgaactggggcgcctggacaaggagatccagcgcctggaaggcgaggtcaagcgcgtcggcggcaagctgtccaacgaaggcttcgtcgccaaggccccggccgacgtgatcgagaaggaacgcgccaagctagccgaggccgaacaggccctggccaagctggccgagcaacggcagaagatcgccgcgctctaa

SEQ ID NO: 30378 - DNA, 690 bp, Pseudomonas aeruginosa
gtgggttacctgaagaatcattggtggaaacgctggatccgccgccgcggctgcaagctggccggcggcccggccagtgtcggcaagcgcaccacgctggtgctcgaggagcgggtcgaactcggccacctgcgcatcgtcccgccgaggctggagatcggcgcctacagctatgtgcgcagcggcaccgacctgtccctggtggcgtccatcgggcgtttctgctcgatcggctcggactgtttcatcggccaggaaaagcacacccatcccagcgactgggtgagcagccaccccttccagcacaccggcaccgcgctgcgctacgagccggcgctgagctacgcggaaatcggccacgacgtctggatcgggcacagcgcgatggtgatggaaggtgtcaaggtcgggactggggcgatcatcgccacgcgcgccgtggtcactcgcgacgtgccgccctatgccatcgtcgccgggactccggcgcaggtgatccgctaccggcatccgccggagatcatcgagggcctgctcgcctcacgctggtgggagctggatagcgccttcctcaccggcctgccgctggaccgaccccgggagttcctcgccgccctggaggcgcgcgaggcgccgcgtgcggcgtaccggcggatgaccatcacccgccaggggtgccggctggattga

SEQ ID NO: 30379 - DNA, 684 bp, Pseudomonas aeruginosa
atgtcgaccaatcttctgttcttcgggatctatccctatgtcgcgctgctgatctgcctggtcggcagctgggcgcgcttcgacctctcgcagtacacctggaaggccggttccagccagatgctcagcaagaagggcatgcgggtatacagcaacctattccacgtcggcgtgctgttcatcctcgccggccacttcgtcggcctgctgaccccggcctcggtctaccaccacctgatcagcaccgagaacaagcaactgctggcgatggtctccggcggcttcttcggcgtgctctgcttcatcggcctgagcggactgatcctgcgccgcctgaccgacgcacgggtgcgcgccaccggcaacgcctccgacctgatgatcctgctggtgctctacgcccagctgatcctcggcctctccaccatcgtcgcctcgacccatcacatggatggctcggtgatggtgatgctcgccgaatgggcccaggccatcgtcaccctgcgtccgctggcggcggccgaggccatcgcgccggtgggcctggtctacaagctgcacgtcggcctgggccttaccctgttcgtgctgttccccttcacccgcctggtgcacatcgtcagcgcgccggtgtggtacctgggccggcgctaccagatcgtgcgtcagaaacgtcctgcctga

SEQ ID NO: 30380 - DNA, 1542 bp, Pseudomonas aeruginosa
atgaaaattcgttcgcaagtcggcatggtgctgaacctcgacaaatgcatcggttgccacacctgctcgatcacctgcaagaacgtctggaccagccgcgaaggcatggagtacgcctggttcaacaacgtcgagaccaagcccgggatcggctacccgaaggaatgggaaaaccaggagaagtggaagggcggctgggtgcgcgcggcagacggttcgatccgcccgcgcatcggcggcaagttccgcgtgctggcgaacatcttcgccaacccggacctgcccgagatcgacgactactacgaaccgttcgacttcgactaccagcacctgcataccgcgcccaaggccgagcaccagccggtggcgcgcccgcgctcgctggtctccgggcagcgcatggagaagatcgagtggggcccgaactgggaggagatcctcggcaccgagttcgccaagcggcgcaaggacaagaacttcgaccaggtccaggcggacatctacggtgagtacgagaacaccttcatgatgtacctgccgcgcctctgcgagcactgcctgaacccggcgtgcgtggcgtcctgcccgagcggggcgatctacaagcgcgaggaggacggcatcgtcctgatcgaccaggacaagtgccgcggctggcggatgtgcatctccggctgcccgtacaagaagatctacttcaactggaagagcggcaagtccgagaagtgcatcttctgctacccgcgcatcgaggccggccagcccaccgtctgctcggagacctgcgtcgggcgcatccgctacctcggcgtgctgctctacgacgccgaccgtatccacgaagtggccagttgcgagaacgagcgcgagctgtacgagaagcaactggagatcttcctcgatccgttcgacccggcggtgatcgcccaggcgcgcaaggatggggtggccgacagcgtcatcgaggcggcgcagaagtcgccggtgtacaagctggcgatggactggaagctggccctgccgctgcacccggaataccgcacgctgccgatggtctggtacgtgccgccgctgtcgccgatccagaacgccgccgccgaggggcacatcggcagcgacggggtgatcccggacgtcgagtcgctgcgcatccccgtgcagtacctggccaacctgctcaccgccggcgacaccgcgccggtgctgctggcgctcaagcgcctgctggcgatgcgcgcctacaagcgcgccgagcacgtcgaaggccgccaggacctggaggtgctggccaaggtcgggttgagcgtggagcaggtggaggagatgtaccgctacctggccatcgccaactacgaggatcgcttcgtgatccccagcgcgcaccgcgaggaagcgctttccgatgccttcgccgagcgttccggctgtggcttcagcttcggcaacggctgttccggcggcagcaactccgccgtcaacctgttcggcggcaagccgaccaaccgccgcgacgtgatccaggtcgtgcagatccaggagtga

SEQ ID NO: 30381 - DNA, 3786 bp, Pseudomonas aeruginosa
atgagtcacctgctcgaccgcctgcagttcttcaagaagaagcagggcgaattcgccgatggccacggcgagaccagcaacgagagccgcgcctgggaaggtgcctaccggcagcgctggcagcacgacaagatcgtgcgctccacccacggggtgaactgcaccggctcctgctcctggaagatctacgtgaagaacggcctgatcacctgggaaacccagcagaccgactacccgcgcacccgtccggacctgcccaaccacgagccgcgcggctgcccgcgcggggccagctattcctggtacatctacagcgccaaccgcctgaagtacccgaaggtgcgcaagccgttgctcaagctctggcgcgaggcgcgggcgcagcacggcgacccggtgaacgcctgggccagcatcgtcgaggacgccgccaaggcgaagagctacaagagccagcgcggcctgggtggcttcgtccgttccagctgggacgaggtcaccgagatcatcgccgcggccaacgtctacaccgccaagacctacggtccggaccgggtgatcggcttctcgccgatcccggccatgtcgatggtcagctacgccgccggcgcccgctacctgtcgctgatcggcggggtctgcctgagcttctacgactggtactgcgacctgccgccggccagcccgcagatctggggcgagcagaccgacgtgccggagtcggccgactggtacaactccagctacatcatcgcctggggctccaacgtgccgcagacgcggaccccggacgcgcacttcttcaccgaggtgcgctacaagggcaccaagaccgtctccatcaccccggactattccgaggtggccaagctcaccgacctctggctcaaccccaagcagggcaccgacgccgcgctgggcatggccttcggtcacgtgatcctgaaggagttccacctcgaccggccgagcgcctacttcgtcgactactgccgccagtacaccgacatgccgatgctggtgttgctggaagaacacgccggcggcgcgttcaagccgacccgctacctgcgcgccgccgacctggcggacaacctcggccaggacaacaaccccgagtggaagaccatcgcctacgacgagcgcagcggcgggctggtctcgcccaccggcgccatcggctaccgctggggcgagtctggcaagtggaacatcgccgagctggacggcaggagcggtgaccagacgcgcctgcaactgtcgctgctcgatggcccggaacatgcctgcgaggtggccttcccgtacttcgccgggcaggagcacccgcacttcaagggcgtcgccaacgacgaggtactgctgcgccgggtgccgttccgcgagatcgtcgcggcggacggcaagcgcctgcgggtggccaccgtctatgacctgcagatggccaactacagcatcgaccgcggcctgggcggcgacaacgtggcgacctcctacgaggacgccgacacgccctataccccggcctggcaggagcgcatcaccggcgtcccggcggcgcgcgcgacgcaggtcgcccgcgagttcgccgacagcgccgacaagacccgcggcaaggcgatggtgatcatcggcgcggcgatgaaccactggtaccacatggacatgaactaccgcgcggtcatcaacatgctgatgatgtgcggctgcatcggccaaagcggcggcggctgggcgcactatgtcggccaggagaagctgcgcccgcagaccggctgggcgccgctggccttcggcctggactggagccggccgccgcggcagatgaacggcaccagcttcttctacctgcacagctcgcaatggcgccacgagaagctgtcgatgcacgaggtgctgtcgccgctggccgacgccagccgcttcgccgaacacgccctggactacaacatccaggccgaacgcctcggctggctgccgtcggcgccgcaactgaaccgcaacccgctgcgcatcgccgccgaggccgaggccgccggcctgccggtcgccgactatgtggtgcgtgaactgaagagcggcggcctgcgcttcgccagcgaatcgccggacgatccgcagaacttcccgcgcaacatgttcatctggcgctccaacctgctgggctcctccggcaaggggcacgagtacatgctcaagtacctgctcggggcgaagaacggggtgatgaacgatgacctcggcaaggccggcggtccgcgtcccaccgaggtcgactgggtcgacgacggtgccgagggcaagctcgacctggtcaccaccctggacttccgcatgtcctccacctgcatgtactcggacatcgtcctgccgaccgctacctggtacgagaaggacgacctcaacacctccgacatgcaccccttcatccatccgctgtcggcggccaccgatccggcctgggaagccaagagcgactgggagatctacaaggccatcgccaagaagttctccgccgtcgccgaaggccacctcggcgtggagcaggacctggtcacggtgccgctgctgcatgacacccccaccgagctggcgcagccgttcggcggcgacggccatgactggaagaagggcgagtgcgagccggtgccgggacgcaacctgccgacgctgcacctggtcgagcgcgactacccgaacgtctaccgcaagttcacctcgctcggtccgctgctggacaagctgggcaacggcggcaagggcatcggctggaacaccgagaaggaagtgaagctggtcggcgacctcaaccatcgcgtggtcgagagcggcgtcagccagggccggccgcgtatcgacagcgccatcgacgccgccgaggtggtcctcgccctggctccggaaaccaacggccaggtcgcggtcaaggcctgggaagcgctgtcgaagatcaccggccgcgagcacgcccacctggcgctgcccaaggaagacgagaagatccgcttccgcgacatccaggtgcagccgcgcaagatcatctccagcccgacctggtccggcctcgaggacgagcacgtcagctacaacgccggctacaccaacgtccacgagctgatcccgtggcgcaccatcaccggtcgccagcagttctaccaggaccacccgtggatgcaggcgttcggcgaaggcttcgtcagctaccggccgccggtcaacacccggaccaccgagaaactgttgaacaggaagcccaacggcaacccggagatcaccctgaactggatcaccccgcaccagaaatggggcatccactccacctacagcgacaacctgctgatgctcaccctgtcgcgcggcggtccgatcatctggctcagcgagcacgacgcggccaaggccgggatcgtcgataacgactgggtcgaggtgttcaacgccaacggcgcggcgacctgccgcgcggtggtcagccagcgggtcaaggacggcatggtgatgatgtaccacgcccaggaacgcatcgtgaacgtacccggcagcgagaccaccggcacccgtggcggccaccacaactcggtgacccgcgtggtgctcaagccgacccacatgatcggcggctacgcccagcaggcctggggcttcaactactacggcacggtcggctgcaaccgcgacgagttcgtcgtggtgcgcaagatgagcaaggtcgactggctggacgaaccccgccacggcggactcggcggcgacgccctgccgcaaccgctgccccaggacatttga

SEQ ID NO: 30382 - DNA, 663 bp, Pseudomonas aeruginosa
atggacttcttcagcgtgctttcccatctcgactggtcccaggtcggccagctcaccctccagcacctgctgctggtactggtcgccgtaggcctggcgatcctcgtcggcgtgccgctgggcgtgctgatgacccgcttcacgtggctggccggcccgctgcagggcgccgccacggtgatgctgaccatcccctcgatcgccctgttcggcctgctgatgccggtctactcggtattcggccagggcctcgggccgctgccggcgatcaccgcggtgttcctctattcgctgctgccgatcctgcgcaacacctacctcgccctgaccggcgtcgaagcgggcatccgcgaggccggcaagggcatcggcatgaccttctggcaacgcctgcggatggtcgacattcccctcgcggtgccggtgatcctcgccggcgtacgcaccgccgtggtgatgaacatcggcgtgatgaccatcgccgcggtgatcggcgccggcggcctgggcgtgctgatcctcacttccatcagccagagcaacatgccgatgctggtggtcggcgcggtactggtcagcctcctggccatcgtcgccgacctgctgctgcaatggctgcaacgcatcctcacccccaagggactgcgcgccagcgcgcactga

SEQ ID NO: 30383 - DNA, 1164 bp, Pseudomonas aeruginosa
atgatcgaactggacaagctcagcaagaccttcacccagaagaacggcaaggagttccgcgccgtcgattccgtcagcctgaccgtggagaaaggcgagatctgcgtcttcctcggcccctccggctgcggcaagaccaccaccctgaagatgatcaaccggatcatcccgccgacctccggccgcgtgctgatcgacggccaggacaccgcggacctcgacgaggtcaccctgcgccgccacatcggctacgtgatccagcagatcggcctgttcccgaacatgaccatcgaggaaaacatcatggtcgtgccgcgcctgctcggctgggacaaggcgcgctgcaaggagaaggcccgcgagctgatgagcatggtcaagctggagcccaagcagtacctgcaacgctacccgcgcgaactctccggcggccagcagcagcgcgtcggggtgatccgcgcgctggcggcggacgcgccgctgctgctgatggacgagccgttcggcgcggtcgacccgatcaaccgcgagtcgatccagaacgagttcttcgagatgcagcgcaagctcggcatgaccgtgatcatggtcagccacgacatcgacgaagccatcaagctgggtgacaaggtggcggtgttcaagagcggccggctgctccagtacgaccacccggacaccctgctggcgcacccggcggacgagttcgtcagcgccttcaccggccaggacagcacgctcaagcgcctgctcctggtgcgcgccgaagacgccgccgacagcagcctggtcaccgcccggccgcagaccccggtggccgaggcgctggaactgatggacgagaacgaccggcgctacctgatcgtggtggatgaccagggcaagggcctgggctacgtgcgacgcaaggacctgcgccgccaggagggcacctgcgcgccgttcgtcaccccgttccgggtcaccgccagccacgacgagcacctgcgcatcctgttgtcgcggatgtacgagttcaacagctcctggctgccggtgctcgaccccgaccagcagttcctcggcgaggtcacccaggaatccatcgccgactacctcagctccggccgctcgcgcggcggcaagggcctgatcgtgtcgccggccgaacaggtcggggcctag

SEQ ID NO: 30384 - DNA, 954 bp, Pseudomonas aeruginosa
atggacaccctgcaaaacatgcgagccttcgtctgcgtggcggaaaccggaagcttcaccgcggcgtcccagcagctcaacaccaccaccgcctatgtttcgcgggcggtggccaacctcgagacgcacctgcgcacccgcttgctcaaccgtaccactcgtcgcatcgccctcaccgaggccggccagcgctacctgctgcgctgcgagcagatcctcgcctacgtcgaggaagccgaggccgaagccagcgacgcccatgcccgacccgccggcaagctgaagctgcattcgatgaccggcatcggccagcactacgtgatccgcgccatcgccggctaccgccagcagtaccgcgacgtgaccttcgacctgaccatggccaaccgcgtgccggacctgctcgacgagggcttcgacgtggccatcgtggtggcctccgagctgcccgattccggcttcatttcccagcgcatcggcgagacctacagcattctttgcgcctcgccggagtacctgcgcctgaacggcacgccgagcgagccttcggagctggccagccacgactgcctgcgcctggtcagcccggtggtgccgctggatcgctggctgttcgacggtcccaacggccaggaaatggtctccatcggcgcctcgccgttccaggtcaatgtcggcgacgccatgaccgaggcaatccgctccgggctgggcatcggcatcctgccggtgtattcggccatcgaggacctgggcaagggcaccctggtgcgggtcctgccgcaacaccgcctgcaacagctcaacgtctatgcgctgtacccttcgcggcagtatctcgacgcgaagatcaagacctgggtggaatacctcaaggaaagcctgcccggcctgctccagcgcgacgaagcggcgctggtggagctgggcctggaactcggaagaccctcctga

SEQ ID NO: 30385 - DNA, 954 bp, Pseudomonas aeruginosa
atgagcctgcccgccgcacccaaggtgccgccgcaggtggctgaacaggccgtgcgctggctggtcgagctgcagggcggcgccgacgacgaacgcctgcgccaggcctggcagcgctggcgccaggcggccccggaacacgagcaggcctggcgccacatcgaggcggtcaaccagcgcctggccgggataggcacgccactggccctggccgccatcaacgcaccgcattcgccgcaacgccggcgcgcgctgaagaccctgctgctggtcctggccgccggcggcagcgcctggggcctgcgcgagagcggcagcctgcagcgctggagcgccgactatgccaccggcgtcggcgaacgccggcgcctggccctggccgacggcagtcgcctcgagctgaacagcgacacggcggtggatgtccgcttcgatgccggcgaacggcgcctgctcctgctgcgcggggaaatccagctcagcaccggccacgacccgcgcccgctgcacgtgtacagcgcggaaggccggctgcgaccggtgggcacccggttcgacgtgcgccagttcgccggacgcacccgcgtcgccgtccacgaaggcgcggtacaggtggagaaccgcgccggccagggcctgctgttgcccagcggccggcaactggacttcgaccgcgagcgactcggcgctccgcagccgctgccggtcggcagcggcgcctggaccgacggcatgctggtggccgccggcatgcgcctggacgaattcctcgccgaagtcgcgcgctaccgccccggccggctgggctgcgacccgcgcatcggcggcctgcggatttccggcagctatccgctggacgatagcgagcggatcctcgccaccctgccggcggtgctacctgtggaggtacggcgcgtcacccgctactgggtcggcgtgcacccgcgcgaatga

SEQ ID NO: 30386 - DNA, 2355 bp, Pseudomonas aeruginosa
atgtccccgtcacgcgccctgtcgccgctcagccgcgccctgctcctcgcctgcctcggcggtcccgtcctggtttccgccggcagcgcctgcgccgccgagatccgcaccgatgcccgccagtactaccgcctgcctgccgagccgctggagcaggcgctgaaccacctaggccgccaggccggcgtgctgatcgccttcagcccggaacagaccgccgcgcgacgcagccaggcgctggacggcgagtacaccctggaggaagccctggccgccctgctcgtcggctccggcctggaggcgcgcgcccgcggcgacggcgcctacaccctggaagcgctgccggtggaagacccggccaacctgcaggcgctcaccgtggtcggcgactggctggccgacgccagcgccgccgacgtcttcgagcatcccggtgcgcgcgacgtggtccgccgcgagcagttccaggcccaaggcgcggccagcacccgcgaagtgctggagcgcattcccggggtcagcgcgccgctcaacaacggcaccggcagccacgacctggcattgaacttcggcattcgcggcctcaacccgcgcctggcgtcgcgctcgacggtgctgatggacggcatcccggtgcccttcgccccctacggccagccacagttgtcgctggcgccggtgtccatcggcaacatggacgcggtggacgtggtccgcggcggcggcgcggtgcgctacgggccgcagaacgtcggcggcatcgtcaacttcgtgacccgggcgatccccgaggacttcgccaccaagctcgacgtgcacagcgaactcagccccagctccagccaggacggcctgaagaccacccacaacgtgctgatcggcggcaccggcgccaacggcctcggcggcgccctgctctactccggcacccgcggcggcgattggcgcgagcacagcgatacgcggatcgacgacctgatcctcaagggccgcttccagcccagcgacgaacacacgttttcggcgatgacccagtactacgacggcgaggccgacatgcccggcggcctcggcaccgcggcctaccacgacgacccgtaccagtcgacccgtccctacgacaagttctggggccgccgtaccctggccagcgccagctacgaatacacccccaacgccagccagaagctcaacgtcaccggcttcttcaccaagaccctgcgcagcggctacctcgaccagggccgcaacctcaccctgtcgccgcgcgaatactgggtgcgaggcctggaaacccgcttcagccagggcttcgagctgggcgaaagtcgccacgaagtgggcatcggccaccgctacgtcaacgaagccagccacgagctgcgctactggacccgcgccgacagcggccagctacccagcaccggcagccgcaacgaccgcgacacccgcggcagcaccgaagccaacgcgttctacatcgacgatcgcatcgacatcggcaactggaccatcacccccggcatccgctacgagaagatcgattccgaacagaagaacctgctgaagaacagcaaggacagcggccgctacaacgcctcgctgccggcgctcaacgtgatctaccacctcacgccgagctggaacctctacgccaacaccgagggctcgttcggcaccgtgcagtacagccagatgggcaaggcggtgcgcagcggcgacatcgagccggagaaggcccgcacctgggaactcggcagccgctacgacgacggcatcctgcgcgccgaactgggcgccttcctgatcaacttcgacaaccagtacgagagcaaccagcagaccgacagcgtgaccgcccgcggcaagacccggcacaagggcatcgaggcggcgatcgcctacgacctggccgatctcgacccgctgctctccggcttcgacgtctatgccagctacgcctacgtcgacgcgagcattcgcgaagacgggccgaacaagggcaaccaggtgccgttctcctcgaagcacaagggcacccttggcgccaactaccgcaccggcgcctggagctacaacctcgacggcagcttccagaccagccagtacgccgacaacgccaacaccgagagcgaaagcgccgacggcagcaccgggcggatcgccggctggatggtctggagcgcgcgcggcacctacgacttcggcccgcaactgaacgacctcaagctcggcctgggggtgaagaacctgttcgatcgccgctactacacccgctcgttcgacgacaacaacaagggcctctacgtcggccagccgcgcaccctgtacgtacaggcctcggtcggtttctga

SEQ ID NO: 30387 - DNA, 1584 bp, Pseudomonas aeruginosa
atgaccactcaggccgccgaagtcgcgaagcgccgtaccttcgcgatcatttcccaccccgacgccggtaagaccaccatcaccgagaagctcctgctgatgggcaaggcgatcgccgtcgccggtaccgtgaagtcgcgcaagtccgaccgccacgccacgtccgactggatggagatggaaaagcagcgcggcatctccatcaccacctcggtgatgcagttcccctaccgcgagcacatgatcaacctgctcgacacccccggccacgaagacttctccgaagacacctaccgcaccctgaccgcggtggactcggcgctgatggtgctcgacggcggcaagggcgtcgaaccgcggaccatcgccctgatggaagtctgccggctgcgcgacacgcccatcgtcagcttcatcaacaagctcgaccgcgacatccgcgaccccatcgagctgctcgacgagatcgaggcggtgctgaagatcaaggccgcgccgatcacctggccgatcggctgctacaaggacttcaagggcgtctaccacctggccgacgacaggatcatcgtctacgtcccgggccacggccacgagcgcatcgagaccaaggtcatcgaaaagctcgactccgacgaagcccgcgcccacctcggcgatctctacgacaatttcgtcgaggagctggagctggtgcagggcgcctgccatgaattcgacaaggacgccttcctcaagggcgagatgaccccggtgttcttcggcaccgcgctgggcaacttcggcgtcgaccaggtcctcgactgcatcgtcgactgggcgccgcagccgctgtcgcgcgccacccacgaacgcagcgtggagccgaccgaggagaagttctccggcttcgtgttcaagatccaggcgaacatggatcccaagcaccgcgaccgcatcgccttcatgcgcatctgctcgggcaagtacgagaaaggcatgaagatgcgccacgtgcgcctgggcaaggacgtgaagatcgccgacgcgctgaccttcttctcctccgagcgcgagcaactggaagaggcctatgccggcgacatcatcggcctgcacaaccacggcaccatccagatcggcgacaccttcagcgaaggcgagaacttcggtttcaccggcatcccgcacttcgccccggaactgttccgccgcgtgcgcctgaaagacccgctgaagtccaagcagttgcgccagggcctgcaggaactggccgaggaaggtgcgacccaggtgttcttccccgagcgcaacaacgacatcatcctcggtgcggtgggcgtgctgcagttcgacgtggtcgccagccgcctgaaggaggaatacaaggtcgagtgcgcctacgaggcgatcaacgtctggtcggcacgctggatcgagtgcgacgacgagaagaagctcaaggagttcaaggacaaggccttcgagaacctctccgtggacggcggcgggcacctcacctacctggcaccgacccgcgtcaacctcagcctgatggaagaacgctggccggacatccgcttccgcgcgacgcgcgagcatcactga

SEQ ID NO: 30388 - DNA, 1224 bp, Pseudomonas aeruginosa
gtgagcgcttgcgcctgcgatggcggccaactgcgcccgctcgacgaggcgctggccgaactgctggcgcgcgcgccgcgcccgccagcctgcgagagcctggccctggagcgggcgctgggacgagtgctcggcgaggacctgctggcgccgatggacctgccgcattgggacaacagcgcgatggacggctacgccttgtgctccgccgacctgccgcgcagcggcggcagcctgacggtcggcgcgcggatcgccgccggcgacacccgcggcatgagcctgccgctgggccaggcggcgcggatcttcaccggcgcgccgctgccgaccggcgccgactgcgtggtgccgcaggaactctgcgtggtcgacggcgagcgcgtgcagttgccgccggtgagcgccggccagcatgtgcgccggcgcggcgaggagttgcgtcgtggcgcgccggtgctgcgtgccggacagcgcttgcgcccgcaggaactcggcctgctggcgagtctcggcgtcgccacggtctcggtgcgtcggcgcttgcgcatcggcctgctgagcagcggcgacgaattgcgcgagcccggccagacactgttggccgggcagatctacaacgccaaccgttactgcatcggcgccttgctgcgcggtctgggcttcgaggtgcacgacgaggaagtgctcgccgacgaactggtggccagccgcgatgcgctcagcctggcggcctccgaatgggacgcgctggtcaccagcggcggtgtctcggtaggcgaggaagaccacctcaagcgcgccatcgccgagcttggcgaggtcaacctgtggcgcctggcgatccagccgggcaagccgttcgccttcggctccgtggccggcaagccctggctggggctgcccggcaaccctgcggcggcgctggtcaccgcattactggtggcgcgtccgttcctgcttcgccagcagggactgttcgacgtagtgccgcggccgctggcgttgccggcggccttcgactggccgcaaccgcgggcgcgtcgccagtacctgcgggcgcggctcgatgaacgggggcgggtggaaatccacccgcagcagggctcggcgatgctgcttgccgccagttgggcggacgggctggcggtgatcgagcgcggcgccaccctgggcgtgggtgatgcgatcgactttctgccgttctccgcactgatggcctga

SEQ ID NO: 30389 - DNA, 558 bp, Pseudomonas aeruginosa
atgagccacctggccacctccaccttccagccgctgaacatcgccatcctcaccgtcagcgacacccgtaccctggaaaccgatacttccggccagaccctcgccgacgcgctgctggccgccggtcatcgcctgcaccagcggagcctgaagaccgatgacatctaccagatccgcgcggtggtctcggcctggatcgccgaccccgaggtacaggtcggcctgatcaccggcggcaccggcttcaccgcgcgggacaacaccccgcaggcggtcgggccgctgttcgagcgcgatgtcgagggcttcggcgaactgttccgccaggtctcgcagcgcgagatcggcacttccaccatccagtcgcgggcgctggccgggctcagcaacggtaccctggtgtgctgcctgcccggctcgccgggcgcctgtcgcaccgcctggaacgagattctcctggcgcaactggacagccgcacccgcccgtgcaatttcgtcccgcacctgaagaccccgccagccgtggcgccggtggccggctgcgggtgccgctcgtga

SEQ ID NO: 30390 - DNA, 2379 bp, Pseudomonas aeruginosa
atgaacagcgccacgctaaccgagctcgatctgccggtcagcggcatgacttgcgcgtcctgcgccggccgtgtcgaacgagccctgaagaaagtgcccggggtcgcggccgcctcggtcaacctggccagcgagcaggcccgcgtacaggccccggcggacagcctgccggccctggtggcggcggtcgagcaggccggctaccaggttccggcgcgcagcctggaactgtccatcgagggcatgacctgcgccagttgcgtcggccgggtcgagcgggcgctgaagaaggtgcccggcgtacgcgaggtcagcgtcaacctggccagcgagcgcgcccacctcgagctgctcggcgccgtggacagccaggccttgctacaggcggtggaacaggccggctacaaggcccgcctgctcgacgcggggcaaccacgccaggacgatgccgagcgccgcctgcgccgcgaacgctggtgggtgatcgccgcgctgttgctggcgttgccgctggtgctgccgatgctggtggaatgggccggcctgcactggatgctgccgccgtgggcgcagttcctcctggcgaccccggtgcagttcgtcatcggcgcgcgcttctatgtctccgcctggcgcgcggtgaaggccggtgccggcaatatggacctgctggtcgccctcggcaccagcgccggctacggcctcagcgtctacctctggctgaccgccccgcccggccacatgccgcacctctacttcgaagcctccaccgtggtgatcgccctgatcctcctcggcaagtacctggaaagccgcgccaagcgccagaccgccagcgccatccgcgccctcgaggcgttgcgcccggagcgcgcggtgcgcctgcgcgacggtcgcgaggaagaggtggcgatcgccgagttgcgcctcggcgacgaggtggtggtgcgtcccggcgaacgcttcccggtggacggcgaggtgctcgacggcagcagccacgccgacgaggcgctgatcaccggcgagagcctgccggtgcccaaggctcccggcgacaaggtcaccggcggcgcgatcaacggcgaaggccgcctgctcctgcgcaccactgcgctcggcggggaaacggtgctggcgaagatcatccgcctggtggaagacgcccaggccgccaaggcgccgatccagaagctggtggacaaggtcagccaggtcttcgtcccggtggtgatcctcatcgcgctggtcaccctcggcgcctggctggtcgccggggtcggcctggagcaggccctggttaacgccgtggcggtgctggtgatcgcctgcccctgcgccctcggcctggccaccccgaccgcgatcatggccggcaccggcgtggccgcgcgccacggcatcctgatcaaggacgccgagtccctggaagtcgcccatgcggtcaccagcgtggccttcgacaagaccggcaccctgacctccgggcgaccgcagatcatccacctcggcggcgacgaccaggagcaactgctcaggctcgccggcgccctgcaacgcggcagcgagcacccgctggccaaggccgtgctcgagcgctgcgccgagcgcgacctggaggttccgccggtgaacgccagccaggccctcagcggtcgcggcatccagggcgaggtcgagggtcgccggctggccctgggcaaccgccgcctgctcgacgagcaggaactcaagcccggcgcgctggcgagtgccgccgcggactgggaggccgagggccgcaccctgtcctggctgctggaattggctccggagaaacgcgtgctcggcctgttcgccttcggcgacagcctcaaggacggcgccgccgaagcggtggaggccctgcgcggacgggatatccacagccacctgatcaccggcgacaaccgcggcagcgcggcggtggtggccaaggccctgggcatcgacgacgtacacgcggaagtgctgccggcggacaaggccgccacggtcgccgagctgaaaggccggggccgggtggtggcgatggtcggcgacggcatcaacgacgccccggcgctggccgctgccgacgtaggcatcgccatgggtggcggcaccgacgtggccatgcacgccgccggcatcaccctgatgcgcggcgacccgcgcctggtgccggcggcgctggacatctcgcggcggacctacgcgaagatccgccagaacctgttctgggccttcatctacaacgtgatcggcatcccgctggcggccttcggcctgctcaacccgatggtggcgggcgcggcgatggccttctccagcgtcagcgtggtcggcaacgccctgctcctgcgacgctggaagccctga

SEQ ID NO: 30391 - DNA, 1926 bp, Pseudomonas aeruginosa
atgacaacccgtaatccgttctcgcgtcgggcccggttgccgttggccgtcagcctggcttcctcgctggcggctccggcctttggggtgaccttcaacatcggggaaatcgaaggttccttcgattcggcgttgtcggtcggggccagttggtcgaccgccaagccgaacaagaacctgatcggtgtgaacaacggcggcaagggactttcccagacctccgacgacagccacttgaacttcaagcgtggggaaacgttctcgaaggtcttcaagggcatccatgacctcgaactgaagtacggcgataccggtgtgttcctgcgcggcaagtactggtacgacttcgagctgaaggacgagcaccgcgagttcaaggacatcgacgacagcggccgcaagaccctggccaagtcctccggagccgaactgctcgacgccttcatctaccacaactatgccatcggcgacctgccgggcagcgtgcgcctgggcaagcaggtggtgaactggggcgagagcaccttcatccagaacggcatcagcgccatcaacccgatcgacgtcaccgccttccgccggcccggctcggagatcaaggaaggcctgatcccggtgaacatgttctacctgtcgcagaacctcaccgacaacctgtccgccgaaggcttctaccagatcgagtgggaccagacggtggtcgacaactgtggcaccttcttctcccagccggacgtggtggccgatggctgcgaccagaacctggcggtgctgaccaacaacaaggcgtccatcaacctgctcaacaacgtgctcgccggggctggcctgagcgttaccccgtcgccctgggacgagggcatcctggtccgccgcgggccggaccgcgacgctcgcgacagcggccagtacggcttcgccctgcgctacttcgccgacgaactgaacaccgagttcggcgcctactacatgaactaccacagccgcctgccgatcttcagcggccagggcgcctcggccagcaccatggcggcgatcaacgacctcgccacccgcctcgccgcgatcaacccggcactggccgcccaggccgcggcggcggccaccgccggcaactccagctacttcatcgagtacccggaagatatccgcatgttcggcctgagcttctccaccacgttgcccaacggcaccgcgtggagcggcgaagtcagctaccggcccaacgcgccggtgcagttgaacaccaccgacatcctcttcgccggcctcgacccggtgagcatcggcggcaaccgcccctacgacaacgcctcggtgctgaacggccaggccgggcaggacctgcacggctatcggcgcaaggagatcacccaactgcagaccaccctgacgcacttcttcgaccaggtgatgggcgccgagcgcctgaccctggtgggcgagatcggctggacccacgtcggcggcctggaaagcacctccaaggcacgctacgggcgtgacccggtcttcggaccggggccgctgccggggaccatctccggcctggccagctgccaggcgctgaacgtcagcacgctgggcaccgccgaagcgaacaacgtcagccgctactgcgagaacgatggctataccacctcggacgcctggggttatcgcgcccgtgcgatctgggactacaacgacgtgttcatgggcgtgaacctcaagcccagtgtggcctggtcgcacgacgtcgatggctattcgcccggtcccggcgccaacttcgaggaaggccgcaaggcggtcagcctgggggtggacgcggagtaccagaacacctacaccgcgagcctctcctacaccaacttcttcgacggcaagtacaccaccgtggacgatcgcgacttcgtcgcgctcagcttcggcatgaacttctga

SEQ ID NO: 30392 - DNA, 3639 bp, Pseudomonas aeruginosa
atgcgatcaaaactattcctgctgttcttctgcctgctgctgtcgggcggacgcctgttcgccgtcgaagcgcatccgtccctgacgctgttcagccagttgcgcatcgagcacgaggacatggcgatcgccgaggacgactgggcctggctgcgtcacaagggtcacctgaggctcggcgcggcgctggacgagacctcgcccttcaacgtccggctcgacgacgagaactacgaaggcataacggcggacgtcgccacgctggtcgggcagttgctcggcatgcgcatcaaggtcgtgagcttcgatacccatgcggatgccgtggcggcgctcgctgccggaaagatcgacctgcttggcagccattacagctcggcgggtgattcctccctggtgctcagccaaccctatgcccgtgatcgattggcggtgttcaagcggatgggggaaaagcgcaactcgccggaggatctcgccggactcagcgtggcggtggcccgggagcatgtcggggaattgcgccagcgtttcccgcgggcgcgtttcgtggtcttcggcagccatgacgaggccgttgccgcggtggctttcggacataccgacctgtatctcgacgatgtgctcagcgcctaccaccggatcaatcggtcctattacggctacgtgaggttcgagcggtttgccgatgcccgtctggaagggggctacggcttcctccttcgtcgcggcgacacgaacctgttgcgcgtcgtcaactcggccatcggcgcgatcaaccaggaccgtctcgaaagcatcgccaggcgctgggtcggcagcggttccctgccaacgggccagcgtatcgcgctgacgccgcaggagagtcgctggatcgctcgccacccggtggtgcggttggtcatcaacgacgacctggcgccgctggccttcttcaattccgacgagaccttctcgggcatcgcctccgacctgctggacatgatttcccgccgcaccggcctgcatttccaggtcacgcctcgcagtggcggcttccccgagcagatcggcgtattggccaggaaggaggcggacctggcgatcatgagccgcagcagcaagcgcgaggaaatgctgcgtttcacccgctcgttcctgtccacctcgtacgtcctcgtcacccgggcggacgacaagggacgcgcggagatccccgggagcctcgacggcaagcgcatagcgattcccgccggccatgtgggcatgcaacaggtgcgcgagcgctatccgcaggcctcgatggtggaggtcggcgtcgcgctggatgccatgaacctggtctacgaaggacgggccgacgcggcggtggtgccgctggtcaccgctcgctactacatcgtccggttgttccgcgagaggctggcgatcgccgacctggttcccatcggtgcggccaccgcccacttcgccgttcgccgaggcgacgccgaactccagtcgattctcgacaaggccttgctgagcatctcgccggacgacctgagcgatatcgtcaatcgctggcgctcgccgccgggaatgagcggccagacctgggtcgactacatcctggtgatcaccgagatcctggcgatcgcagcggccttgctgctgctctgcctgggctgggtcacttatcagcgccggcagatcagggtgcgcgcgcgggtcgaacaggcgctcagcgaccagttgcggttcgtcgaggccctgaccgactgcatgcctccgccgctgtatgtgcgcgatgtcaacggacggatgctgtcctgcaaccgcagctacctgcagagcgtcggcttgagttccgaggaggtgatgaaccgcaccgtgctcgaactgcccatggaaaacttcgagaccgctccggagttccatcgcagctacctgatggccatgcgcgagggcaggaccatcgaggcggtctacccggtggcgctgggcggtcgggagcgctggatcgaccactggatccagccgttccgcgattccagcgggaccatccgcggtgtcatctgtggctggctggacatcaccgagcaccgccagttgatcgatgagctggaagaggcaaagaatctggccgacgaagcgagccgggccaagaccaccttcctggcgaccatgagccacgagatccgcacgccgatgaacgcggtgatcggtatcctcgaactggcgctcaagcgtgccgagaccggtcgggtggaccgttccagcatcgagatcgcctatgcctcggcgaagagcctgctggagctgatcggcgatattctcgacatcgcccgcatcgagtcaggtcgcctcagcctgtcgccgaaacgggccaacctgcgcgagctggtggaatcggtggcacgggtattcgaaggcctggcccggcaaaagcgcctgagcctggtgctggagatcgattcgagcatcaacggcgacgtactgctggatgccatgcgcttcaagcagatcctctccaacctggtcagcaacgcgatcaagttcaccgacgagggctcgatccgcatccgcatcgatggccgccaggtggagccgtcgctgttgcaggtcaatctctgtgtggaagacaccggcatcggtatttccctgggcgaccagcagcagttgttccggcctttcgcccaggtcaaccgcaacctgcagaacaccgagggcaccgggctcggcctggtgatctcgcgctcgctgtgcgaaatgatgggagggcgcctggtgatgagcagcgagctggggcagggtacgcggatcgacgtcgagctgcgcctgcaggtgctggaaccgatcgtcgagaacgtgcgggcgatcccgctcggcagtcgccaggcgcggcggttgcaggtgctggtggtggacgatcatgcggtcaaccggcagatcctccatcaacagctgagcttcctcggtcatgacgtggaggaagcggagaacggcctgagcgctctcaacctgtggcatgggcaaccgttcgacatggtcatcaccgactgccacatgccgctgatgagcggctccgaccttgcccgctcgatccgccaggaggagcgcgagaatggcgaggagccggtggtcatcatcggcctcaccgcggacgcccagccggaggagatcgagcgctgcatccaggctggaatgaacgagtgcctgatcaagcccatcggcctcgatgtcctcgaggagcgcctgctggccctgggcttcgccgccgacgagctgcccgtcaccatcgatgccgaacccgtcgccataccgacggccccccgtctctacgacctggattccctgcatgcgctgaccggcggcgagccgacgatgctcaggcggctgctcgacgaactgctgaccagcaaccgcaaggacctggagaccctcgagggactggtgcaacgccaggagaccggcgaactggccgagctggcgcatcggatcaagggcgcggcgagggtggtgcgtggcgagcaactggtggaaagctgccggcgcctcgaggatgcctgcctcagcccgaacgcctcgttcgcctgggtggaagagtgcgccgttggggtgaaactggcgatcctcgccctggacgaaagcctggtggaagagtgcacggattga

SEQ ID NO: 30393 - DNA, 2517 bp, Pseudomonas aeruginosa
atgatttccctacccatcgacgccgttgttcccgccctgcgccaggcccttggtgcacaacaccaggccgtcctggaagccccgccgggtgccggcaagaccacccgggtgccgctggccctgctcgacgagccctggctcgccggccaacgcatcctcatgctcgaaccgcgacgcctggcggcgcgggccgcggccgagcggctggccgccgagctgggcgaaaaggtcggcgagaccgtcggctaccggatccgcctggagagcagggtcggcccgaagacccgcatcgaagtggtcaccgagggtatccttgcccgtcgcctgcaagacgaccccgcgctggacggtgtcggcctggtgatcttcgacgaattccacgagcgcagcctggatgccgacctagccctggcgctgactctcaatggccgcgaactgttgcgcgacgagccgccgctgaaagtgctggtgatgtcggcgaccctggagggcgagcgtcttgcggcgctgctcggcgaagcgccggtggtgcgcagcgagggccgcatgttcccggtggatatccgctggggacggccggcgcaacccggcgagttcatcgagccgcgggtgcagcaggcggtgctccaggcgctggcggaggaaagcggcagcgtgctggtctttcttcccggccaggccgagatccgccgcgttcacgaaggcttgcgcgaagcccttggcggacgccccgaggtgctgctctgcccgctgcatggcgagctcgacctcgccgcccagcgcgccgccatcgagccggcgtcgcggggcacgcgcaaggtggtgctggcgaccaacatcgccgagaccagcctgaccatcgacggcgtacgggtggtgatcgacgccggcctggcgcgggtgccgcgcttcgatccgggtagcggcatgacccgcctggagacccagcgcatctcccgcgcctccgctacccagcgtgccggccgcgcagggcgcctggagccgggcgtatgctaccgcttgtggtcggagagccagcatgagcagttgcctgcctacggcacggcggaaatcctccaggccgatctggccgggctggccctgcaactggcgcgctggggcgtggcgccggaggagctggcctggctcgacgcgccgcccgcggcggcctacgcccaggcccgcgagctgctcgggcggctgggggcgctgaacgccagcggcgcgttgagtgcccatggccaggcgatggccgaattgccgacccatccgcgcattgcccacctgctgctgcgcggccaggccctcggccttggcgaactggcttgcgacgtagcggcgctgctcggcgaacgtgacatacagcgtggcggcggtgccgacctgcacagccgtctcgccctgctcgccggcgaggcccgcactggcgcctcgcgcggcgcggtacagcgcgcccggcaactggcccggcagttccgcggttacctgcgcggcgccgccagcgaggcggtcgtcgatcccggtcatccgcgttggctgggttgcctgctggccttcgcctatcccgaccgcatcgctcgccagcgccgcgccggtggcggcgactaccggctggccaatggacgcgctgcgcagttcggcgaaccggacagcctgatgaagcagccctggctggtgatcgccgatctgggcagccgccagggccagcgcgaagagcggatctacctggccgccgaactcgatccgaggttgttcgatacggtcctggcggagcaggtcagccagcgcgacgagctgcagtgggacgagcgcgaaggcgtgctgcgtgccgagcgccagcgccgggtcggcgaactggtgctgtccagcgaggcgctacccggcctcgacgaagcggcgcgcagccaggcgctgctcggcctggtccggcgcaagggcctggagttgttgccctggaccccggaactgcgccagtggcaggcgcgcatcggcttgctgcgccggctggacctggaagacaagggcgagagcgagtggccggacgtcagcgacgccgcgttgctggaacggttggaggaatggttgccggcctatctcggcaaggtcacccgcctggctcacttcgccaacctcgacctggcttcgatcctcgccgggctgttgccctggccattaccgcagcgtctcgacgagtgggcgccgaaaaccctggaagtcccctccggctcgcgcatccgcctggactacagcgaaaccccgccgatcctcgcggtgcgcctgcaggaactgttcggcctcggcgacactccgcgcatcgcccagggccgcctggcagtgaagctgcacctgctgtctcccgcgcatcgcccggtgcaggtgacccaggacctggcgaacttctggcgcagcacctatgcggaagtcaggaaggacctgaagggacgctatccgaagcattattggccggacgacccgctggtggccgaggccactgcccgggccaagccacgcaagtag

SEQ ID NO: 30394 - DNA, 1500 bp, Pseudomonas aeruginosa
atgcgaaccgacaggaagcccaccatgagtatcgattccgacgacgggttcgtcgtcgcccgcacggccgaggaggccgtcgaccgtcttgccgagctgcaccgccaggccaccgcggcgctgagccaggcgctcaagcgctacatcaaggagcgcatcgagccgagcgaggccgagcggcagaacttccactacccgcaactgcgcatcggctaccgctgccagggcgaggtgccgtccaccacccgcgcctacgccaaggtccaggtgccgggcgaatacagcgtcaccgtcacccaccccgacgccttccgcaagtacctgctggaacagttgcgtccgctgatggacgatttcaccgtgcaggtgcaggtcggcccgagccaacaggacatcccctatccctacgtggtcgagcagggcgacgagctggccggctccggggtgaccgccgccgagctggcgcgggtgttccccagcaccgacctgtccgccgcttccgacgacatcgccgacggcctctacgaatgggaacgcgccgaccagttgccgctggcgctgttcgacgccgcgcgggtggacttctccctgcgccgcctggtgcactacaccggcagcgactggcgccacgtgcagccgtggatcctgctgaccaactaccaccgctacgtcgaccagttcatccgcctcggcctgacccgcctgcgcgaggacccgcgcttcgtgcgcatggtcctgccgggcaacgtgatcatcgaacgcgggatggacgaaggcgaggccaacgccatcgtcgccggggtggtctggcaccgctaccagatgccggcctaccacctgatcgccgccgatggcgacggcatcaccctggtcaacatcggggtcggcccgtccaacgcgaagaacatcaccgaccacctggcggtgttgcgtccgcattgctggctgatgatcggccactgcggcggcctgcggcagtcgcagaccatcggcgactacgtactggcgcacgcctacatgcgccgcgacggcatcctcgaccgcgcgctgccgccgcacatcccgatcccggcgctggccgaagtccaggtcgccttgcaggaagccgccgccgaagtcaccggcgagcgcggcgagtcgctcaagcgacgcttgcgcaccggcaccgtgctcacctacgacgaccgcaactgggagctgcgctgggcccaggagcggccactgatcaacctggcgcgggccatcgcggtggacatggagagcggcaccatcgccgcccagggctaccgcctgcgggtgccctacggcacgttgctgtgcgtctcggacaagccgctgcacagcgagatcaagctgcccggctcggccaacgccttctacgagcgcgcggtgaaccagcacctgcggatcggcatcgccgccctcgacctgttgcgcagccagctcaactcgctgcactcgcgcaagctgcggagtttcgacgagccgccgttccgttga

SEQ ID NO: 30395 - DNA, 630 bp, Pseudomonas aeruginosa
atgaaactgcgcggcctgtacgccatcaccgatagccagctactggacgacggccgcctgctgccctacgtcgaagccgcgctccgcggcggcgcgcgcctgctgcaataccgcgacaaatccagcgaccaggcgcggcgcctgcgcgaggcggaaagcctgcgcgaactctgcgaacgccacggcgcgcagttgatcgtcaacgacgacgccgaactcgccgcgcgcctgggcgtcggcctgcacctcggccagaccgacggttcgctgtcggcggcgcgcgccctgctcggccgccaggcgatcatcggcgccacctgccacgcccaactggaactggccgagcaggcggtggccgagggcgccagctacgtcgccttcggccgcttcttcaattccagcaccaaacccggcgcccccgccgccagcgtcgaactgctcgaccaggcccggccgcgcctgcacctgccgatcaccgccatcggcggcatcagcctcgacaccgcgcccggcctgatcgcccgcggcgtcgatctggtcgccgtgatccatgcgctgttcgccgccgcgtccgccgccgaggtggaacgccgcgcccgcgccttcagcgccctgttcgaacctgcctga

SEQ ID NO: 30396 - DNA, 840 bp, Pseudomonas aeruginosa
atgagcgaagaccgatcgagcaacgggcacaagtcctggctggacaagatcacccaggcttttgcccacgagccgagaaaccgccaggagctcctcgagctgctgcgcgatgcccacgacaacaagctgctggacagcgaggcgctgtccatcgtcgagggggcgatccaggtcgccgacctgcaggtgcgcgacatcatggtgccgcgctcgcagatgatgagcatccgctcgacccagacgccgaaggaattccttccggccatcatcgaagccgcccactcgcgctacccggtggtcggcgaaagcctcgacgacgtcatgggcgtactgctggccaaggacctcctgccactgatcctgcacaacgacgagcgtcccttcgacatcaaggaactgctgcgtccggctaccttcgtccccgaatccaagcgcctcaacgtgctgctccgcgaattccgcgccaaccgcaaccacatggccatcgtcatcgacgaatacggcggcgtggccggcctggtgaccatcgaggacgtgctggaacagatcgtcggtgatatcgaggacgagcacgacgtcgaggaggacagctacatcaagccgctgcccagcggcgatttcatcgtcaaggcgctgacccccgtggacgccttcaacgacttcttcggctcggaattctctgacgaggaattcgataccgtgggcggcctggtgatgagcgccttcggccacctgcccaagcgcaacgaagtggtcgagctgggcgagttccgtttccgcgtactcaacgccgacagccgccgcgtccatctgctgcgcctgtctcccctgcagaactga

SEQ ID NO: 30397 - DNA, 2622 bp, Pseudomonas aeruginosa
atgcacgagcaatatcagccactcgagatcgaaacccaggcccagaactactggaaagaacaccagtccttcctcgtcagggagctacccgacaaggagaagttctactgcctgtcgatgttcccgtatccgagcggcaagctgcacatgggccacgtgcgcaactacaccatcggcgacgtgatcagccgctaccaccgcatgcagggccgcaacgtgctgcagccgatgggctgggacgcgttcggcatgccggcggaaaacgccgcgatgaagaacaacgtcgccccggcggcctggacctacgacaacatcgcctacatgaagtcgcagctggacagcctcggcctggcgatcgactggagccgcgaggtcaccacctgcaagccggactactaccgctgggagcagtggctgttcacccgcctgttcgaaaaaggggtgatctaccgcaagaacggcacggtcaattgggatccggtcgaccagaccgtactcgccaacgagcaggtgatcgacgggcgcggctggcgctccggcgcgctgatcgagaagcgcgagatcccgatgtactacttcaagatcaccgcctacgccgaggaactgctggagagcctcgacaacctgcccggctggccggagcaggtgaagaccatgcagcgcaactggatcggcaagtcgcgcgggatggagatcggcttcccctacgaccaggcctccatcggccacgccggccaactgaaggtgttcaccacccgtccggacaccctgatgggcgccacctacgtcgccgtcgccgccgaacacccgctggccacccaggcagcgcagaacgacccgcagttgcaggcgttcatcgacgaatgcaagcgcggcggcgtcgccgaggccgacatcgccacccaggagaagaaaggcatggccacttccctgttcgtcgaacacccgctgaccggcgacaagctgccggtatgggtcgccaactacgtgctgatgaactacggcgaaggcgcggtgatggcggtgcccggccatgacgagcgcgacttcgagttcgccaacaagtacggcctgccgatccgccaggtgatcgccaaggtcgagggcgacaacgacttcgagtccagcgtctggaaggagtggtacggcgccaaggacgagtccgtgctcaccgtcaactccggcaagtacgacaacctcggctaccaggccgccttcgacgccatcggcgccgacctcgaggccaagggcctgggccaggcgcgcacccagttccgcctgcgcgactggggcatcagccgccagcgctactggggctgcccgatcccgatcatccactgcgaggcttgcggcgacgtcccggtgccggccgaccagttgccggtggtgctgccggaagacgtggtaccggacggctccggttcgccgctggcgaagatgccggaattctacgaatgcaactgcccgaaatgcggccagccggccaagcgcgaaaccgacaccatggacaccttcgtcgagtcgtcctggtatttcgcccgctacgcctgcccgcagttcgaaggcggcatgctggacaggaaggcggccgactactggctgccggtcgaccagtacatcggcggcatcgagcacgccatcctgcacctgctctatgcgcgcttcttccacaagctgatgcgcgacgaaggcctggtcggcagcgacgaaccgttcaagaacctgctgacccagggcatggtggtcgccgatacctactaccggaccaccgccaacggcggcaaggactggttcaacccggccgacgtcgaggtcgagcgtgacgccaaggccaaggtcgtcggcgcgcgcctgaagagcgacggccagccggtcgagatcggcggcaccgagaagatgtcgaagtcgaagaacaacggtgtcgacccgcaatcgatgatcgaccagtacggtgccgatacctgccgcctgttcatgatgttcgcctcgccgccggacatgagcctggagtggtcggacgccggcgtcgagggcgccaaccgcttcctccgccgcgtctggcgcctggctcacgcccacgtcagcgccggcctccccggcgcgctggacgtcgccgccctgagcgacgcgcagaagcaggtccgccgcgccatccacctggcgatcaggcaggccagccaggatgtcggccagcaccacaagttcaacaccgccatcgccgcggtgatgaccctgatgaacgtgctggagaaggcgccgaaccaggacgcccaggaccgcgccctgatccaggaaggcttggaaaccgtggtcctgctgctggcgcccatcactccgcacatctgccacgtgctctggggccagctcggccatgccgaagcggtgatcgatgcgcgctggccgagcgtcgacgagagcgcactggtgcaggacaccctgcaactggtggtgcaggtcaacggcaagctgcgcggacacatcgacgtggccgccagcgccagccgcgaggatgtcgaggccgccgcgcgcgccaacgagaacgtgctgcgtttcaccgaaggcctgagcatccgcaaggtcatcgtggtaccgggcaaactggtcaacatcgtcgccaactga

SEQ ID NO: 30398 - DNA, 984 bp, Pseudomonas aeruginosa
atgagcactgttgtggagaagtccggagaagccaagccgggcaaggtggaagtcggcgtgaagctgcgcggcgcggaaaaggtcgcgcggattccggtgaagatcattcccaccgaggaactgccgaagaaacccgactggatccgcgtgcgcatcccggtttcccccgaggtcgaccgcatcaagcaactgctgcgcaagcacaagctgcacagcgtctgcgaagaggcgtcctgcccgaacctgggcgagtgcttctccggcggcaccgcgaccttcatgatcatgggcgatatctgcacccgacgctgcccgttctgcgacgtcggtcatggccggccgaagccgctggacgtcgacgagccgaccaacctggccatcgccatcgccgacctgcggctgaagtacgtggtgatcacctcggtggaccgcgacgacctgcgcgacggcggcgcccagcacttcgccgactgcctgcgcgagatccgcaagctgtcgccggggatccagctggaaaccctggtgcccgactatcgcggtcgcatggacatcgccctggagatcaccgccaacgagccgccggacgtgttcaaccataacctggagacggtaccgcgcctgtaccgctcctcgcggccgggctcggacttcgagtggtcgctggacctgctgcagaagttcaagcagatggttccgcacgtaccgaccaagtccgggctgatgctcggcctgggcgagaccgacgacgaggtcatcgaggtcatgcagcggatgcgcgagcacgacatcgacatgctgaccctcggccagtacctgcagccgtcgcgcaaccacctgccggtgcagcgcttcgtgcatccggacaccttcgcctggttcgccgaggaaggcgagaagatgggcttcaagaacgtcgcgtccggcccgctggtgcgttcgtcctaccatgccgaccagcaggcgcacggcaacaagatcggctga

SEQ ID NO: 30399 - DNA, 468 bp, Pseudomonas aeruginosa
atgcggttgcgcctgatcgcggttggctcgcgcatgcctcgctgggtcgaggaaggctggcaggaatacgtcaagcgcctgccggccgagctgtccctcgaactggtggagatcccgctcaacacccgcggcaagaacgccgacgtggcgcgcctgatccgtcaggaaggcgaggccatgctggcgcgcgtgcagccgggggaacgggtggtgaccctggaggtcgaaggtcggccctggagcaccgagcaactggctcgcgaactggatcgctggcgtctcgacgcacgcaccgtgaatctcatggtcggcggcccggaagggctggcgccggaggtctgcgcgcgcagcgagcagcgctggtcgctgtcgccgttgacgctgccgcacccgttggtgcggatcctggtcggcgagcagatctaccgggcctggaccgtattgtccgggcacccctaccacaaatag

SEQ ID NO: 30400 - DNA, 1266 bp, Pseudomonas aeruginosa
atgaccgagtccgtcctcgactatatgagccgccttggccgcgatgcccgcgccgcctcgcggttgctcgcgcgcgccgccaccgcgcagaagaaccgcgccctgctggccgcggccgatgcgctggacgccgcccgcgcggagttgtcccacgccaacgagcaggacctcgccgccggccgcgccaatggcctggagccggcgatgctggaccgcctggcgctgaccccggcgcgcatcgacgacatgatcgagggcctgcgccaggtcgccacgctgcccgacccgatcggcgagatccgcgacatgcgctatgtgccctcgggcatccagatcggcaagatgcgcgtgccgctgggcgtggtcgggatcatctacgagtcgcggccgaacgtgaccatcgacgccgccagcctgtgcctgaagtccggcaacgcgaccatcctgcgcggcggctccgaggcgatccactccaaccaggcgatcgcccgctgcatccagcagggcctggccgaggccggcctgccggccgccgccgtgcaggtggtggaaaccaccgaccgcgcggcggtcggcgcgctgatcagcatgcccgaatacgtcgacgtgatcgtcccgcgcggcggcaagggcctgatcgagcgcatcagccgcgaggccaaggtgccggtgatcaagcacctggacggcatctgccacgtctacatcgatgtcgccgccgacctggacaaggcgattcgcgtcgccgacaacgccaagacccagcgctacgcgccgtgcaacaccatggagacgctgctggtgcatgccggtatcgccgagcgggtgctgccgccgctggccacgatctaccgcgagaagggcgtggaactgcgcggcgacgccgcgacccgcgcgctgctcggcgcagacgtgctggaggctaccgaggaggactggcgtaccgagtacaacgcgccgatcctgtcgatccgcatcgtcgacgggctggacgcggcgatcgagcacatcaacacctacggctcgcagcacaccgacgcgatcattaccgagaacttcagcgatgcgcggcgtttcctcgccgaagtggattccgcttcggtgatggtcaacgcctcgacccgcttcgccgacggcttcgagtacggcctcggcgccgagatcgggatttccaccgacaagctgcacgcccgcggcccggtcggcctggaaggcctgaccagcgagaagtacgtcgtcttcggcgacggtcacgtgcgcacctga

SEQ ID NO: 30401 - DNA, 1314 bp, Pseudomonas aeruginosa
atgagtctcgacagcttcaacgcctggatggccgctaaccccgagtggctggggctggccatcttcctcatcgccttcctcgaatgtgcggccatcgtcggtatcgtcctccccggcgtggtgctgctgttcggcgtcgcggtgatcgccggcagcggcgccctcggcctcggcgaaaccctgctgctggcctacgccggcggggtgctgggcgacctcagctcgtactggatcggccgccgcttccaccagaacatccgccgcctgcccggcctgcgcagccatccgcagtggatcaccgccgccgaggtgtacttcgaacgctacggtatcgccagcctgctggtcggccgcttcatcggcgccctgcgaccgatgctgccgatggtcgccggcatgctcgacatgccgttcggccgttttctcggcgtttcgctgatcgccgccgccggctgggcggtcgcctacctgttgcccggctgggccaccggcgcagccctgcgcctgccgttgccggaaggcttctggagcgaagccgggatcgtcgcggcctgcctggcggtgctggtcggcgtggtagtccaggccagcctgcggcgcaaacgctgggcaaccgctgtggcggccgcgctgagcctggtcctgctgctggcgatgaccgtcgcctggccgtacctccaggacctcgaccagggcctgatgacgctggtccaggagcatcgcaacgccgacctgaacccggtgatggtggtggtcacccggctcggcgatttccgcacccagttcatcgccggcgcgctgctcggcggtatcctcctgctgacccggcaatggcgtccggccatcttcgccatcggcaccctggtgggtaccgcgctggccaaccagaccctgaagaccctgttcgcccgcgcccgcccggaagtgctggccgaaccgctgagcagcttcagcttccccagcggacacagctcggcgtccttcgccttcttcctcaccctgggcgtcctcgccagccgccagcaaccgccgcgctggcgcctgacctgggtactgctggcggtgatcccgtcgctgagcatcgccctgtcgcgggtctaccttggcgtgcactggccgtcggacatcgtcgccggcgccctgctcgccactacggtctgcgccgccagcctgtggctgagccagcgccgcgagtcgctgccggcgctgccgcaacgggtctggtggctgctgttgccggtctgcgtggcgaccctggcgatcgccgccggctgggccctgccggaagccattgcgcgctaccggccgctgtga

SEQ ID NO: 30402 - DNA, 1521 bp, Pseudomonas aeruginosa
atgcgttacgcccatcccggtagcgaaggcgccatcgtttccttcaaggcccgctacggcaactacatcggcggcgagttcgtgcctccggtcaagggccagtacttcaccaacacctcgccggtgaacggccagccgatcgccgagttcccccgttccaccgccgaggacatcgacaaggccctcgacgccgcccacgccgccgccgacgcctggggccgcacctcggtgcaggagcgctcgaacatcctgctgaagatcgccgaccgcatcgagcagaacctggaactgctcgccgtcaccgagacctgggacaacggcaaggccgtgcgcgagaccctcaacgccgacatccccctggccgccgaccacttccgctacttcgctggctgcattcgcgcccaggaaggctccgccgccgagatcaacgacagcaccgtggcctaccacatccatgagccgctgggcgtggtcgggcagatcatcccgtggaacttcccgctgctgatggccgcctggaagctggccccggcgctggccgccggcaactgcgtggtgctcaagccggccgagcagaccccgctgggcatctgcgtgctgctggaactcatcggcgacctgctgccgccgggcgtgctcaatgtcgtccagggcttcggcagggaggccggcgaggccctggccaccagcaagcgcatcgccaagatcgccttcaccggttccaccccggtcggctcgcacatcctcaagtgcgcggcggagaacatcattccctccaccgtcgagttgggcggcaagagcccgaacatctatttcgaagacatcatgcaggccgagccggcgttcatcgagaaggccgccgagggcctggtgctggccttcttcaaccagggcgaggtgtgcacctgcccgtcccgcgcgctggtccaggagtcgatctacccggcgttcatggaagaggtgctgaaaaaggtcagggcgatcaagcgcggcgacccgctggacaccgagaccatggtcggcgcccaggcttcccagcagcagtacgagaagatcctctcctacctcgacatcgcccagcaggaaggcgccgagctgctcgccggcggcagcgtcgagaagctcgaaggcaacctggccagcggctactacatccagccgaccctgctcaagggacacaacggcatgcgcgtgttccaggaggaaatcttcggcccggtggtcggcgtcaccaccttcaaggacgaagccgaggccctggccatcgccaacgacaccgagtacggcctcggcgccggcctctggacccgcgacatcaaccgcgcctaccgcatgggccgcgggatcaaggccggtcgcgtgtggaccaactgctaccacctgtacccggcccacgccgcgttcggcggctacaagaagtccggcgtcggtcgcgagacgcacaagatgatgctcgaccactaccagcagaccaagaacctgctggtgagctacgacatcaacccgctgggcttcttctag

SEQ ID NO: 30403 - DNA, 831 bp, Pseudomonas aeruginosa
atgtggtcgttccgcgcctggcggcgccggcgcctgctggcacgccacccggtggccgaagagctctggcagcgggtacgccggcacctgccgatcctcgacggcctggacgccgacgaggaccgccgcctgcgcgagcgggccgtgctgtttctcgccgacaagcacctgaccgcactcgccggcgtcgatctcgacgacttcggccgcctgctgctggcggcgcaggcgcaactgccgctgttgcacctgccggagctgaactggtaccagggcttccacgaactggtgctgtatcccgacgatttcgtcagcccccagaaacaccgcgacgccagcggcgtagtccatgaattcgacgacgaacgcagcggcgagacgtccctgcaagggccggtggtcctggcctggcccggcgtcgtcggcgggggtggctgggatgcctacaacctggtgatccacgaactggcgcacaagctggacatgctcaacggcgacgccaacggcctgccgccgctgcacgccggcatgcgcatcggcgactgggcgagcgccatgcaggccgcctacgacgagatgaacgccctgctcgaccgcgaccccgacgcgcagaccgccatcgacccctatgcggcggaagatccggcggagttcttcgccgttaccagcgagtatttcttcaccgccccggatctcctccacgaggcctatccggcggtataccggcagctccagttgttctaccgccaggacccgctgcaacgcctgcgccgcctgcaggccgagcatccggactaccgcgaggcggcgggcgacacgactaacggctga

SEQ ID NO: 30404 - DNA, 690 bp, Pseudomonas aeruginosa
atgaagcaatacggagcagagttcttcggcaccttctggctggtattgggcggctgcggcagcgcagtactcgctgccggcgtaccggaactgggaatcggctacctcggcgtggccctggcgttcggcctcagcgtgctgaccatggcctatgccatcggcccgatctccggcgcccatctgaaccccgcggtatcggtaggcctgtgggtcggcgggcgcttcccggccagccaactgctgccctatgtcgtcgcccaggtcctcggtggcctcgccgccggcggcgtgctgtacctgatcgccagcggcaaggccggcttcgacctggccgccggcttcgcctccaatggctacggcgaacactcgccgggcggctactcgttgcaagccgcgctggtcagcgaagtggtacttaccggcatgttcctgctgatcatcctcggcgccacctccaagcgcgcgccgcagggcttcgcgccgatcgccatcggcctgaccctgaccctgatccacctgatcagcatcccggtcaccaacacctcggtgaacccggcgcgcagcaccgcggtcgccctgtacgtcggcgactgggcggtttcccagctgtggctgttctgggtcgcgccgattctcggtgcggtactcggcgccctggcctatcgcctgatcggcgacaagaacgactga

SEQ ID NO: 30405 - DNA, 888 bp, Pseudomonas aeruginosa
atgatcgcggcctaccaggcgcgctgccaggcgcgcgtcgatgccgccctggacgccctgttcgtcgctccccgcgaagaactgcaacgcctctacgaggccatgcgctacagcgtgatgaacggtggcaagcgggttcgcccgctgctcgcctacgccgcctgcgaggccctcggcggagcgccgcagcgcgccgacgccgcggcctgcgcggtggagctgatccatgcctactcgctggtccacgacgacctgccggcgatggacgacgacgacctgcgccgtggccagccgaccacccaccgggccttcgacgaagccaccgcgatcctcgccgccgacggcttgcaggcgctggccttcgaagtgctcgccgacacccggcgcaatccgcaggaacatgccgtctgtctggaaatgctcacccgcctggcgcgcgccgcaggctccgccggcatggtcggcggccaggcgatcgacctcggctcggtcggcgtggccctcgaccaggcggccctggaagtcatgcaccggcacaagaccggcgcgctgatcgaagccagcgtgcgcctcggcgccctcgccagcggtcgcgccgagcccgcctcgctggccgccctggagcgctacgccgaagcgatcggcctggccttccaggtgcaggacgacatcctcgacgtggaaagcgacaccgccaccctcggcaagacccagggcaaggaccaggcgcacaacaagccgacctatcccgccctgctcggcctggaggccgccaaaggctatgccctggagctgcgcgacctggccctggccgccctcgacggttttccgccgagcgccgacccgctgcgccaactggcccgctacatcgtcgagcgacgcaactga

SEQ ID NO: 30406 - DNA, 798 bp, Pseudomonas aeruginosa
atgcgctcgttctggctgctcgcctgcctgctcctcagcctttccgccggggcggcgcagcgggtggtcagcctggcgccttcgctgaccgacagcgtcctcgaactcggcgcagcgcgccgcctggtcggcgtgctggatggcggcgagcgtccggcggcgattggcgacctgccttccgtcggccgctacggccaggtcaatctcgaacgcctgctggaactgcagcccgacttgatcctggtctggcccggcagcgtgcccgaggcgcagttgcagcgcctgcgggacttcggcatcgccctcttcatcgccgaaccgcacagcctcgacgaactggctctgcaactggctgcgctgggcgaggcattgggcgaggccgaggccggccagcggttgtcggccaggttccgcgaaggcatgcggcgcctggccgagcgctaccggcgggacaagccgctgaaagtgttctaccaggtctgggaccggccgctgtacaccattggcggacgccaggtgatcagcgatgcgctgcgcgtctgcggcgccgagaacctattcggcgacctgccgcagccggcgccgcaggtcagcgtcgaggcggttctggcgcgcgatccggcggtcatcgtcgccggcagtcacgcccagctcgaactctggcggcaatggccggcgctggcggcgacgcggcgcggacagctgtaccggatcgaagacaagaacctcgagcggccgagcttcgccatgctggcggcgaccgagaaactctgccgctcgctcgccggggcgcgctga

SEQ ID NO: 30407 - DNA, 969 bp, Pseudomonas aeruginosa
atgggtgagttcgagctgatccgccgcttcttcgccgcggccgcctgcgcggcgccggcggcggacgtggccctcggcatcggcgacgactgcgccctgctggcgccgccagccggcgaacaactggcggtctccaccgataccctggtggaaggcgtgcattttcccgccggttgcgaccctttccttcttgcccagcgcgccctggcggtctccgccagcgacctggcggcgatgggcgccgcgcccctggccttcaccctggccctgaccttgccgcaggccgacgccgagtggttgcagggcttcgcccgcggcctcgacgccatggcccggcagtgcggcctggccctggtcggcggcgacaccacgcgcggcccgctgagcatgaccctgaccgtattcggcagggtgccggccggccaggcgctgacccgcgccggtgcgcgcccgggcgacctgctctgcgtcgggggcccgctcggcgaggctggagcggcgctggaactggtgctggagcgaagatcggcgcccgccgaggtggccgaaccgctgctggcgcgctactggacgccggccccgcaattcggtctgggcctcgccctgcgcggcaaggccagcgccgccctggacatctccgacgggctgctcgccgactgcgggcatatcgcccgcgcttccggcgttgccctgttggtcgaatgccagcgcttgcaggcaagcgccgcgttgagcggcctgctcgccggcgaggaagccttgcgccagcaactggccgccggcgacgactacgtgctggttttcaccctgccgcctgagtaccttggcgagattcgcgccgcgtggccggccatggccgtcatcggccgggtcgaggcgggacagggggtgcacctgctcgacgccgacggaaaggaactcataccggccgcggccggttaccaacatttcggaacccaacgtgactga

SEQ ID NO: 30408 - DNA, 480 bp, Pseudomonas aeruginosa
gtgagcaatcaagacagcggcaacccggcagccaagccgccgaaaggcaagaccgccgctcgccgcaaggcccgcagcctggccgtccaggccctgtactcctggcagatcgccggccagcccctgcacgagatcgaggcgcagttccgcaccgacaacgacttctccgaggtcgacggcgcctacttccacgagatcctgcacggcgtgccgcggcagaagagcgaactggactccaccttcgagccctgcctggaccgcccgctggccgagatcgacccggtcgagctggccatcctgcggctgtccacctacgagctgcgcaaccgcatcgacgtgccctacaaggtagtgatcaacgagggcatcgagctggccaagaccttcggcgccaccgacggccacaagttcgtcaacggcgtgctcgacaagctggcgccgcgcctgcgcgccgccgagctgcgcggcggcaagcgctga

SEQ ID NO: 30409 - DNA, 477 bp, Pseudomonas aeruginosa
atgaccctgaagaccatcgaaggtaccttcattgcccccaaaggccgctacgccctggtggtcggccgcttcaacagcttcgtcgtggaaagcctggtcagcggcgccgtcgacgccctggtccgccacggcgtggctgaaagcgagatcaccatcatccgcgccccgggtgccttcgagatcccgctggtgacccagaaggtcgcccagcaaggcggcttcgacgccatcatcgccctcggcgcggtgatccgtggcggcaccccgcacttcgaatacgtggctggcgagtgcaccaagggcctggcccaggtgtccctgcagttcggcatcccggtcgccttcggcgtcctcaccgtcgactccatcgagcaggccatcgagcgctccggcaccaaggccggcaacaagggcgccgaagccgcgctgtcggccctggaaatggtcagcctgctggcgcagttggaggccaagtga

SEQ ID NO: 30410 - DNA, 1098 bp, Pseudomonas aeruginosa
atggcactcaacacgatcgacgaactgatcgaagacatccgccaaggcaagatggtcatcctgatggatgacgaggaccgcgagaacgaaggcgacctgatcatggccgccgaatgcgtccgcaccgaagacatcaacttcatggtcaagcatgcccgcggcctggtctgcatgccgatgacccgcgagcgttgcgagcgcctcggcctgccgctgatggtgcagcgcaacggctccggcttcggcaccaagttcactgtctccatcgaggccgccgagggcgtcaccaccggcatctccgccgcggaccgcgcccgcaccgtgcaggctgcggcggcgaagaacgccgtggccgccgacatcgtcagccccggccacatcttcccgctgatggcccagccgggcggtaccctggctcgcgccgggcacaccgaggcggcctgcgacctggcgcggatggccgggttcgagccgtccggggtgatctgcgaggtgatgaacgacgacggcagcatggctcgccggcccgaactggaggcgttcgccgccgagcacgggatcaagatcggcaccatcgccgacctgatccactaccggctgatccacgagcgcaccgtcgagcgcatcgccgagcagccgctcgacagcgaactgggccacttcaacctgatcacctaccgcgactcggtggagggcgacgtgcacctggcgctgaccctcggcaaggtctgcgcggaagagccgaccttggtccgcgtgcataacatggacccgctgcgcgacctgctgcaggtcaaccaaccgggccgctggagcctgcgcgcggcgatgaccaaggtcgccgaggcgggcagcggcgtggtgctgctgctcggtcaccagatcggcggcgacgacctgctcgcccatgtccgcgagatcgcttcggcgccggctccggcgcccaaggccaccaccacctacagcaccgtcggtgccggttcgcagatcctgcgcgacctcggcgtgcgcaagatgcgcctgctgagtgcgccgatgcgcttcaatgcgatatccggtttcgacctggaagttgtagaatacctgcccgccgaataa

SEQ ID NO: 30411 - DNA, 660 bp, Pseudomonas aeruginosa
atgttcaccggcataatcgagtcgatcggcagcgtccgcgcaatgacgcccaagggcggcgacctgcgggtctacatcgccaccggcaagctcgacctgggcgacgtcaagctcggcgacagcatcgcggtcaacggcgtctgcctgaccgcagtggaactgcccggcgatggcttctgggccgacgtcagccgcgagagcctggcgcgcaccgccttccagcacctgaaggtgggcagccgggtgaacctggaaaaggccctgacgccgaccacccgcctcggcggacacctggtgagcggccacgtcgacggcgtcggcgaggtgctcaagcgcgaggagaacgcccgcgccatccagttcaccgtgcgtgccccgcgcgaactggccaggtacatcgcgcacaagggctcgatcaccgtcgacggcaccagcctcacggtgaacgcggtgaacggcgcggagttcgagctgaccatcgtcccgcatacgctcagcgaaaccatcatggccgagtaccagcccggacgccgggtcaacctcgaggtcgacctgctggcccgttacctggagcgcctgctgcttggcgacaaggccgccgagcccagcgcctccggcatcagcgaagcgtttctcgccgagaacggttttctcaagtaa

SEQ ID NO: 30412 - DNA, 1122 bp, Pseudomonas aeruginosa
atgaacgccgccgacccgctgtacatggcccgcgccctggaactggcgcgccaggggctgtactccacccagccgaatccgcgcgtcggctgcgtgctggtcaaggacggccaggtggtcggcgagggctggcacgtccgcgccggcgagccgcacgccgaggtccatgccctgcgccaggccggcgagaatgcacgcggcgccaccgcctacgtgaccctcgagccctgcagccacttcggccgcaccccgccgtgcgccgatgcgctggtgggcgccggggtggcgcgggtggtcgcggcgatgcaggatcccaaccccgaggtcgccggtcgcggcctgctgcgtctgatgcaggccggcatcgcggtgcagagcggcgtcctcgaagccgaggcgcgggaactcaacatcggtttcatcaagcgcatggaacatggcctgccgttcgtccgggtcaagctggcgatgagcctggacgggcgcaccgccatggccagcggggaaagccagtggatcaccgggccctccgcgcgttcggcggtgcagcgcttgcgcgctcgctccagcgtggtgttgtccggcgccgatacgctgctggcggacgatgcgcggctcaacgtacgccccgacgaactgggcctgaacgccgagcttaccgcgctcgccgcggctcgccagccgttgcgggtgctggtcgacgggcgcctgcgggtgccgctggagtcggcgttctaccaggccggtccggcgctggtggcgacctgcgccgccgcctcggcgcgcgaacgcttccaggacgccggccacgaactgctggcgctgccctccgccgagggccacgtcgatttgcacaagctgctcctggaactggcggcgcgcggcgccaacgaagtgctggtggaggccggcccgcgtctggccggcgccttcgcccggctggggctggtggatgagtaccggctgttcgtcgcgccgaagttcctcggctccagcgcccgtcctttgctcgattggccgctggcgcggatggccgatgcggcgcagttgcggatcgacgacatccgcgcggtgggcgacgactggctggtcaccgcgcggccccatctgcgggacgcctga

SEQ ID NO: 30413 - DNA, 645 bp, Pseudomonas aeruginosa
atgtccctacatcgcattcgcgtaatggttgcggatgatcatcccgccatttcgctgggtatttcctacgaactgagtcagtgcggttctttggagatgctcggtcaagtttccaattctaccgagttgatcggtcggctcaacgaaggcgactgcgatgtcgttatcgtcgactatacgatgccgggcgggaaatatggcgatggactggcattgttgtcattgctgcggcgacgttatccgcatctgcaattggttgtctttaccatgctgaacaatccgggccttatccgggccattctcaagcagggtatcaattgcatcctcagcaagtccgactcgaccagtcacctgctggcggcggtgagcgcggcctattcgcgaaaccagtatttctcgccgtcgatcagggacatcttcgtcaaccaggtgctttcctcgcacaacgaacggctgacgccccgggaggcggaaatcgtccgtctgttcggctccggactgaccatcaccgaaatcgccgagcgctcgcatcgcagcgtgcagaccatcagtacgcagaaggtcagtgccatgaagaagctcggcatcaagcgcgatgccgacctcatcaggtatgcggccgagggctattgccggatgccctga

SEQ ID NO: 30414 - DNA, 3057 bp, Pseudomonas aeruginosa
atgaacaaatgctatgcactggtctggaacgtatcccagggctgctggaacgtcgtcagcgaaggcagtcgcaggcgcggcaagcccgccggcgccaaggcggcgatcgcctccgtcctggccctgctgggcgccacggccctggctccggcctatgcgctgccaagcgggggaacggtggtcggcgggagcgcgaacggggagatacacctgtcgggcggcaacagcctgtcggtcaaccagaaggtcgacaagctcatcgccaactgggactccttcagcgttgccgccggcgagcgggtgatcttcaaccagccgagcagtagctcgattgccctgaatcgggtgatcggcaccaaggccagcgatatccagggccggatcgatgccaacggccaggtcttcctggtcaaccccaacggcgtgctcttcggtcgcggcgcccaggtcaatgtcggcggcctggtggcttccacgctggacatcacggatgccgagttcaacggcaactcctccagataccgtttcacgggtccctctaccaacggtgtcctcaaccacgggggcgccatcaccgcggcggaaggcggcagcatcgccctgctcggcgcgcaggtcgacaaccgcgggacggtcctggcgcagatgggcggtgtcgggctcggcgcgggcagcgacctgacgctgaatttcgacggcaacaagctgctcgacatccgcgtcgacgccggggtcgccaatgcgctggcaagcaacggcggcctgctcaaggccgacggggggcgagtcctgatggcggccaggaccgccaatgcgctgctcaacacggtggtgaactcccagggtgccatcgaggcccgttcgctgcgcggcaagaacgggcggatcgtgctcgatggcggcccggacggcaaggtcatggtgggaggcgccttgtccgccaatgcgctgaacggaccggggcacggcgggacggtcgaggtccgggggcaggcggtggaagtggccctgggcacccaggtgaacacgctcgccagcaatggcctcaacggcacctggaagattgccgccgacaagatcgacgtgcgcccgtcggcggtgtcggatggcgtcaccgttcatgccgacaccctgtcgcggaacctggcgagcaccaatatcgaactggtttcgaccaagggcgacctggacctcgacggctcggtgaactgggcatcgggcaaccggctggggctgggctccgcggccgacctgacgctgaatggcaggctgaatgccagtggcgccaaggctgggctggagctgaaggccgaaggcgctatcgatatcaatgacaagatcgttctcggcggggctggcagcgcgctggccatggatgccggcgaaggccaccgggtgaacggcacggcgtcggtctccctggccggggccaacgcgacctacgtctccggtggctattactacacggtggtgcagaacctggcgcagttgcaggcgatcaacaagaacctggacggcctgtacgtgctcggcggcaatatcctgggcggcagctattactgcacggcgctgcaatccatcggcgggcccgccggcgtcttcagcggcaccctggacggtctcggcaacagcatcggcaatctctcgatcagcaacaccgggccgaatgtcgggctgttcgcccgctcctcgggcaccctgagcaacctgaagctgaacaacctgcgggtatccgataacacctacggctccggaccgtcttcgctcggcgccctggtcgggatcaacagcggccgcatcgccaacgtcagcgccagcggggtctcggtcgtcggcagccgactgcgctccaacgcactgggcggcctggtcggacgcaatatcagcgggcagatcgcgaacgcatccgtcagcggcggcgtcaccggttatgcggcgagcacggcggtcggcggtctggtgggggagaacttcaccactgcctgggggccggaggcggtcatcgagaacgcccacagcaacgtccatgtggctgcacagtccaccgagcgcaacagcctgggcggcgtcggcggcctggtcggactgaatgcgaagggcatgatcagggcgtccggcagccaggggaaggtcgagacctaccggcccggcctgaacgtcggcggcctggtcggctacaacatgttcggccacgtctccgatagtagcgccagcggccaggtggaggccggcggcgcggggaataccggcgggctggtcggcctgagttccggcggcgagatattccgctcgcaggcgagcgggtcggtgtacagcaagggcggcctggcgaccggcgggctgatcggcaaggcagaaggcaacggcatgctcggaaacctgaaagccagcggcagcgtcacggaccagggcggcgcggatctgggcgggctggtcggcaacaatagccagagcgccatcgagaccgccgaggcgacgggcaaggtcagcggcggcagcaacagtcgcgtcggcgggctgattggacacaacctcggcggttccgtcgcccatgcgatctcgcgcggcgacgtgagcggcgggttcaacagtctggtgggcgggctcgtcggccacaacggcggcgaactggtcaacgtggatgccagcggcagggtcagcgccgctgcgagtgcgtcggttggcggcctggtcggcagcaacgccggttcgatcctgtcggcgcgcagcagcagtaccgtcaacggcagcgggcgcagccgcatcggcggcctggtcggcgagaaccagatccagggacgtatcgtttcgtccatgtcggaaggcaccgtcagtggcgactactacgtctccatgggcgggctggccggcctcaacctgggatcgatcgagtactccggcgtcagcggcaagatcgacttcaagcctcagtcccattacggccagatctacggtgcgcaggtcggcgagaaccatggggtcctgggcggcaactacgtgatcggcgaggcggcgctcctgccgcctgccggtatcgactacggcaacatctggtaa

SEQ ID NO: 30415 - DNA, 2535 bp, Pseudomonas aeruginosa
gtggccgttgcgtcaccggccggcgggttggacgcaccgtcgcggcggatcgtcttcgacgcgcagatgctggccctggggccgggcggacgctcgatcgatacgtcgcgtttcgagcgcggcgacgtcatcgagccaggccgctatcgcctcgacctgctgctcaacagccgatggcgtggcgtcgaggaagtcgagctgcgccgccagccggggcgggaaagcgcggtcttctgctacgaccggggcctgctggagcgggcgggcatcgacctggagaagagcgcgcgtggccaggaccgttcctcggctcgcgatcctctgcccgaaggtttgcactgcgaccctctcgagcgctatgtgccgggggcccgggtcaagctcgatatcgccgagcagtcgatctatgtctcggtgcccagctattacctgagcctggattcttcgaagacctatgtcgatccggcgagctgggacagcggcatttccgccgccttgctcaactacaacagcaatctccacgtcagggaaaaccacggcaggagcgccaccagcggctatgccgggatgaacgccggcttcaatttcgggcgggcgcgcctgcgccacaacggcacggccacctggtcgcgccgcatgggcagccattaccagcgtagcgcaacctatgtgcagaccgacctgccggcctggcgtgcgcagttattgctgggagaaaactccaccagcagcgagttcttcgatgcggtgtccttccgtggagtgcagctatccagcgatgaccggatgctgccggattcgctgcgctactacgctccggtggtccgtgggaccgccagtaccaatgcgcgggtatcggtctaccagcgcggctacctcatctacgaaaccacggtggcacccggggcgttcgctctcgacgaactgcagaccgccagctatggcggggacctggaagtgcgggtgaccgaagccagcggggaagtccgcagtttcatcgtgccgttcgccaccaccgtacaactgctgcgccccgggaccacgcgctacagcctgacggccgggcggctcaacgatcccagcctggagcgtcggccgaacatgctgcagggcgtctaccagcgcggcctgggcaacgacgtcaccgcatacgcgggcggggccttcaccggcagctacatgtccgggttgatgggcgcggcgctgaacacgccggtgggcggattctccggtgacgtgacgctggcgcgtaccgaggttcccggcgacgaccgccttagcggctccagctaccgtctcgcctacagcaagaacctgccgaacaccggcaccaacttttcgctgctcgcctatcgttactccaccggtggctatctcggcctgcgcgacgcggccttcatgcaggaccgggtagagcgaggcgagccgctggagtcgttctcgcgcttgcgcaatcgtctcgacgccaacatcagccagcaactgggcaacggcggcaacctttacctgaacggctcctcgcagcgctactggagcggcggcgggcgggcggtcaacttctccgtcggctacagcaaccagtggcgcgacgtcagttactccatttccgcgcaacgcctgcgcagccagtacgaaggcttttccagcggtgacaggcgcggcgagaccagcacgctgttcagcctgaacctgtccattccgctcggcggcgctggacgcgggtcgccgaccctgagcagctacctgacccgcgacagcaacagcggaacccagctcaccagcggggtttccggcatgctgggcaagcgtggcgaggcctcctactcgctgtcggcctcccatgaccgcgacagccggcagacctcgaagagcgccagcctcgactatcgactgccgcaggtcgaactcggctccagcctctcgcagggaccgggctatcggcagttgtcggtcaaggccgcggggggcctggtcgcgcacagcggcgggatcaccgcggcacaaaccctgggcgagacgatcggcctggtccacgcgccaaatgccaggggcgcggctgccggctactcgggaagccggatcgaccgccacggctatgcggtgattcccaacctgctgccctaccagttgaacagcgtcgacctcgaccccaacggcatggccgacgagatcgaactgaggtccagttcgcgcaacgtggcgcccaccgccggagcggtggtgcgcctcgactatccgacgcgggtggcaaggcccttgctggtggatagccggatgcccagcggcgagcccctgccgttcgccgcggaagtgctcgatgcccacagcgggcagtcggtgggcgccgtcggccagggcagccgcctggtgctgcgggtcgagcaggatcgcggctcggttcgggtgcgctggggcaacgagccgcagcagcagtgcctggtcgactatgcgttgggcccgcgcgagacgacgcctcccgtcctgcaactggcatgtcgcccggcgtcggccgccgaccgggagcgcacgctgtga

SEQ ID NO: 30416 - DNA, 747 bp, Pseudomonas aeruginosa
atggcgccgctaatgcatcgttttcattctttcgtggcggcaagcgccgtggccatcgccctgtgcgtcggaacggctcacgccgggctgatcgcacagggcactcgcgtcgtctttccggccagcgagcgcgaggtcaccttgcgggtcagcaatacctccggcactcccgtgctggcgcaagcctggatcgacgatggccggcaggacgttccccccgaggaactgcaggttcccttcagtgtcacgccggccgtgacgcgagtggagcccaatggcggcgctgtattgcgcatcgcctacctgaaggccccgttgccgacggatcgcgaatcgctgttctggctgaatatcctggaagttccgcccagggacgaagacgaaaacaatgcattgcagttttcctttcgttcgcgcttcaaactcttctttcgacccagccagttgaagagtgtcgattcggctgccgggaaacttcaatggaagtttctggagtcagggggagcaggaaaaaagaccgtagtacaggtaaataatccgacgccttactacgtttcgttcgccagcgtcgaattgattgtcgatggccgtgtcatgtccgtgggaaagggaatggtcgcgccattctcgacgaaggagttcgactggcagggaaatccgaagaacatggaagccgcttccgtcagatacgaagtcatcaacgattacggtggccgcaatacccacgatagggcactcggcaaataa

SEQ ID NO: 30417 - DNA, 1059 bp, Pseudomonas aeruginosa
atgaaagcactgcgctggcacgccgcccgcgacctccgcctgagcgaactggaacgccaggcgccgcggcccggcgaagtcgaactggaagtcgcctactgcggcatctgcggcagcgacctgcacgaataccagagcggcccgcactcgattccccaggccgaggcgcacccgctgtccggttgccgcgcgccgctgaccctcggccatgagttctgcggcgtggtcgccgcgctcggccctggcgtggagggaccgcgcatcggcgaccgcgtcgcggtggagccggaataccgctgcggcgaatgccgctactgccgggaaggccgctacaacctctgcgagtcgatgggcttcatcggcctgatgggcgacggcggcttcgccgagcgcgcgcgggtgccggcctacatgctgcaccgcctgccggacgcggtgggcttccgccaggccgccgtgctcgaaccggccgccgtggccctgcacgcgctgcgccgcagcagcctggcgccgggccagcgctgcgcggtgttcgggcttggcccgatcggtctgctgctggtgatgctcgcccgcctgcgcggaatcgaggacatcgccgcggtcgacgtcagtcccgagcgcctcgccctagccggcgaattcggcgccagccgggcgctcgacgcccgtgacggcgacacggcggcgcgcctgcgcgaaggcggcgcgctcgattgcgccttcgaggccgccggcagccaggccagcctcgacgccgccctggccagcctgcgcaagggtggcgagctggtgctggtgagcctgatgggcgaggtcaggctggacgccttcgacctggtcaaccgcgaactgcgcctgctcggcagcgtcggctaccgcgacgcctacccggagctgatcgccctgctcgccgatggccgcctcgacctggcccgcgcagtgacccgcagcgtgcccctggagcaggccgtcgagcacggtttcgaggccctgctgcgcgacaaatcgcagctcaaggtgctggtcaatcccaacccggccctggccgacgcctga

SEQ ID NO: 30418 - DNA, 726 bp, Pseudomonas aeruginosa
atggttttccaacacgatatctacgccggccagcaggtactggtcactggcggcagctccggcatcggcgcggccatcgccatgcagttcgccgaactcggcgccgaagtcgtcgccctcggcctggacgccgacggcgtgcacgcaccgcgtcatccgcggattcgccgggaagaactggacatcaccgacagccagcgcctgcaacggctgttcgaagcgctgccgcgcctggatgtgctggtgaacaacgccggcatcagccgcgaccgcgaggaatacgacctggctaccttcgaacgggtgctgcgcctcaacctgagcgccgccatgctcgccagccaactggcccggccgctgctggcgcagcgcggcggcagcatcctcaacatcgcctcgatgtacagcaccttcggttccgccgaccgcccggcctacagcgccagcaagggcgccatcgtccagctcacccgttccctggcctgcgagtatgccgccgagcgcatccgggtcaacgccatcgcccccggctggatcgacacgccgctgggcgccgggctcaaggccgacgtcgaggccacccgccggatcatgcagcgcacgccgctggcgcgctggggcgaggcgcccgaggtggccagcgccgcggccttcctctgcggtcccggcgccagcttcgtcaccggcgccgtgctggcggtggacggcggctatctctgcgcctga

SEQ ID NO: 30419 - DNA, 1191 bp, Pseudomonas aeruginosa
atggacagcacctccgaaacccgcagcggcagctggctgagcgtgatcgccctggccctggccgccttcatcttcaacaccacggagttcgtcccggtcggcctgctcagcgacatcggccacagcttcgagatgcccacctcgcaggtcggcctgatgttgaccatctatgcctgggtggtgtcgctggcctcgttgccgatgatgctgctgacccgcaatatcgagcggcgcaagctgctggtcggggtattcctgctgttcatcgccagccacgtgctgtccgggctggcctggagcttccaggtgctgatgctcagccggatcggcattgccttcgcccacgcggtgttctgggccatcaccgcttcgctggcggtgcgcgtggcgccgccgggacagcaggccaaggcgctagggctgctggccaccggcaccaccctggcgatggtcctgggcatcccgctggggcgggtggttggcgaggccctgggctggcgtaccaccttcatggccatcgccggactctcggtgctgaccttgctctacctggcgcgctccctgccgctgctgccaagccagaactccggttccctgcgcagcctgccgatgctgttccgacgcccggcgctggtttgcctgtacgtgctgaccgtggtggtgatcagcgcccagttcaccgcctacagctacatcgagcccttcgccaagcaggtggcgcagatgagcggcgaggcgaccaccctgctgttgctgttgttcggcggcgccgggatcttcggttcgatcctcttcagccgctacagcgaggctttcccgcgaggcttcctgctggccgcgatcctcgccttgggcagcagcctggcgctgctgttgccgctgtccgcgcagccgacctggctgatggcgctcagcctgctctggggcatgtcgatcatgtgcttcggcctggcccagcagtcccgcgtcctgcgcctcgcctcggacgccaccgacgtggccatggcgctgttctccggcctgtacaacgtcggcatcggcgccggcgcgctgctcggcagcgtggtcagcgaacgcatgggcctggcctcgatcggcaacgtcggcgccgcgctggcgctggccggcctgctgctcgccctgttcgccgcactgcgctacgcggaggcgctgaaaagcacgtcgttgtga

SEQ ID NO: 30420 - DNA, 807 bp, Pseudomonas aeruginosa
atggacctgcccgtcaatcgcttcaagcaacgcctgcgcagcggcgaggcgcagatcggcctgtggctcggcctggccgatccctactgcgcggagctggccgccaacgccggcttcgactggctgctgctggacggcgagcacgcgcccaacgacctgcgcagcctgctcggccagttgcaggcgctggcgccctaccccggccagccggtgatccgcccggtgcagggcgacactgcgctgatcaagcaattgctcgacatcggcgcgcagaccctgctggtaccgatggtcgacagcgccgcccaggccgaagggctggtgcgcgccgtgcgctatccgccggcgggcgtacgcggggtcggcagtgcgctggcccgggcctcgcgctggaacagcgtggcggagtacctgaaccacgccgacgagcagatgtgcctgctggtccaggtggaaaacctggagggcctggccaacctcgacgcgatcgccgccgtcgagggcgtcgacggcgtgttcatcggtccggccgacctcagcgcagccatgggccatcgcggcaatccaggccatcccgaggtgcaggcggccatagaggacgccatccaccgcatccgcacggccggcaaggccgccggcatcctctccgccgacgagacactggcgcggcgctacctggagctgggctgcgcgttcgtcgcggtgggcgtggacaccagcctgctgatgcgttcgctgcgcgagctggcggggcgcttcaagggcggcgcgccggcgccgtccgccagttcctcggtctacggctga

SEQ ID NO: 30421 - DNA, 1209 bp, Pseudomonas aeruginosa
gtgcctgcgagtgcatcgaggattcaggtcggaagcggcgaacgacgcctgttgctgctgttgtcggcgctggtggcgttcggcccgctgtcgatcgacatgtacctgccgagcctgccggcgatcgccgccgatctcggcgccagcgatgcccaggtgcagcggagcatcagcggcttcctggtcggcttctgcgtcggcatgctgttctacggccccttgtccgaccgtttcggccggcgcccggtgctgctggccggtatcgccttgtacctgttcagcagcctggcctgcgcgctggccgacagcgcggggcaactggtcctgctgagggtgctccaggccctcggcggcggcgccgcgtcggtgctggcgcgggccatggtgcgcgacctctatccgttgggcgaggccgcccggatgctggcattgatgcacatggtgaccatgctggcaccgctggccgcgccgctgctcggcggctacctgatgctctgggccggctggcgcgcgttgttcgtggtcctggcgctgttcgccgggctctgcctgctggcggtctggcgggtcgccgaaagccacccgccggagcgccgcggcggcagcctggcccaggcctttctcgcctatgggcggctgctcggcgaccgtcgcgcgctgggctacgtgctgtgcatggggctggcgttcgccgggatgttcgcctacatcagcgccgcgcccttcgtgttcatcgagcatttcggcgtgcgcgcggagcgcttcggctggttcttcggcctgaacatcctcggcgtgatgctcgccacctggtgcagcgcgcgcctggtgcgccgccacggtccgcggccgctgctgcgggccggcagcctgctggcctgcgtgtccgggctgttcctcctcggctatgcggcgctcggcgagcggggcgggttgtgggcgctggtgcccgggctgctgtgcttcgtcagcgtcaccggcctgctcggcgccaactgcatcgccagcctgctggcgttgtatcccggacaggccggggcggcttcggcggtggcggtgtccgggcagttcggcctcggctgcctggccagcctggcggtcggctggctggcgctgcccggcgtgctgccgatggcgctggtgatggccgtctgcggcgtcggcagcctgctcgcgctgggcttggccctgcacggcggaaaccgttga

SEQ ID NO: 30422 - DNA, 1239 bp, Pseudomonas aeruginosa
gtgtccgtcccgacccatcagcaagacctgatcgccctgctcgaagagcgtggcttcgtccaccagtgcaccgaccgcgacggcctcgccgcgcacctggccgccggtccggcaaccgcctacctgggcttcgacgccaccgccgacagcctgcacgtcggccacctacagggcctgatgctgatgcgctggctacagaaggccgggcaccgcccgttgctgctgatcggtggcgcgaccacccggatcggcgatccgagcttccgcgattcgagccggccgatcctcaccgaggcgcagatccaggccaacatcgacggcatcgcccgggttttctcgcgctacgtcgaactgcacgacgacagcctggtgaacaacgccgaatggctggacggcgtcggctacctggagttcctcgaccgggtcggccggcacttctcgatcaaccgcctgctgaccttcgacgccatcaggcagcgcctggaccgcgagcattcgctgtcgttcctcgagttcggctacaccctgctgcaggcctacgatttcgtcgaactgtcgcgccggcgcggctgcaccctgcaactcggcggcgccgaccagtgggcgaacatcatcaacggcgtggagctgtcgcgacgccagggcggcgcccagctgttcggcctgaccatgccgctgctggccaccagtgacgggcgcaagatgggcaagtcggcgcagggtgcggtatggctcaacgccgagcgcctggcgccgttcgacttctggcagttctggcgcaactgcgatgatcgcgacgtcggtcgcttcctcgccctgttcagcgaactgccgatggatgaggtgcgccgcctgggcgccttgcagggcgccgagctgaacgaagcgaaggtggtcctggccaatgccgccaccgccctggcgcacggcgagcacgccgcgcgatccgccgccgatgccgcgcgcggggtgttcgccgacggtacgcgggacagcggcctgccggtgatgaagctatcccgcgcgcgcctggcgcagggactgtcgctgaccgacctgctgctggaacacgcgatccagccctcccgcagcgcggtccgccgcctcgccgccggcggcggcctgcgcctggacggcacgccggtcagcgatccggacacgccgctggcgggcgaggtcgacgggctgcgcttgagcctgggcaagaagcagcatttgcacctgcgactcgaggattga

SEQ ID NO: 30423 - DNA, 1092 bp, Pseudomonas aeruginosa
atgaacagttccccgcaagccaacgcggcgatgcgcgccgccgtctggcacggccgccacgatatccgcgtggaagacgtgccgctcccggccgagccgccgcccggctgggtgcagatccgcgtgcactggtgcggcatctgcggctccgacctgcacgaatacctggccggcccggtattcatccccgtggaggcgccgcacccgctcaccggcctcaaggatcaatgcatcctcggccacgagttcagcggcgaaatcgtccgcctcggcaacggcgtgaccggcttcgccgtcggccaggcggtcgccgcagacgcctgccagcattgcggcacctgctactactgccggcatgggctgtacaacatctgcgagaacctggccttcaccgggctgatgaacaacggcgccttcgccgaatacgtcaacgtaccggccaacctgctctacgccctgccggccggatttcccagcgaggccggcgcgctgatcgagccgctggcggtgggcatgcacgcggtgaagaaggccggcagcctgctcgggcagaacgtggtggtggtcggcgccggcaccatcggcctgagcaccatcatgtgcgcgcgcgccgccggcgcggcacaggtgatcgccctggagatgtcctcggcgcgcaaggccaaggccctggaggtcggcgccagccaggtgctcgacccctcgcggtgcgacgccctaggcgaaatccgcgccctcaccggcgggcttggcgccgacgtcagcttcgaatgcatcggcaacaagcacaccgccaagctggccatcgatgccatccgcaaggccggcaaatgcgtgcttgtgggaatcttcgaggagcccagtgaattcaatttcttcgagctggtttccaccgagaagcagttgctcggggccctcgcctacaacggcgagttcgccgacgtgatcgccttcatagccgacggccgcctcgacatcgcaccgctggtgaccggtcgcatcggcctggaagaaatcgtcgagcgcggtttcgaagagttggtgaacaacaaggagcacaacgtgaagatcatcgtctcgccgggcggctga

SEQ ID NO: 30424 - DNA, 906 bp, Pseudomonas aeruginosa
atgccgacccgccgccgctccgccctgccattactcgccctcgccctgagcctgttcgccatcctcgccgcggccggggagccgaagccggcgcggatcgtctccaccaccccgagcgtcaccggcatcctgctggcgatggacgcgccgctggtggccagcgccgccaccacgccaagtcgcctgaccgacgccaagggcttcttctcgcaatgggcgaaggtcgccgaccagcgtggcgtcgaggtgctctaccgcaacctgcgcttcgacatcgaagcggtgatcgcccaggatccggacctgctggtcgcctccgccaccggcgccgacagcgccgcgccataccgtgcggagctggaggcgcagggcgtaccgacgctggtggtcgactactcgaaacacagctggcaggaactggctaccgagctgggccggcacaccggcctggaacgccaggcgcaggccgccatccagcgcttcgacgcctacaccgccgaagtcgccgcggccatcgcgccgccgcagggcccggtcagtgtggtcggctacaacatcgccggcagctattccatcggccgccaggccagcccccaggcacgcctgctcgaagccctcggcttccaggtggcggaactaccggaggcgctggcgggcaaggtgacgcgcgcctcggacttccagttcatctcgcgggaaaacctgcccgccgccatcgccggcgacagcgtgttcctgctcggcgccagcgacgacgacgtgcaggcgttcctcgccgacccggtgctggccaacctgtcggcggtgcgcgaaaagcgcgtgtacgctctgggccccagttccttccgcatcgactactactcggggcggcagatgatcgacaacgtcgcccgccatttccgctga

SEQ ID NO: 30425 - DNA, 819 bp, Pseudomonas aeruginosa
atgtcgtccaccatccaccccctcccgtccttcggtctcggcaccttccgccttactggccaggtcgtcgtcgactcggtgcgcagcgccctcgaactgggctatcgcgccatcgataccgcgcagatctacggcaacgaggcggatatcggccgcgcgatcgccgagagcggcgtaccgcgttccgagctgttcctcaccaccaaggtctgggtcgacaactacgcccgcgaaaagctgctcgccagcctgcgcgagagtctggagaaactgcgcaccgaccggttggacctggtcctgatccattggccggcacccggcaacggcgtcgagctgggggagtacatggcggcgctggcggaagccaagtccctgggcctgacccggcggatcggcgtctccaacttcaacatcgaactgacccgccaggccatcgccgcggtcggtgcgggcgagatatccaccaaccagatcgaactcagcccttacttgcagaaccgcgcgctgaccgcctacctcgaggagcagggcatcgcggtcacctcgtacatgaccctggcctacggcaaggtgctgaaggacccgacgctggccgggatagccgccaggcaccgggccacggtcgcccaggtggcgctggcctgggcgatgcaactgggctacgcggtgattccgtcctcgacccgccgcgagaacctcgccagcaacctgctggcgcgcgacctgcgcctggacgccgaggacatggcgcgcatcgccggcctcgagcgtaacggccgcgaggtcagtccgcagggcctggcgccggcctgggactga

SEQ ID NO: 30426 - DNA, 1644 bp, Pseudomonas aeruginosa
atggccaaggcagccgatgtggttgtgcaatgcctggaaaacgagggcgtgcagtacgtcttcggaattcccggcgaggagaatctcgacctgctggagtccctgcgcaagtcgcagatccggctggtgctcacccgccacgaacaatcggccggcttcatggccgccacctatgggcgcctcaccggcaagaccggggtcagcctgtcgaccctcggcccaggcgccaccaacctggtgaccgccggcgcctacgcctacctgggcggcatgccgatgctgatgatcaccgggcagaagccgatcaagaagtccaagcagggccgcttccagatcctcgacgtggtcggcatgatgcagccgctgaccaagtacacccaccaactggcctccgccgacaacattccctcgcgggtccgcgaggcgttccgcctggccgaggaagagaagcccggcgcggtgcacctggagctgccggaggacatcgccgccgagcagaccgacagcctgcccatcccgccgagcctgagccgccggccgctggcggaatacaaggcgatctgcgccgcggtggagaagctgcgcgccgcgcgcagcccgatcctggtgatcggcgccggggccaaccgcaagatgaccgccaaggtcctcaagcaactgatcgacaagaccggcattcccttcgtcaccacccagatgggcaagggcgtggtcgacgagcgtcacccgcgcttcctcggcaacgccgcgctgtccgccggcgacttcgtgcatcgcgcggtggaggcggccgacctgatcgtcaacgtcggccacgacgtgatcgagaagccgccgttcttcatggttcgcggcggtaccgaggtgatccacgtgaacttccgttccgccgaggtggacccggtgtatttcccgcagatcgaagtggtgggcgacatcgccaacgccatctggcagatcggcgaggcgctggacgataccgcgcactgggacttcacccgcctgctggcgatccgcgaggccaacgaggcgcaggtcgccgaaggcgccgacgacccgcgcttcccgctctacccgcagcgcctggtggccgacgtgcgccgggcgttgccgtcgcagggaatcgtcgccctggacaacggcatgtacaagatctggttcgcccgcaactacaaggcacacatgcccaacaccgtgctgctggacaacgccctcgccaccatgggcgccggcctgccctcggcgatggccgcgcacctggtctacccggaccggccgatcgtcgcggtgtgcggcgatggcggcttcatgatgaacagccaggaactggaaaccgcggtgcggctgaagatgaacctgacggtgatcatcctgcgcgacaacggctacgggatgatccgctggaagcaatcgaacatgggcttcgccgacttcgggctggactacggcaacccggacttcgtgcactacgccgaggcctacggcgcccacggccaccgggtcgacagcgccgagggcttcctgccgctgctggagcgctgcctgggcacgcccggggtgcatgtgatcgattgcccggtggattactcggagaacgaccgcatcctcaacgtcgagttgcgcgaacgcgccctggcggtctga

SEQ ID NO: 30427 - DNA, 1041 bp, Pseudomonas aeruginosa
atgggacaggacaagttgaaggtcgccgttctcttcggcggcagcagtgaggaacgggacgtctccatcgccagcggcgcgcaggtgatccaggctttgcgcagcgccggccaccaggtgctggcggtggataccgccagcggcctgctcggcgcggaggaagagcgccgcctgctggcgagcaaggtcaaggaggtcccgccggactccgactcgctggcgatcatccgcagcggcaagcagagcctgctgagcgccggcgaactggctggggtcgacgtgttcttcctcgccctgcacggcggcaccggcgaggacggcaccctgcaggcgctgctggatgccggtggtttcgcctataccggcagcggccacctggccagcgccatggcgatggacaaggacgtggccaagcgcctgttcctcgccgccggggtggagaccgccagttggctgatggcgccggcctcggaagaggaggtgcgcgagcaactgggcttccccctggtggtcaagccgaacagccagggctccaccgtggggctgtccatcgtgcattcccaggccgaattgcagccggccatcgagctggccgggcgctatggcgacgaggtgatgctggagcgcttcgtcgccggccgcgaggtcaccgtcggggtgctcgacgaccaggcgctgccggtgggcgagattctcctcggcggccaggaggtcttcgactacgagcacaagtaccaggccggcgcggtgcgcgaggtgtttcccgccgacctgccgccggcgatcgccgccgaggcccagcgtctggcgctgaaggtacaccgggcgctgaagctgagcggctacagccgcaccgacttccgcctcgacgaacagggccggctctggtgcctggaggtcaataccctgccgggcatgaccgccaccagcctgctgccgcaggccgcggcggcggccgggatcggtttcgccgaactctgcgagcggatctgccggctcggcatcgagcgctgcaagggcgcgcgcaaggcgcgttcctga

SEQ ID NO: 30428 - DNA, 1056 bp, Pseudomonas aeruginosa
atgactgaccgcttcacgcgcctgctcggtatccagcagccgatcatccaggcacccatgctcggcgtctccacgccggcgctggccgccgccgtatccaacgccggcgggctcggttcgatcgccatcaccggtagcgccgccgagaagggccgggcgctgatccgcgaggtgcgcgggctgaccgacaagccgttcaacgtcaatctgttctgccaccgcccgggtcaggccgacccggcccgcgagcgcgcctggctggactacctgaagccgctgttcgccgagttcggcgccgagccgccggtgcggctgaagaacatctacctgagtttcctcgaagacccgaccctgctgccgatgctgctggaagagcggccggcggcggtcagcttccatttcggcgcgccgccccgcgaccaggttcgcgcgttgcaggcggtgggcatccgcgtactggtctgtgccaccacgccggaggaagcagccctggtggaggccgccggcgccgatgcggtggtcgcccagggcatcgaggccggtggccatcgcggggtgttcgagccggagcgcggcgacgccgccatcggcaccctggcgctggtccgcctgctggcggcgcgcggttcgctaccggtggtggctgccggcgggatcatggacggacggggcatccgcgccgccctggagctgggcgcgagcgccgtgcagatgggcaccgccttcgtcctctgtccggagtcctcggccaacgccgcctaccgcgaggcgctgaaggggccgcgcgcggcgcgcaccgcgctgaccgtgaccatgtccgggcgcagcgcccgcggcctgcccaaccggatgttcttcgatgccgccgcgcctggagtgccgcccttgccggactatccgttcgtctacgacgcgaccaaagcgttgcagaccgccgctctggctcgcggcaaccatgatttcgccgcccagtgggccggccagggcgcggcgctggcgcgggagctgccggccgccgaactgctgcgcacgctggtcgaggaactgcgcggctga

SEQ ID NO: 30429 - DNA, 624 bp, Pseudomonas aeruginosa; identical to SEQ ID NO: 30153

SEQ ID NO: 30430 - DNA, 1644 bp, Pseudomonas aeruginosa
atgacttcctcgcccgtcaccccatcggccgtcgacgacgcccccgactggcccgccgccttcgtccgccgctatctcgacgccggccactggcaggaccagagcttcgccgaagccctggccaccagcgccgcgcgccatccgcggcggatcgcgctctgcgacgacgaccagcggctcagctatgccgacctgctccagcgctgccgccgcctggcagccggactgcgccaggccggcctcgcacatggcgacacggtagtgctgcacctgcccaacggcatcgccttcgtcgagacctgcttcgccctgttccagctcggcgtacgcccggtgctcgccctccccgcccatcgccagcatgagatcagcggtttctgtcgcttcgccgaggccaaggcctacatcggcgccgaacggatcgacggcttcgacccacggccgatggcccgtgagctgctcgccagcggcgcctgccggatggcgctgatccacggcgaagccgaggcgccgctgcaagcgctggcaccgctgtaccaggccgacgcgctggaagactgcgccgcccgcgccgaggatatcgcctgcttccagttgtccggcggcaccaccggcacgccgaagctgattccccggcgtcatcgcgagtatctctacaacgtccgcgccagcgccgaggtctgcggcttcgacgagcacacggtgtacctcaccggcttgccgatggcgcacaacttcactctctgctgccccggagtgatcggcacgctgctggccagcggccgcgtggtggtcagccagcgcgccgatcccgagcattgcttcgccctgatcgcccgtgaacgggtcacccacaccgccctggtaccgccgctggcgatgctctggctggatgcccaggaaagccgccgcgccgatctatccagcctgcgtctgctccaggtcggcggctccaggctcggcagcagtgccgcgcaacgcgtcgaaccggtgctcggctgccagttgcaacaggtgctgggaatggccgaggggctgatctgctacacccgcctggacgatccgcccgaacgcgtgctgcatacccagggccggccgctgtcgccggacgacgaagtgcgggtggtcgacgccgagggccgcgaggtcggccccggcgaggtgggcgaactgaccgtgcgcggtccctacaccatccgcggctactaccgcctgcctgaacacaacgccaaggccttcagcgcggacggcttctaccgcaccggcgaccgggtcagccgcgacaaggacggctacctggtggtggagggccgcgacaaggaccagatcaaccgcggcggcgagaagatcgccgcggaagaggtggagaacctgctgatagcccatccgcaggtgcacgacgccaccgtcgtggcgatgcccgacagcctgctcggcgagcgcacctgcgccttcgtcatcccgcgccagccggcgccctcggcgctgaagctgaagcaatacctgcacgcctgcgggctggccgcgttcaaggtgccggaccgcatcgagctggtcccggccttcccccaaaccggcatcggcaagatcagcaagaaggacctgcgcgagcgcctgcgccgcgagctggaggcccgcgcatga

SEQ ID NO: 30431 - DNA, 498 bp, Pseudomonas aeruginosa
atggcccgtggggttaacaaagtcattctggttggtaacgtcggtggtgacccggaaacccgctacatgcccaacggcaatgcggtgaccaacatcaccctcgccaccagcgagagctggaaggacaagcagaccggccagcaacaggagcgcaccgaatggcaccgcgtggtgttcttcggccgcctggcggagatcgccggcgagtacctgcgcaagggttcccaggtctacgtcgaaggcagcctgcgcacccgcaagtggcagggccaggacggtcaggatcgctacaccaccgagatcgtggtcgacatcaacggcaacatgcagttgctcggcggccgcccctccggcgacgattcgcagcgcgccccgcgcgagcccatgcagcgcccgcagcaggccccgcagcagcagtcgcgtccggccccgcagcagcaaccggcgccgcaaccggcccaggactacgacagcttcgacgacgacattccgttctaa

SEQ ID NO: 30432 - DNA, 2838 bp, Pseudomonas aeruginosa
gtggataagatcctgattcgtggggcgcgtacccacaacctgaagaacgtcgacctcacactgccacgcgacaaactgatcgtgatcaccggtctttccggttccggcaagtcttccctggctttcgacacgctctatgcggaaggccagcggcgctacgtggaatccctctcggcctacgcccggcagttcctgtcgatgatggagaagccggacgtggacaccatcgaagggctgtcgccggcgatttccatcgaacagaagtccacttcccacaacccacgctccaccgtgggtacgatcaccgagatctacgactacctgcgcctgctttatgcccgcgtcggtaccccgcgctgcccggaccacgacatcccgctggaggcgcagaccgtcagccagatggtcgaccaggtcctggccctgccggaaggcagcaagctgatgctgctggcgccggtgatccgcgagcgcaagggcgagcacctggcggtgttcgacgagatgcgcgcgcagggcttcgtccgcgcccgggtcgacggcaagctctacgaactcgacgaagtgccgaaactggataagcagaagaagcacagcatcgatgtggtggtggaccgcttcaaggttcgcgcggacctccagcaacgcctggccgagtcgttcgagaccgccctgtccctggccgacggtatcgccctggtagcaccgatggacgaggacgaggatgtcgaggagatcatcttctcggcgcgcttcgcctgcccggtctgcggccactctatcagcgagctggaacccaagctgttctccttcaacaacccggccggcgcctgtccgacctgcgacggcctcggcgtgaagcaattcttcgacgcgcgccgggtggtcaacggcgagttgaccctggccgagggcgcgatccgcggctgggaccggcgcaacgtctattacttccagatgctcggttcgctggcccagcattacggcttcagcctggaagaacccttcgacgaactcggcgccgagcaccagaaggtggtgctctacggctccggccgggaaaacgtcgacttccgctatctcaacgaccgcggcgacatcgtcaagcgttcgcatcccttcgaaggcatcctgccgaacctggagcggcgctaccgcgagaccgagtcggccacggtccgcgaggagctggccaagttcctcagcacccagccctgcccggattgccacggtacccgcctgcgccgcgaggcgcggcatgtgtgggtcggcgaccggacgctgccggcgatcaccgcgatgccggtcggcgaagcctgcgagtatgccgccggactcagcctgaccggccgccgtggcgagatcgcggcgaagatcctcaaggaaatccgcgaccgcctgcaattcctggtcaacgtcggcctcgactacctgaccctcgaccgcagcgccgacaccctgtccggcggcgaagcccagcgcatccgcctggccagccagatcggcgccggcctggtgggagtgatgtacatcctcgacgaaccctcgatcggcctgcaccaacgcgacaacgagcgcctgctcggcaccctcacccacctgcgcaacctcggcaacacggtgatcgtggtcgagcacgacgaggacgcgatccgactcgccgactacgtcgtcgacatcggtccgggcgccggcgtgcacggcggccaggtagtggcggaaggtacgcccgaccaggtgatgaaccaccccgactcgctgaccggcaagtacctttccgggcgcaagaaaatcgcggttccggccaagcgcaccccgcgcgacaagaagaagctgctgaagctgaaaggcgcccggggcaacaacctgcagaacgtcaacctggaaatcccggtcggcctgttcacctgcatcaccggggtctcgggctccggcaagtcgacgctgatcaacaacaccctgttcccgatcaccgccaccgcgctgaacggcgcgactaccctggaagtggcgccgtatgactcgttcgacggcctgcagcacctggacaaggtggtcgacatcgaccagagcccgatcggtcgtaccccgcgctccaacccggcgacctataccggcctgttcacgccgatccgcgaactgttctccggcgtgccggaggcccgctcgcgcggctacggtcccggccgcttctcgttcaacgtcaagggcggccgttgcgaggcctgccagggcgacggcgtgatcaaggtggagatgcacttcctgccggacatctacgttccctgcgatgtctgcaagggcaagcgctacaaccgcgagaccctggagatccgctacaagggcaagagcatccacgaggtgctggagatgaccatcgaggaagcccgcgagttcttcgacgccgtccccgccctggcgcgcaagctgcagacgctgatggacgtcggcctgtcctacatcaagctgggccagagcgcgaccaccctctcgggcggcgaggcgcaacgggtcaagctgtcccgcgagctgtccaagcgcgataccggcaagaccctgtacatcctcgacgaaccgaccaccggcctgcatttcgccgacatccagcaactgctcgacgtgctccaccgcctgcgcgaccacggcaacaccgtggtggtgatcgagcacaacctggacgtgatcaagaccgccgactggctggtcgacctcggccccgagggcggctccaagggtggccagatcatcgccaacggtacgccggagcaggtggccgagatgccccagtcgcacaccggccacttcctcaagccgttgctggaacgcgatcgcgcctga

SEQ ID NO: 30433 - DNA, 1002 bp, Pseudomonas aeruginosa
atgcagagttcggtaaatgagttcctgaccccccgccacatcgatgtgcaggtggtcagtcaaacccgcgccaagatcacgctcgagcctctcgagcgtggttttggtcacaccctgggcaacgcgctgcgtcgcatcctgttgtcctccatgcctggctgcgcagtggtcgaggccgagatcgacggcgtactccacgagtactcggcgatcgaaggtgtgcaggaagatgtaatcgagatcctgctgaacctgaaaggtctggccatcaagctgcacggtcgtgatgaagtgacgctgaccctggctaagaagggctcgggtgttgtgactgctgccgatattcagctggatcacgatgttgagatcatcaacggtgaccacgttatcgccaacctggcagacaacggcgcgctgaacatgaagctgaaggtagctcgtggccgtggctacgagcctgccgacgcacgtcagagcgatgaagacgaaagccgcagcatcggccgtctgcagctcgacgcatcgttcagcccggtccgtcgtgtctcctacgtggtggaaaacgcccgtgtcgagcagcgcaccaacctggacaaactggtcctggacctggaaaccaacggcactctggatcccgaagaggctatccgtcgcgccgctaccatcctgcaacagcagctggcagcgttcgtggacctcaagggcgacagcgaacccgtcgttgaagagcaggaagacgagatcgatccgatcctcctgcgcccggtcgatgacctggaactgaccgtacgttcggccaactgcctgaaggcggaaaacatctactacatcggtgacctgatccagcgcaccgaagtggaactgttgaaaacgccgaacctgggcaagaagtccctgaccgaaatcaaggacgttctggcttcccgtggtctgtccctcggtatgcgcctcgataactggccgccggcaagtcttaagaaagacgacaaggccactgcctga

SEQ ID NO: 30434 - DNA, 621 bp, Pseudomonas aeruginosa
atggctcgttacattggtcccaagtgcaaactgtctcgccgtgaaggcaccgacctgttcctgaagagcggcgcccgcgccctcgactcgaagtgcaaggctgaaaacgttcctggccagcatggccagcgtcgtggccgtctgtccgactacggtctgcagctgcgtgaaaagcagaaagtacgtcgcatctacggcgtgctggagcgtcagttccgcggttactaccaggaagcttcccgtcgcaagggttctaccggtgagaacctgctgcaactgctcgagtgccgcctggacaacgtcgtataccgcatgggcttcggttccactcgttcggaatcccgccagctggtatcccacaaggccatcaccgtcaacggtcagaccgtcaacatcccttcctaccaagtgaaggccggtgacgtcgtagctgttcgcgaaaaatcgaagaaccagctgcgtatcgctcaggctctggaactctgtggccagcgcggtcgcgtcgagtgggtcgaagtcgacctcgacaagaaggctggtaccttcaagagtgctccggctcgcagcgacctgtccgctgatatcaacgaaaacctgattgtcgagctctactccaagtaa

SEQ ID NO: 30435 - DNA, 390 bp, Pseudomonas aeruginosa
atggcaaaacctgctgctcgtccccgtaagaaagtcaaaaagacagtggtcgatgggatcgcccacatccacgcgtctttcaacaacaccatcgtgaccatcaccgaccgtcagggcaacgcactgtcctgggcgacctccggtggttccggtttccgcggctcgcgtaagagcaccccgttcgctgcccaggtagcggccgagcgtgccggccaggctgccctggaatacggtctgaagaacctggacgtcaacgtcaagggcccgggcccgggccgcgagtccgccgttcgcgctctgaatgcttgcggctacaagatcgccagcatcaccgacgtaaccccgatcccgcataacggctgccgtccgccgaaaaagcgtcgcgtgtaa

SEQ ID NO: 30436 - DNA, 357 bp, Pseudomonas aeruginosa
atggcccgtattgcaggcgtcaacattccggataacaagcacactgttatctcgctgacctacatctatggtgttggtcgcactactgctcagagcatctgcgcagccaccggcgtaaacccggctgccaagatcaaggacctgagcgacgagcagatcgatcagctgcgtaacgaagtcgcgaagatcaccaccgaaggtgacctgcgtcgcgaaatcaacatgaacatcaagcgtctgatggacctcggttgctaccgcggtctgcgtcatcgtcgcggtctgccggttcgcggtcagcgtaccaagaccaacgcgcgtacccgcaagggcccgcgtaagccgatccgcaagtaa

SEQ ID NO: 30437 - DNA, 117 bp, Pseudomonas aeruginosa
atgaaagttcgtgcatcggtcaagaagctgtgccgtaactgcaaaatcatccgtcgcgatggcatcgtgcgggtgatctgcagcgcggaaccgcgtcacaagcagcgccaaggctga

SEQ ID NO: 30438 - DNA, 822 bp, Pseudomonas aeruginosa
atggcaatcgttaagtgcaaaccgacttccgctggtcgtcgctttgtcgtcaaggtggtgaatcaggagctgcacaaaggcgctccctacgcaccgctgctggaaaagaaatccaagtctggcggccgtaacaacaacggtcgtatcaccacccgtcatatcggtggtggtcacaagcagcactaccgtctggtcgacttccgtcgcaacaaggatggcatccctgccatcgttgagcgcgtcgaatacgatccgaaccgcactgcacacatcgctctgctgaagtatgcagacggcgagcgtcgctacatcatcgcccccaagggcgttgctgcaggtgaccagctgatctccggtatcggtgcgccgatcaaggcaggcaacagcatgcctctgcgcaacatcccggtgggtagcactgttcatggtatcgagctgaagccgggtaaaggcgctcagatcgctcgctccgctggcgcttccgcccagctggtcgcgcgtgaaggtgcgtacgtaaccctgcgtctgcgctccggtgaaatgcgtaaagtcctggctgagtgccgtgcgaccctgggcgaagtctcgaactccgagcacagcctgcgttcgctgggtaaagccggtgctacgcgctggcgtggtgttcgcccgaccgttcgcggcgtggcgatgaacccggtcgaccacccgcatggtggtggtgaaggccgtacctctgctggtcgtcatccggtatcgccgtggggtcttcagaccaagggtaagaagactcgctcgaacaagcgtaccgataacatgatcgtccgccgccgcaagtaa

SEQ ID NO: 30439 - DNA, 1194 bp, Pseudomonas aeruginosa
gtggctaaggaaaaattcgaacgtaacaaaccgcacgtcaacgtcggcaccatcggtcacgttgaccatggcaagaccactctgaccgctgcactgaccaaggtctgctccgatacctggggtggttccgctcgtgctttcgatcagatcgacaacgcgccggaagaaaaggcccgcggtatcaccatcaacacctcgcacgttgaatacgattccgctgttcgtcactacgcccacgttgactgccccggtcacgccgactacgtgaagaacatgatcaccggtgctgcccagatggacggcgcgatcctggtttgctcggctgccgacggccccatgccgcagacccgcgagcacatcctgctgtcccgccaggtaggcgttccctacatcgtcgtgttcctgaacaaggccgacatggtcgacgacgccgagctgctggaactggtcgagatggaagttcgcgatctgctgaacacctacgacttcccgggcgacgacactccgatcatcatcggttccgcgctgatggcgctggaaggcaaggatgacaacggcatcggcgtaagcgccgtgcagaagctggtagagaccctggactcctacattccggagccggttcgtgccatcgaccagccgttcctgatgccgatcgaagacgtgttctcgatctccggccgcggtaccgtggtaaccggtcgtgtagagcgcggcatcatcaaggtccaggaagaagtggaaatcgtcggcatcaaggcgaccaccaagactacctgcaccggcgttgaaatgttccgcaagctgctcgacgaaggtcgtgctggtgagaacgttggtatcctgctgcgtggcaccaagcgtgaagacgtagagcgtggccaggtactggccaagccgggcaccatcaagccgcacaccaagttcgagtgcgaagtgtacgtgctgtccaaggaagaaggtggtcgtcacaccccgttcttcaagggctaccgtccgcagttctacttccgtaccaccgatgtgaccggtaactgcgaactgccggaaggcgtagagatggtaatgccgggcgacaacatcaagatggttgtcaccctgatcgctccgatcgccatggaagatggcctgcgcttcgcgatccgcgaaggcggccgtaccgttggcgccggcgtggttgccaagatcatcgagtaa

SEQ ID NO: 30440 - DNA, 2121 bp, Pseudomonas aeruginosa
gtggcccgtactacacccatcaaccgctaccgtaatatcggtatctgtgcccacgttgacgcgggcaagaccaccaccacggagcgggttctgttctataccggcgtcaaccacaagctgggcgaagtgcatgacggcgctgcgaccaccgactggatggtgcaggagcaggagcgcggtatcaccattacctccgctgccgttaccaccttctggaagggttcgcgcggtcagtacgacaactatcgcgtaaacgtcatcgacactcccggccacgtagacttcaccatcgaggtggagcgttccctgcgtgtactggacggcgctgtcgtggtgttctgtggcacctccggcgtagagccgcagtcggaaaccgtatggcgtcaggccaacaagtacggcgtaccgcgcatcgtctacgtcaacaagatggaccgccagggcgcgaacttcctacgcgtcgtcgagcagatcaagaagcgcctgggtcataccccggttccggtccagctcgccatcggcgctgaagagaacttcgtcggtcaggtcgacctgatcaagatgaaggccatctactggaacgatgacgacaagggcatgacctaccgcgaggaagaaattcctgcggagctcaaggacctggccgaagagtggcgttccagcatggtcgaggctgcggccgaagccaacgaagagctgatgaacaagtacctcgaagagggcgagctctccgaagccgagatcaaggaaggcctgcgtctgcgcaccctggcctgcgagatcgttccggccgtctgcggttcctcgttcaagaacaagggcgttccgctggttctcgatgccgtcatcgactacctcccggctccgaccgagatccctgcgatcaagggcgtcagcccggacgacgagaccgtcgaagacgagcgtcatgccgacgacaacgaaccgttctcgtccctggcgttcaagatcgctaccgacccgttcgtcggtaccctgaccttcgcccgcgtttactccggcgtcctgagttccggcgactccgtcctgaactcggtgaaaggcaagaaagagcgcgtcggtcggatggtgcagatgcacgccaaccagcgtgaagagatcaaggaagtgcgcgcaggcgacatcgctgccctgatcggcatgaaggacgtcaccaccggtgacaccctgtgctcgatcgagaagccgatcatcctcgagcgcatggacttccccgagccggtaatctcggtcgctgtagagccgaagaccaaggctgaccaggagaagatgggtatcgccctcggcaagctggcccaggaagacccgtcgttccgtgtcaagaccgacgaagagtccggtcagaccatcatctccggcatgggcgagctgcacctggacatcatcgtcgaccgcatgaagcgcgagttcggcgtcgaggccaacatcggcaagccgcaggttgcctaccgtgagaccatcaccaaggacaacgtggagatcgaaggcaagttcgttcgccagtccggtggtcgcggtcagttcggtcattgctggatccgtttctcggccgcggacgtggacgagaagggcaatatcaccgaaggcctggtgttcgagaacgaagtcgtgggcggtgtggttccgaaggaatacatcccggcgatccagaagggtatcgaagagcagatgaagaacggcgtcgttgccggctatccgctcatcggcctgaaggctaccgttttcgatggttcctaccatgacgtcgactccaacgagatggcgttcaagatcgctgcttccatggcgaccaagcagttggcccagaagggcggcggcaaggtgctcgagccgatcatgaaggtagaggtagtgactcctgaggactacatgggtgacgtgatgggcgacctgaaccgtcgtcgtggtctgattcaggggatggaggacacggtttccggtaaggttattcgtgccgaggttccgctgggtgagatgttcggttatgcgaccgacgtgcgttccatgtcccagggtcgcgcgagctactccatggaattctccaaatacgccgaagctccgtcgaacatcgtcgaagcgctggttaaaaaacaaggttga

SEQ ID NO: 30441 - DNA, 4074 bp, Pseudomonas aeruginosa
atggcttactcatacactgagaaaaaacgtatccgcaaggactttagcaagttgccggacgtcatggatgtgccgtatttgctggccatccagctggattcctatcgcgaattcctgcaggctggcgcaaccaaggagcagttccgcgatgtcggtctgcacgcggccttcaagtccgttttcccgattatcagctattccggcaatgctgccctggaatacgtcggctaccgtctgggtgagccggcattcgatgtcaaggagtgcgtgctgcgcggcgtgaccttcgccgtaccgctgcgcgtgaaagttcgcctgatcatcttcgaccgcgagtcgtcgaacaaggcgatcaaggacatcaaggaacaagaagtctacatgggggaaatccccctgatgaccgagaacggtaccttcatcatcaacggtaccgagcgtgtcatcgtctcccagctgcaccgttccccgggcgtgttcttcgaccacgaccgtggcaagacccacagctccggcaagctgctgtactccgcgcggatcattccttaccgcggttcctggctggacttcgagttcgatccgaaggactgcgtgttcgtccgtatcgaccgtcgccgcaagctgccggcctcggtactgctgcgcgcgctcggctacagcacggaagagatcctcaacgccttctacgcgaccaacgtcttccacatcaagggcgagaccctgaacctggaactggtcccgcagcgcctgcgcggtgaagtcgcgagcatcgacatcaaggatggcagcggcaaggtgatcgtggagcaggggcgtcgtatcactgcccgccacatcaaccagctggaaaaggctggcgtgagccagctggaagtgccgttcgactacctgatcggccgtaccatcgccaaggcgatcgtgcatccggctaccggcgagatcatcgccgagtgcaacaccgagctgaccctcgacctcctggccaaggtggccaaggcccaggtcgtgcgcatcgagaccctgtacaccaacgacatcgactgcggtccgttcatctccgacaccctgaagatcgacaacaccagcaaccagctggaagccctggtcgagatctaccggatgatgcgtccgggcgagccgccgaccaaggaagctgccgagaccctgttcggcaacctgttcttcagcgccgagcgttacgacctgtcggccgtaggccggatgaagttcaaccgccgtatcggtcgtaccgagatcgaaggtccgggcgtcctgagcaaggaagacatcatcgatgtgctcaagaccctcgtcgacatccgtaacggcaagggcatcgtcgatgacatcgaccacctgggcaaccgtcgtgtccgttgcgtcggcgaaatggccgagaaccagttccgcgtgggcctggtgcgtgtcgagcgcgcggtcaaggaacgcctgtccatggccgaaagcgaaggcctgatgccgcaagacctgatcaacgccaagccggtggctgccgcgatcaaggagttcttcggttcgagccagctgtcgcagttcatggaccagaacaacccgctttccgagatcacccacaagcgccgcgtctccgcgctcggcccgggcggtctgacccgtgagcgtgcgggcttcgaggttcgtgacgtacacccgacccactacggccgcgtgtgcccgatcgaaacccctgaaggtccgaacatcggtctgatcaactccctggcgacctacgcccgcaccaacaagtacggcttcctcgagagcccgtaccgcgtggtcaaggacagcctggtaaccgacgagatcgtgttcctgtcggcgatcgaagaagccgaccacgtcatcgcccaggcttcggcgaccctcaacgagaagggtcaactggtggacgagctggtggccgtgcgtcacctgaacgaattcaccgtgaaggcgccggaagacgtgaccctgatggacgtgtcgccgaagcaggtcgtttccgtcgctgcctcgctgattccgttcctcgagcacgatgacgccaaccgcgcactcatgggctcgaacatgcagcgtcaggccgtgccgaccctgcgtgccgacaagccgctggtgggtaccggcatggagcgcaacgtggcgcgcgactccggcgtctgcgtcgtggctcgccgtggcggtgtgatcgactcggtcgatgccagccgtgtcgtggttcgcgtggcggatgacgaagtcgagaccggcgaagcgggtgtcgacatctacaacctgaccaagtacactcgttccaaccagaacacctgcatcaaccagcgtccgctggtgagcaagggtgacgtggtcgcgcgcggcgacatcctggccgacggtccgtccaccgacatgggcgaactggccctgggccagaacatgcgcgtagcgttcatgccctggaacggcttcaacttcgaagactccatctgcctgtccgagcgcgtggtccaggaagatcgtttcaccacgatccacatccaggaactgacctgcgtcgctcgtgacaccaagctcggcccagaggaaatcaccgcggacatcccgaacgtgggcgaggccgcgctgaacaagctggacgaagccggtatcgtctacgtcggcgccgaagtgcaggccggcgacatcctggtcggcaaggtcactccgaaaggcgagacccagctgactccggaagagaagctgctgcgcgcgatcttcggtgagaaggcgtccgacgtgaaggacacctccctgcgtgtgccgaccggcaccaagggtaccgtcatcgacgttcaggtcttcacccgcgacggcgtcgagcgcgattcccgcgcgctgtccatcgagaagatgcaactcgaccagatccgcaaggacctgaacgaagagttccgcatcgtcgaaggcgcgaccttcgagcgtctgcgtgccgccctggtcggtgccaaggctgaaggtggcccggcgctgaagaagggcacggagatcaccgacgactacctcgacggtctcgagcgcggccagtggttcaagctgcgcatggccgacgacgccctgaacgaacagctggagaaggcccaggcctacatcagcgatcgtcgccagctcctggacgacaagttcgaggacaagaagcgcaagctgcagcagggcgacgacctggctccgggcgtgctgaagatcgtcaaggtctacctggcgatcaagcgtcgcatccagccgggcgacaagatggccggccgtcacggtaacaagggtgtggtctcggtgatcatgccggtggaagacatgccgcacgatgccaacggcaccccggtcgacatcgtcctcaacccgctgggcgtaccgtcgcgtatgaacgtcggtcagatcctcgaaacccacctgggcctcgcggccaaggggctgggcgagaagatcaaccgcatgctcgaagagcagcgcaaggtcgccgaactgcgtaagttcctgcacgagatctacaacgagatcggcggtcgcgaggaaaacctcgacgagctgggcgacaacgagatcctcgcgctggccaagaacctgcgcggtggcgtaccgatggcgaccccggtgttcgatggcgccaaggaacgcgagatcaaggccatgctgaagctggccgacctgccggaaagcggccagatgcgtctgttcgacggccgtaccggcaaccagttcgagcgtccgaccaccgtcggctacatgtacatgctcaagctgaaccacctggtggacgacaagatgcacgcccgttccaccggctcgtacagcctggttacccagcagccgctgggtggtaaggcacagttcggtggtcagcgcttcggtgagatggaggtgtgggcgctggaagcctatggcgcggcgtacaccctgcaggaaatgctgacggtcaagtcggacgacgtgaacggccggaccaagatgtacaagaacatcgtggacggcgatcaccgcatggaggccggcatgcccgagtccttcaacgttctgatcaaagagatccgttcgctcggcatcgacatcgaactggaaaccgaataa

SEQ ID NO: 30442 - DNA, 696 bp, Pseudomonas aeruginosa
atggctaagctgaccaagcgccagaaggcgattgccgagaaagtagttgccggcaagcagtacagcttcgaagaggccgccaagctgctggccgagctgtccaccatcaagttcaaggagtccgtggacgttgccgtgaacctcggcgtcgatccgcgtaaatccgaccaggtcgttcgtggcgccaccgtcctgccgaacggcaccggcaagagcgtccgcgttgccgtcttcacccaaggtccggctgccgaagccgctctggctgccggcgccgacaaggtgggtatggacgagctggctgccgaaatgaaaggcggcgacctgaactacgacgtcgtcatcgcttccccggatgccatgcgtgtcgtcggtcagctgggccagatcctcggcccgcgtggtctgatgccgaacccgaaagtcggcaccgtgactccggacgtcgctaccgccgtgaagaatgccaaggctggtcaggtacgtttccgtaccgacaagaacggcatcatccacagctccgtcggtaaggtcgatttcgagccggccaagctgcagcagaacgttgaagcgctgctggccgacctgaagcgcctgaagccgtcctcgtcgaaaggcgtgtacgtcaagcgcgtgaccctgagcaccaccatgggtccgggcctgcagatcgacctggcttccctggaagcctaa

SEQ ID NO: 30443 - DNA, 369 bp, Pseudomonas aeruginosa
atgaatgccaaggcagaagccaaagaatcacgttttgatctcttgaaatggctcttggttgccgttctggttgtggttgccgttgtgggcaatcagtacttttcggctcaaccaatcctgtatcgcgttctcggtattctcgttctggcggtgatcgctgctttcctggctctgcaaacggccaaggggcaggccttctttagtcttgctaaggaagcgcgcgtcgagattcgcaaggtcgtatggccgagtcgtcaagaaacaactcagaccacgctgatcgtggtcgcggtagtgctggtaatggcgctgctgctgtgggggctcgattccctgctgggttggttggtttccatgattgtaggttaa

SEQ ID NO: 30444 - DNA, 1194 bp, Pseudomonas aeruginosa
atggctaaagaaaaatttgaacggaacaagccgcacgtcaacgtcggcaccatcggtcacgttgaccatggcaagaccactctgaccgctgcactgaccaaggtctgctccgacacctggggtggttccgctcgtgctttcgatcagatcgacaacgcgccggaagaaaaggcccgcggtatcaccatcaacacctcgcacgttgaatacgattccgctgttcgtcactacgcccacgttgactgccccggtcacgccgactacgtgaagaacatgatcaccggtgctgcccagatggacggcgcgatcctggtttgctcggctgccgacggccccatgccgcagacccgcgagcacatcctgctgtcccgccaggtaggcgttccctacatcgtcgtgttcctgaacaaggccgacatggtcgacgacgccgagctgctggaactggtcgagatggaagttcgcgatctgctgaacacctacgacttcccgggcgacgacactccgatcatcatcggttccgcgctgatggcgctggaaggcaaggatgacaacggcatcggcgtaagcgccgtgcagaagctggtagagaccctggactcctacattccggagccggttcgtgccatcgaccagccgttcctgatgccgatcgaagacgtgttctcgatctccggccgcggtaccgtggtaaccggtcgtgtagagcgcggcatcatcaaggtccaggaagaagtggaaatcgtcggcatcaaggcgaccaccaagactacctgcaccggcgttgaaatgttccgcaagctgctcgacgaaggtcgtgctggtgagaacgttggtatcctgctgcgtggcaccaagcgtgaagacgtagagcgtggccaggttctggccaagccgggcaccatcaagccgcacaccaagttcgagtgcgaagtgtacgtgctgtccaaggaagaaggtggtcgtcacaccccgttcttcaagggctaccgtccgcagttctacttccgtaccaccgacgtgaccggtaactgcgaactgccggaaggcgtagagatggtaatgccgggcgacaacatcaagatggttgtcaccctgatcgctccgatcgccatggaagatggcctgcgcttcgcgatccgcgaaggcggccgtaccgttggcgccggcgtggttgccaagatcatcgaataa

SEQ ID NO: 30445 - DNA, 1230 bp, Pseudomonas aeruginosa
atgcgcctcatacatacctccgactggcacctgggccagaccctgcacggccaggaccgcgatcatgagcatgcgcgcttcctcgactggctgctgcgccagctggaagagcagcgcgccgatgtcctgctgatcgcgggcgatatcttcgacacgatcaatccaccgctcaaagcccaggagcgcctctacgacttcatcgtcagcgcccatcgacggctgccgcggctggagatcgtgatgatcgcaggcaaccacgactccggcgcgcgcatcgaactgcccgctccgctgatgaaacgactgaacgcccatgccatcggccgaatcggctggatagacgaaagcctcgatagcgatcgcctgctgctgcccctgcacgacgcggatggccaggtcgccgcctggtgcctggccctgcccttcctgcgtcccgccgaagtcaccggaggcgggctcggcgacgattacctggccggtatccgccaggtgcacgaacgcctggttgccgccgcgcacgcccgtcgcacgccgggacaggcactggtcgccgtcagccacgcacacatggccggcggctcggtttccgaagactccgagcgaaacctgatcatcggcaacgtcgaagcgctgcccgccagcctgtttccggagcagatcgcctacgtagccctcggtcatctgcacaagccacagaaagtcgccggacaggagcgcattcgctatagcggctcgccgctgccgctgtccttcgccgaagtgaactatcgccaccaggtcctcctcgtcaccctggaaggtgagcgcctgaaggatgtacagagtcttccggtgccacgcgcggtggaactgttgcgcatcggccccgcgcctcttggcgaggtgctcgatcgaatcggcgaactggccgaggccgacctgctgaacgaacagcggccctggctggaagtccgcgtcatgctggatcagccgcaaccggacctgcgccagcaggtcgagagcgccctgctgggcaaggcttgccgtctggtgcgcatcgccagcgagtaccagcgccgcgacgaagagcaggcgccgctgctcgggctcgaccaactcaacccccaggaactgttcagccgcgcctgggaaagcgcctatggctccggcccggatgcgcaggcgctggatgacttcgccagcctgctgcaaagcgtcgaactggccaccgaagagcccccggggaaataa

SEQ ID NO: 30446 - DNA, 3636 bp, Pseudomonas aeruginosa
atgaagattctcgccatccgcctgaagaacctcgcctccctcgctggcgagcaggaaatcgacttcacccgcgaaccgctgtccagcgccggcctgttcgccatcaccggtccgaccggcgccggcaagagcaccgtgctggacgccctgtgcctggccctgttcggcagcacgccgcggctggaaagcacttcggccagcagcaaggttcccgatggccggaacgagctgtccagcaacgacgaacgcaacctgctgcgccgcggttgcgccagcggctacgccgaagtggatttcgtcggcatcgacggccaccgctatcgcgcccgctgggaaacccggcgctcccgggacaaggcggacggcgccttgcaaaagagccagcagagcctccaggacctggagacccagcaaatgctggcagcgaacaagaaaagcgagttccgcgaacagctggagcagaagctcggcctcaatttcgcccagttcactcgcgccgtgctgctggcccagagcgaattcagcgccttcctcaaggccagcgacaacgaccgcggcgcattgctggagaaactcaccgacaccggcctgtacagccaattgagcaaagccgcctatcagcgcgccagccaggccgacgagcagcgcaagcaactcgagcaacgcctggaaggcagcctgcccctggccgagcaggcccgggccgggctcgaggcggcgctggaatcccacgcccaggcgcgtctccaggagcaacaggcactgcaacgtctggaaggccagcaacaatggttcaccgaggagcagcggctgctgcaatcctgcgagcacgcacaaggccaactggccgaggccaggcaggcctgggacgccctggcgacggagcgggaaaccctgcaatggctggagcgcctggctccggttcgcggactgatcgaacgcctgaagcaactcgagcaggaactccggcactccgagcagcagcagcggcagcgcaccgagcagcaagccgcgggcaccgagcgcttgcaaggattgcaggcccgcttgcaggaggcgcgcgagcgccaggcccaggccgacaaccatctgcgtcaggcccaggcgccgttgcgcgaggctttccagctggagagcgaggccaggcgcctggagcgaacgctggccgagcgacaggaactccatcggcaatcgaaccagcgccacgcccagcaaagcgacgccgctcggcaactggatatggagcagcagcgccatgtcgcggaacaggcgcaactgcaggcggcattgcgcgacagccaggctctcgccgcgctcggcgacgcctgggtgacccaccagggccagctcgccaccttcgtgcaacgtcgccagcgcgcgctcgaaagccaggcgcagctccccgagctggaaaaatccctggcccacgccggggaaccgctcgaacgcttgcaggcgcaatggaccgccctccatggcagcgagccggacgacctggcggcacgcctggtcgaattgcgccggcagaccgatagcctggaacgacaacaagcgctccacaaggaatggcaacaggtcctcgaccaacgcgccggtctggctcgacgcctgggcgaactcgaccagcgtatggtcgagcaggagcaggcattgctcgacctgaaacgacaaggcagccaatgcgccgaggaggtgaaggcggcggagcaggccctgcaggtcacccgcgagttgctccagcgccaacgtctggcccgcagcgccagcgtcgagcaactgcgcgccggcctggtggacggcgaggcctgcccggtctgcggcagccaggagcatccctatcaccattccgagcaactgctcgccgccctcggtgaacacgacgaccaggagcaggtccgcgccgagcagtccctcgagcggctgcgacagaccctggtcggtctgcgcgagggctattccagccagcgggaaagactcaaccagagtcgccaggagcagcaggaactgactggccaactggccgcgctcgatcggcaactggaccaatggacgctgccggaagaactgcgactcctgcagccgtccgcgcagttggagtggctggcacaacgcctggacgacctggcagggcagcgccagcagtgccaacgagacttcgaccggctgatcgcccgccagcgccagacccagcaattgcagcaggaactgcgggccgccgagacgatcctgcaacagcgccagcaggcgctgacggaacaacggcagcgctacgaacatttgcagcagcaggtcgaggaggacagccagcaattgcgtccattgctctccgacgagcactggcagcgctggcaggcagatccgctgcggactttccaggcactcggcgagtccatcgagcaacgccggcagcaacaggcgcggcttcagcagatcgaacagcgtctgcaggagctcaagcagcgctgcgatgaatcgagctggcaactgaagcaaagcgacgagcaacgcaacgaagcccgtcaggcagaggaaagggcccaggcggaactcgccgaactgaacggacgcctcggcgctcacctgggccagcacgcctgcgcccaggactggcagctatcgctggagcacgccgcgcaagcggcgcagagcgccgtcgagacgctccaggcgcccctggattcgctgcgcgaggaacaactgcgactcgccgaagccctggaacacctgcagcagcaacggcagcgccaacaggatgagttccagcgccttcaggccgactggcaggcctggcgcgaacgccaggacaacctcgacgacagccgcctcgacgccctgctcggcctttccgaggaacaggcgacgcaatggcgggagcaattgcagcgactgcaagaggagatcacccgccagcagacactggaagcagagcgccaggcgcaactgctccagcatcgccggcagcggccggaaaccgaccgcgaggcgctggaagacaacctgcggcaacagcgcgaacgcctggccgccagcgaacaggcctacctggagacctacagccagttgcaggccgacaaccagcgccgcgagcagagccaggcgctgcttgccgaactggagcgagcccgcgccgagttccgcagatggggccgcctgaacgaactgatcggttcgtccagcggcgacaagttccgccgcatcgcccagggctacaacctcgacctgctggtgcagcacagcaacgtgcagttgcgccagttggcgcggcgctaccgcctgcagcgcggcggcagcgaactgggcctgctggtggtggacaccgagatgggcgacgaactgcgctcggtgtattcgctctccggcggcgagaccttcctgatttccctggccctggcgctcggcctggcctcgatggcatcgagcaagctgcgcatcgagtcgctgttcatcgacgaaggcttcggcagcctcgacccggaatccctgcaactggcgatggatgccctggacaacctgcaggcccagggacgcaaggtggcggtgatttcccacgtccaggaaatgcacgaacggatcccggtccaggtgcgggtccagcgcgagggcaacggcatgagcagcctgaaggtggtcggctga

SEQ ID NO: 30447 - DNA, 2166 bp, Pseudomonas aeruginosa
atgaatccgaccctcaagcaactggccggcgaagtccgcgatggccgcgacgaccaggtagcgcaaccgctggcggcacgccacgacctgctgcgccagctcgacctgtgggtggcgcgcggctggctacgggcgctggaccgggcgttcgtcgccttcctcgtcgagttgcagccgcaggccgatccccgggtgctgctggcggcggcgctgaccagccaccaactgggccacggtcacgtctgcctggacctggaggcgaccgtcggcgcgcccgacgcggcactgtcgctgccgccggaaggcgacgaaggccgcgatgtgctgttgccgtcgcaactgctgcacggcgtgcgcctcgacgcctggcgcgaggccctggcggcgtcaccgctggtggaggtggtcgacgagcgcccaggcgatcccgagccgagcgagacggcgacctcgccgctggtgctttgcgcccagcgtctctacctgcgtcgttattggcggcacgaactggagatcgccctggccctgcgcgagcgcctgggtcggcaggcgcccctggccgccgacctggcgccgcgcctggccgcgctgttcgcgcaggcgcctacggaagacggccagcgcgtcaccgactggcagaagctggcctgcgccctggcggcccgcggctatttcagcctgatcaccggcggtcccggtaccggcaagaccaccaccgtggtgcgcctgctcggtctgctccaggcaccggcggtagccgccggccagccgctgcgcatccgcctcgcggcgcccaccggcaaggccgcggcgcgtctctccgaatccatcggccagcaggtccgggccctgccgctggcggaagacgtgttgcaggcgatccccgccgaggtcactaccctgcaccgtctgcttggcagccgtccggatacccggcacttccgccaccaccgggacaaccctttggcgctggacgtgctggtggtggacgaggcctcgatgatcgacctggaaatgatggccagcctgctcgatgcgctaccgccgcaggcgcgcctgatcctgctcggcgacaaggaccagttggcctcggtagaggccggcgcggtgctcggcgatctctgccgggatgccgaggagggctggtacagcgccgagacccgcgcctggttgcagcgggtcagcggcgaaacctggcagggcttgcgcgaaggttcgtcgcaggcgcatccgctggcgcaacagaccgtcatgctgcggcattcccggcgcttcggcgcgagcagcgggatcgggcgcctggcgcggttggtcaaccggcaacaggccggcgacgcgcgcgcgctgctggacagtccgcccgccgacctcttcgacctgcgcctgcgcggggagcgcgatgcagccttcgcccggctgttcgtcgacggtcatccgcaggcgccgggcacgccgtacggctaccggcactacctgcaacgcctggccgagggccgcccggccgccggactggcgctggaggatggcgcctgggagcgctgggcgcagtcggtactgacggctttcgacgccttccgcctgctctgcgcgctgcgccgcggcccatggggcgtggaaggactgaaccagcgggtagcggcagaactgctgcgccttggcctgatcgaggccgatcacggctggtacgaggggcggccggtactggtgacgcgcaacgactacagcctggggctgatgaacggcgatatcggcatcgccctgcgcctgcccgagcgcaacgacgacggcagcctgcgcttcgcgctgcgcgtggccttcccgcgcaacgacggtagcggcggcgtgcgcttcgtcctgccgagccgcctggtcgaggtggacaccgtgttcgccatgaccgtgcacaagtcgcagggttcggagttcgcccataccgcgctggtcctgccggacgcgctgaacccggtgctgaccaaggagctggtgtacaccggtatcacccgcgcccgcgactggttcagcctggtggaaagcctgcccggggtgttcgaggaagcagtgcggcgcaaggtgcgccggctcagcgggctgatgctgcatctgcggccggaaagggaagagcagccgccgcatgctccgggtgaacagaccgagctgccgttctga

SEQ ID NO: 30448 - DNA, 3738 bp, Pseudomonas aeruginosa
atgagccagcagcagatgcccgtggccctcgatccgctggacttcccgttgcacggcagccgcctgatcgaggccagcgccggtaccggcaagacgttcaccatcgccctgctatacgtacgcctggtcctcgaccatggcggcgagaacgctttcggccggccgctgagcccgccggaaatcctcgtggtgaccttcaccgatgcggcgacccaggaactccgcgagcgtatccgcagccgcctgggcgaagcggcgcgttgtttcgccgagccgcaggagcgccacgacggcctgctggtcgcgttgcgccagcagtatcccaccgagcgctggccgggctgcgcgcgcctgctgcgcctggccgcggagtggatggacgaggccgcggtatcgaccatccacagttggtgctaccggatgctgcgcgagcacgccttcgacagcggcagcctgttcacccagaacctggaaaccgaccagagcgaattgctcgccgaagtggtgcgggactactggcggcgcaacttctacggcctgacggctccggcggcgcaagccgtggccagttgctacagtgggccggaggcgctgggcaaggccttgcagccgctgctggcgcggcaggacgccgacttccgctacgccgaccaggcgctgagtgcgcccgagtcactggcagccttgctggagcagggcggcgactggtatcgccagctcgaccaactggacgcgcaggcccgcgccgcctggcgcgcagcgcgcgtcgaactggaagcgctgctgcgcgacctgcgtccctacctgaacggcaacagctatcgcggcaaggacagcgacgagaccttcgacgcctggctgcaagcgttggcggactggagcgagggcggcgagcagccggccaacctgggcaagttcggccagacccggatcaagctcaccgccaagcgcgtggcgcccgagcatgccgcgctaagggccatcgacgcctgggccgcgcatcaggaagagcgtcccgatctcgctccccacctgttgttgcacgcgttgggcgaagtcgggcacgaactggagatcgagaagcagcggcgtgccgagatcggcttcgacgacctgctcagccgcctcgaccgcgccttgcaggggcctggtggcgagcgcctggcgcaattgatccgcgagcagttcccggtggcgctgatcgacgagttccaggataccgacccggtgcagtaccggatcttcgagcgcatctaccggatcgccgccgatcccgacgagccccaggcgcgggaaaccggcctgttcatgatcggcgaccccaagcaggcgatctacgccttccgcggtgccgacatccatacctacctgcgcgcccgcgaggccactcgcgggcggcattacacccttggcaagaacttccgctcgaccgccgccatggtggcggccgccaaccgctgcttcgccttcgccgaagagcatccgcgcggcgccttccgtttcgcccgcgaggggctggaaaacccggtgccgttccatgcggtggacgctcaggggcgcgccgaacgtttgttgatcgacggtgccgaggcgccagcgatgacgttctggaaccttgatgtcgaagccggcgtgctcggctccgcggcgtatcgccaggaaatggccgagcgcagcgccagcgccatccgccgctggctgagcctggccgacctgggccgcgccggcttcgccgacgagcagggcggctggcgggcgttgcgcccggcggatattgccatcctcgtccgcggtcgcgccgaggccgaggcgatccgcagcgcgttggcggcgcgacgactggccagcgtctacctgtccgaccgcgactcggtgttcgacagccaggaagccgccgacctgctgcattggctgcgtgcctgcgccgaccccggcgccgatgcgctgctgcgggtcgccctggctacccgcagcctgcacctggactgggcgaccctggaacgattgaaccaggacgaactgttctgggaacggatggtcctgcgcttccgcgactatcgccggtcctggcaggcccagggcgtattgccgatgctgcggcgcctgctcgccgacttcgaactgccggcgcgcctgctgcggcatgccgatggcgagcgcagcctgaccaacctgctgcacctggccgagtggctgcagcgcgcggcggtggaactggacggtgagcacgcgctgatccgccatctggccgagcaggtgcagagtccggggagcgaagagatcctccgcctggaaagcgacgccgacctgatcaaggtggtgaccatccacaagtccaaggggctggaataccccttggtgctgctgcccttcatctgcagctggagggagctggacggcaacagcggcgcgccggcgagtttccacgaggatggcgctgcagggcgggtcatcgagctggcgcggcgcaaggagcaggctgcgcgggcctacgagcaggccaacgacgagcgcctcggcgaagacatgcgcctgctctacgtggccctgacccgcgcccgccattcggtgtggctgggcatcgcgccgctggtggcgagcaacagcaagtcgccggagttgcacaagggggccctgggctacctgcttgccggcggcgcgaccatcggcagcgatggcctcggacaatgcctcgccgcgttgcgcggcgagtgccgggagatcgtcgtcgagccggcccccgaggcggacgccgaacgctatgtcgcagggcgcggccagggccttgggcaggcccgcgaaacccgccgcagcagccgcgagaagtggtgggtcgccagctattccggcctgcaattgcaggcctccgccgggctggacgatgacgaggtgttggagagcgacgaatcgcaggagccgatcagcgccgaggaagccaccttccacgaagaaggccgttccgccgaacagccgccggtcgcgcacgccagcgagatgcgcgacgacctgcatcgcttcccgcgcggaccggctcccggcaccttcctccacgggctgctcgaatgggccggccgcgaaggcttcgatgtggcgcgcgccgatgcccagcggcgccgcgaactggtcgcgcgacgctgcgatctgcgtggctggaaggactgggccgaaccgctcgacctgtggctggagcagtatctcgccgaaccgctgcgctggcccggtggcgaaaccagcctggccgggctggtcgcctaccaggtggaaatggagttctggttcgccacccaccaggtccaggccgaggcgatcgacgccctggtccggcgccataccctcggcggcgcggcgcgtccggcgctggcgccgaccctgctgaacggcatgttcaagggcttcgtcgacctggtcttcgagcaccaggggcgtttctacgtggccgactacaagtccaactggctgggcgccgacgatggcgcctacagcccggaagcgatgaccgccgcggtgctggagaaccgttatgacctgcagtacgtgttgtacctgctggccctgcaccggcagttgaaggcgcgcctgcccgactacgactacgaccgccacatgggcggcgccgtgtacctgttcctccgcggcacccgcgcggcgacccagggcctgcacttcgagcgcccgccgcgggaactgatcgaacgcctggacgcgctgttcagcggccagccgggagccgagcgatga

SEQ ID NO: 30449 - DNA, 684 bp, Pseudomonas aeruginosa
gtggtcgaagtgttttccgtgcaggatgggctggacgccgagcgcgccctgctcgacgaggtgtgtggcggtgcccgcgagcatggcctgttgctctggcagccctgcgatcgggcgctggtcatgccgcgccggatggagcgcctggaaggattcgcgccggccagcgcagcggtcgccgaacgcggctggccggtgctgctgcgcgataccggcggcgagccggtgccgcaatcgccgggcgtgctgaacatcgccctgtcctatgcgctggggcccggcgacaacgagcagacccgtatcgaaaccgcctacctgcggctgtgccagccgatctgcgactggctccgcgagcgcggcctggacgccggcgtgggcgccgtggccggttccttctgcgacggccgctacaatgtcaccctggatgggcgcaagctcgccgggaccgcgcaacgctggcggcgcaacggcgccggccggccggtggtgctggcgcacgcggcgctgctggtcggcgccgagcgcgaggagatggtcgaggtggtcaacaccttcacccgccgttgcgccagtgccccggattgccaggcggacagccatctcggcctgagcgagcgctggagcgatttccgcatggccgacagcctcgaactggaacgacgcttcgtcgccgcccgatcctga

SEQ ID NO: 30450 - DNA, 1470 bp, Pseudomonas aeruginosa
atgttcgatcttttcagcgggctcgatgcctgggtgggtatcagcctggtgctggccctggccttcgtcctcaccttcgagttcatcaacggcttccacgacactgccaacgcggtggccaccgtcatctacaccaaagcgatgtccccctaccgggcggtgatgctctccggtgtgttcaacttcctcggcgtgctgctcggcggtgtcggtgtagcctacgccatcgttcacctgctgccggtggagctgctgatcaacgtgaacaccggccatggtctggcgatggtcttctccctgctcgccgccgccatcgcctggaacctcggcacctggtacttcggcatcccggcctccagctcgcacaccctgatcggctcgatcctcggcgtcggcctggccaatgcgctgatcaccgacgtgccgctggccgaagggatcaactggcagaaggcgatcgacatcggcctgtcgctgatcttctcgccgctggccggcttcatggtcgccgcgttggtcctgctcggactgaaatggtggcgtccgctgtcgaagatgcacaaaaccccggaaacccgtcgcgaactcgacgagaagaagcacccgccgttctggaaccgcctggtgctggtgctttccgccatggcggtaagcttcgtccatggctccaacgacggccagaagggtatcggcctgatcatgctggtactgatcggcatcgtcccggccaagttcgtcctcgacctgaacagcaccacctaccagatcgagcgcacccgcgacgccgccctgcacctcagtcagttctaccagcgccacaccgataccctcggcgacatgctggccctgggcaagagcaatggcagcgagatgccgcagttctaccgctgcgatccgaaacagaccgagccgaccatcaacgcgctgctccgcgacctgcgcggcgtgcccagctacaacgacctggacgccgacgagcgcgtgcaggtgcgtcgctacctgctgtgcctggacgacaccgcgaagaaggtcggcaagctgtccgacctgccggcgcgggagaaggccgacctcgagaagctacgcaaggacctgaccgcgaccaccgaatacgcgccgttctgggtcatcatcgcggtggccctggctctcggcatcggcaccatggtcggctggaagcgcgtagtgctcaccgtcggcgagaagatcggcaagcagggcatgacctacgcccagggcatgagcgcgcagatcaccgccgccgccgccatcggcatggccaacatctacagcctgccggtgtccaccacccatgtactgtcctccggcgtggccgggaccatggtggcgaacaaaagcggcctgcacggcggcaccgtgcgcaacatcctgatggcctgggtgctcaccctgccgacttcgatggcgctgtccgccggcctgttctggctggcctcgcaattcatctga

SEQ ID NO: 30451 - DNA, 852 bp, Pseudomonas aeruginosa
atgcgcacttttcggctggtgatcgcctgtcccgacggggtcgggatcgttgccaaggtgagtaacttcctggccacctacaatggctggatcaccgaagccagccatcattccgacaacgataacggctggttcttcatgcgccacgagatccgtgccgactctctgccgttcgacctggatggcttccgccaggctttcgccccgatcgcccgcgaattctccatggaatggcgaatcaccgattccgaggtgaagaagcgcgtggtgctgatggccagcaaggagtcccattgcctggccgatctgctgcaccgctggcacagcggcgaactggactgcgagattccctgcgtgatcgccaaccacgacgacctgcgcagcatggtcgagtggcacggcatcccgtatttccacgttcccgtcgatccgcaggacaagcagccggccttcgatgaagtttcccggctgatcgacgaacatggcgccgactgcatcgtcctggctcgctacatgcagatcctgccgccggacctgtgccgcaagtacgcccaccaggtgatcaacatccaccacagcttcctgccgtccttcatcggcgccaagccgtatcaccaggcgtcgaagcgcggggtcaagctgatcggcgcgaccagccattacgtgaccgaggaactggatgccggtccgatcatcgagcaggacgtggtgcgggtcactcaccgcgacaacgtcgaagacatggtgcggctgggcaaggatgtggaaaaactggtgctcgcgcgcggactgcgctatcacctggaagaccgcgtactggtacacggcaacaagacggtggtgttcgactga

SEQ ID NO: 30452 - DNA, 1452 bp, Pseudomonas aeruginosa
atgtccgttcgccgcaccaaaatcgtcgccaccctcggcccagccagcaattccccggaagtgctggagcaactgatcctggccgggatcgacgtcgcccgcctcaacttctcccacggcacccccgatgaacaccgcgcccgcgccaggctggtgcgcgaactggcggccaagcacggccgcttcgtcgccctgctcggcgacctgcaaggaccgaagatccgcatcgccaagttcgccaacaagcgcatcgaattgcaggtcggcgacaagttccgcttctccaccagccacgcccgcgacgccggtacccaggaagtggtcggcatcgactacccggacctggtgaaggactgcggggtcggcgatgaactgctgctggacgacggccgggtggtgatggtggtcgaggaagtcgccgccgacgaactgcgctgccgggtgctgatcggcggcccgctgtccgaccacaagggcatcaaccgccgcggcggcggtctcaccgcgccggcgctgaccgacaaggacaaggccgacatcaagctggccgcggacatggacctggactacgtggccgtttccttcccgcgcgacgccaaggacatggaatacgcccgccgcctgctcaccgaggccggtggcaaagcctggctggtagccaagatcgagcgcgccgaggcggtcgccgacgacgacgcactcgacggcctgattcgtgccagcgacgcggtaatggtggcccgtggcgacctcggcgtggaaatcggcgatgccgagctggtcggcatccagaagaagatcatcctgcacgcccgccgcaacaataaagtggtgatcaccgcgacccagatgatggagtcgatgatccacagcccgatgccgacccgcgcggaagtctccgacgtggccaacgctgtgctcgactacaccgacgcggtgatgctctcggcggaaagcgccgccggcgagtacccggtggaagcggtgaaagccatggcccgcgtctgccagggcgccgagaagcacccgaccagccagaaatccagccaccgcctcggccagactttcgaccgctgcgacgagagcatcgccctggcgtcgatgtacacggccaaccacttcccggggatcaaggcgatcatctgcctgaccgaaagcggcttcaccccgctgatcatgtcgcgcatccgctcgtcggtaccgatctacgcctactccccgcaccgcgagacccaggctcgcgtggcgatgttccgcggcgtagaaaccatccccttcgacccggcggcgctgccggcggagaaggtcagccaggccgcggtcgacgagttgctcaagcgcggcgtggtgaccaagggcgactgggttatcctgaccaagggcgacagctacaccgcccagggcggcaccaacaccatgaaggtgctgcacgtcggcgacctgctggtataa

SEQ ID NO: 30453 - DNA, 1257 bp, Pseudomonas aeruginosa
gtggcggtgccggccgacgcctcgccgctgcgcaagctggcgctgttcgtcggccccggcctgctggtctcggtcggctacatggaccccggcaactgggccaccgccatcgaggcgggctcgcgcttcggctacgcgctgctgttcgtagtggtgctggcgagcttttccgggatgctcctgcaaagcctctgttcgcgcctggggatcgccaccggccgcgacctcgcgcagctctcccgggagcgctaccgccctggcgtggcgcgtggccaatggctgctggcggaactgtcgatcgtcgccaccgaccttgccgaggtgctcggcgcggcgctggccttccacctgctgctgggcgtctcgattaccaccggggtggtcctcaccgccttcgataccctgatcgtgctggccctgcagggcgccaacttccgccgcctggaggccatagtgctggggctgatcgcgaccatcggcgcgtgtttcttcgtcgaactggtgctgatcggcccctactggccggatgtcgccgccggcttgcggccgtcctgggacacgctgagcagccaggagccgctgtacctggcgatcggcatcctcggcgcgacggtgatgccgcacaacctctacctgcattcgtccgtggtgcagacccgggtcagcggcgacgacgcggcgagcaaacgctcggcgatccgcttttcccggctcgacaccatcggctcgctgtccctggcgctgctggtcaatgcggcgatcctgatcctcgccgccgcggctttccacggtagcggccataccgaggtggtggagatccaggacgcctaccacctgctcgacccgttggtgggcggcgccctggccagcttcctgttcggcttcgccctgctggcggcggggcaaagctcgaccttcaccggcaccattgccgggcaggtggtgatggagggtttcctccgggcgaagattccctgctggcagcggcgcctgatcacccgcggcctggccctggtgccggccttgatcggcgtgctctggctgggcgaagccgcggtaggcaagctgctggtgctcagccaggtggtgctcagcctgcaattgccgttcgccctgtggccgctgattcgcttcagcagcgaccggggcctcatgggggagttcgtcaacccgcgctgggtcagcgcgctggcctggtcgttgttcggcctgatctcggcggcgaacctgaccttgctgtatttctggttcggctga

SEQ ID NO: 30454 - DNA, 303 bp, Pseudomonas aeruginosa
atgccactggacatcgacgaaatcatcaaggctctctcccacccggtgcgacgcgacatgctgcgctggctgaaggaaccggagaagtacttcgtcgagcaggaccacccgttcgagatcggcgtctgcgccggcaagttcgaccagcgtaccggtctctcccagtccaccgtatcggtacacctcgccaccctgcaacgcgccggtctggtgaccagccgccgggtcggccagtggaacttcttcaagcgcaacgaggagaccatccaggccttcctcgaccaactcggcgacgagctgtaa

SEQ ID NO: 30455 - DNA, 228 bp, Pseudomonas aeruginosa
atgagcgcattgcaaccgtcccgttcctaccgcatcaccggttattcccccgccatcagcaacggctatcgccaacgcctgttctccatggggcttctgcccggcgcggcgctgcgcgtggtgcgcatcgccccgctgggcgacccgatccaggtcgagacccgccagaccagcctggcgctgcggcgcaaggacctcgccctgctgaccctcgtcccgctcgactga

SEQ ID NO: 30456 - DNA, 990 bp, Pseudomonas aeruginosa
atgcggattctggtaacgggggcgacgggcttcatcggcgggcgtttcgctcgcttcgccctggagcagggcctgtcggtacgggtcagcggtcgtcgtgcggacgcggtggaacatctggtggcgcggggcgccgagttcgttcccggcgacctcgccgacccggcgctggtcctgcgcctctgcgaggatgtcgaggcggtggtgcattgtgccggcgcggtcggagtctggggaccgcgcgaacgcttcctggcggccaacgtcgggcttgccgagagcgtcgtcgaggcctgcatgcggcaaaaggtgcggcgcctggtgcatctgtcgtcgccgtcgatctatttcgacgggcgcgaccacctggacctgaacgaagagtacgtaccccggcgtttttccgaccattacggggcgaccaagtaccaggccgagcaactggtgctcagcgcccgcgacctgggcctggaagtgttggcgctgcgtccgcgcttcgtggtcggcgccggcgacaccagcatcttcccgcgaatgatccaggcccaccgcaagggacgcctgcggatcctcggcaacggcctgaaccgggtcgacttcaccagcgtgcacaatctcaacgacgcgctgttcagttgcctgctggccggcgagccggcgctgggcaaggtctacaacatcagcaacgggcagccggtaccgttctgggatgcggtcaactacgtgatgcgccagctcgacctgccgccggtcggcggtcacctgccgtatgccgtcggctatggcctggcggcgctcaacgaaggcgtctgccggatcctgccggggcgcccggagccggtgctgttccgcctgggcatggcggtgatggcgaagaacttcaccctggacatcaaccgcgcccgcgaatacctcgactacgacccgcgggtcagcctgtggaccgcgctcgacgagttctgcgcctggtggcgcgcccagggactctga

SEQ ID NO: 30457 - DNA, 1197 bp, Pseudomonas aeruginosa
atggccgagagcgctttttccgaacgtatcgtgcagaacctgctggataccgacttctacaagctgaccatgatgcaggcggtgctgcacaactatcccaacgccgaggtggaatgggagttccgctgccgcaaccaggaagacctgcgcctgtacctgccggccatccgcgaacaactggaatacctggcgggcctggcgatcagcgacgagcaactggccttcctcgaacggattcccttcctcgcgccggacttcatccgcttcctcgggttgttccgcttcaacccgcgctacgtgcagaccggcatcgagaacgacgaattcttcctgcgcctgaaaggtccctggctgcacgtgatcctcttcgaagtgccgctgctggcgatgatcagcgaggtgcgcaaccgcgcccgctacccggccgccaccgtcgagcaggcgcgcgaacgcctgcaggaaaagttcgattggctgcgccgggaggccagcgccgaggaactggccggcttcaagatggccgacttcggtacccgccgccgcttctcctatcgggtccacgaggcggtggtgagcggtctgaaggaggactttccgggctgcttcgtcggcaccagcaacgtccacctggcacgcaagctcgacctcaagcccctcggcaccatggcccacgaatggctgatggcccaccagcagctcggtccgcgcctgatcgacagccagagtgccgcgttggactgctgggtccgcgaataccgtgggctgctcggcatcgcgctgaccgactgcatcaccaccgatgccttcctgcgcgacttcgacctctatttcgccaagctcttcgacggcctccgccacgactcgggcgacccattgctgtgggcggaaaagaccatcgcccactacctcaagctgggcatcgacccgctgaccaagaccctggtgttctccgacggcctcgacctgccgcgggccctgaagatctatcgcgcgctgcagggccggatcaacgtcagcttcggcataggcacgcatttcacctgcgacctgccgggcgtcgagccgatgaacatcgtggtgaagatgagcgcctgcaacggccatccggtggcgaagatctccgatacgcccggcaaggcgcaatgccgggaccctgacttcatccactacctcaagcacgtgttccaggtcgcctag

SEQ ID NO: 30458 - DNA, 1644 bp, Pseudomonas aeruginosa
atggctgccaaagaagttaagttcggcgattccgctcgcaagaaaatgctggtcggcgtgaacgtgctggccgatgccgtcaaggccaccctcggcccgaaaggccgcaacgtggttctggacaagtccttcggcgctccgaccatcaccaaggacggcgtttccgtcgccaaggaaatcgagctgaaagacaagttcgagaacatgggcgcgcaactggtgaaagacgttgcctccaaggccaacgacgctgccggtgacggcaccaccaccgcgaccgtcctggcccaggccatcgtcaacgaaggcctgaaggccgttgccgccggcatgaacccgatggacctgaagcgtggcatcgacaaggccaccgtggctatcgtcgcccagctgaaagagctggccaagccctgcgccgacaccaaggccatcgcccaggtaggcaccatctccgccaactccgacgagtccatcggccagatcattgccgaagccatggaaaaagtcggtaaagaaggcgtgatcaccgtcgaggaaggctcgggcctggaaaacgaactgtccgtcgtcgaaggcatgcagttcgatcgcggctacctgtccccctacttcgtgaacaagccggacaccatggctgccgagctggatagcccgctgctgctgctggtcgacaagaagatctccaacatccgcgaaatgctgccggtgctggaagccgtcgccaaggccggccgtccgctgctgatcgtcgccgaggacgtcgagggcgaagccctggccaccctggtggtgaacaacatgcgtggcatcgtcaaggtcgcggctgtcaaggctccgggcttcggcgatcgccgcaaggccatgctgcaggacatcgccatcctcaccggcggtaccgtgatcagcgaagaagtcggcctgagcctggaaggcgctaccctggagcacctgggcaacgccaagcgcgtcgtgatcaacaaggaaaacaccaccatcatcgatggcgccggtgtgcaggctgatatcgaagcccgcgtcctgcagatccgcaagcagatcgaggaaaccacttccgactacgaccgcgagaagctgcaagagcgcctggccaagctggccggcggtgttgccgtgatcaaggtaggcgctgccaccgaagtcgagatgaaagagaagaaagcccgcgtcgaagacgccctgcacgctacccgtgcagcggtggaagagggcgtggttcccggcggcggcgtagccctggttcgtgccctgcaagccatcgaaggcctgaagggtgacaacgaggagcagaacgtcggtatcgccctgctgcgtcgcgccgtcgaatcgccgctgcgccagatcgtggccaacgccggcgacgagccgagcgtagtggtcgacaaggtcaagcagggttccggcaactacggcttcaacgctgctaccggcgtgtacggcgacatgatcgagatgggcatcctggacccggccaaggtcactcgttccgctctgcaggctgcggcctccatcggcggtctgatgatcaccaccgaagccatggttgccgagatcgtggaagacaagccggccatgggcggcatgcctgacatgggcggcatgggcggcatgggcggcatgatgtaa

SEQ ID NO: 30459 - DNA, 636 bp, Pseudomonas aeruginosa
atggccctgaccatcgtgattggcaatcgcaatgactcgtcctggtcgctgcggggctggctggccctgcgcatgagcggggcggcgttcgacgagatcctcgtcccgctggggcggcccgatacccgggagcggatcctgcaatattcgccgaccggcaaggtgcccttgctgaaaagcgaggatggcgacatctgggattccctggccatcgccgagtacctcgccgagcgcttccccgaggcccacctgtggccgcgcggcgaggcggcgcgggcgctggcccgttcggtttgcgcggaaatgcacagcggtttcgccgcgttgcgcggcgagctgccgatggacctgcggcgccagcagccattggtggaattgtccgaggcgacacgacaggatattcaacgtatctgcgaagcctgggcggattgcctgcggcgcttcggccaggacggtccgttcctgttcggccacgccagcctggcggatgcgttctacgcaccggtggcggcgcgtttccgcagttatgcggtggagttgccggatatcgcccggacctatgtcgagacgatttatcagtggcctgcgttccgcgcctggtacgacgcggcattgcgcgagcaggccggtagttga

SEQ ID NO: 30460 - DNA, 2751 bp, Pseudomonas aeruginosa
atgtttgcgcctttgttgaagaaactctttggaagcaagaacgagcgtgatgtaaagcgcatggccaaggctgtacaggccatcaatgcgctcgagccccagatggtggcgctctccgacgagcagttgaaggcgaaaacggctgaattccagcagcgctacgccaagggcgaaacgctcgaccaattgctgcccgaagccttcgccgtggttcgcgaggctggcaagcgggtgatgggcatgcgccacttcgatgtccagctgatcggtggcatgaccctgcacgacggcaagatcgccgaaatgcgtaccggcgagggcaagaccctggtgggcaccctgccggtctacctcaacgcgctgtccggcaagggcgtgcacgtggtcacggtgaacgactacctggcgcgccgcgacgccaactggatgcgcccgctgtacgagttcctcggcctcagcgtcggcgtggtcactcccttccagccgccggaagacaagcgcgccgcctacgccgccgacatcacctacggcaccaacaacgaattcggcttcgattacctgcgcgacaacatggccttcagcctggacgacaagttccagcgcgagctgaacttcgccgtggtcgacgaagtggactcgatcctcatcgacgaggcgcgtaccccgctgatcatctccggccaggccgaagacagctccgagctgtacatcaagatcaacaagctgatcccgcgtctcaagcgccaggttgaagaggtcgagggcaagccgaccgaggaaggccactacagcatcgacgagaagacccgccaggtcgaactcaacgagcagggccaccagttcatcgaggacctgctgagccagaacggcctgctcggcgaaggcgagagcctctactcggcgcacaacctgagcctgctgacccacgtctacgcagcgctgcgcgcgcacaccctgttccaccgcaacgtcgagtacatcgtccagggcgaccagatcctcctgatcgacgagcacaccggccgcaccatgcctggccgacgcctgtccgagggcctgcaccaggccatcgaggcgaaggaaggcttgccgatccaggccgagagccagaccctggcctccaccaccttccagaactacttccgcctgtacaacaagctggccggcatgaccggcaccgccgataccgaggccttcgagttccgccagatctacggtctcgacgtggtggtgatcccgacccaccggccgatcgcgcgcaaggacttcaacgacctggtctacctgacccaggaagagaagtacgcggcgatcatcaccgacatcaagcagtgccaggccctcggccggccgatcctggtcggcaccgcgtcgatcgagagttccgagtacgtttccaagctgttgcaagaggcaggcatcgagcacaaggtgctcaacgccaagtaccacgagaaggaagccgagatcatcgcccaggctggcgcgcccggttcggtgaccatcgccaccaacatggccggccgcggtaccgacatcctcctcggcggcaactgggaagtcgaagtcgcggccctggagaaccccaccgaggagcagatcgcccagatcaaggccgaatggcagaagcgccaccagcaggtgatcgaggcgggcggcctgcacgtgatcgcctccgagcgccacgaatcccgccggatcgacaaccagttgcgcggccgtgccggtcgtcagggcgacccgggttccagccgcttctacctgtcgctggaagacaacctgatgcggatcttcgcctccgaccgggtgaagaacttcatgaaggcgctgggcatgcagtccggcgaggcgatcgagcaccgcatggtgaccaacgccatcgagaaggcccagcgcaaggtcgaagggcgcaacttcgacatccgcaagcaactgctggaattcgatgacgtagccaacgagcagcgcaaggtgatctaccacatgcgcaataccctgctgtcggcagaggacgtgggcgagaccatcaaggaattccgcgaggaaaccctcagcgccaccatcaaccagcacattccgccgcagtcgctgcccgagcagtgggacatcgaaggcctggaggctgcgctgtacagcgacttcgccgtgcgcctgccgatccagcagtggctggacgaagacgacaagctgtacgaggaaaccctgcgtagcaagatcctcgagcagatcgtcgccgcctactacgagaaggaagagctggccggcgccgaagccctgcgcgccttcgagaagcagatgctgctgcgggtactggacgacctgtggaaggaccacctgtcgaccatggaccacctgcggcacggcatccacctgcgtggctacgcgcagaagaatccgaagcaggaatacaagcgcgagtccttcaccctgttccaggagctgctggactcgatcaagcgcgacaccatccgcgtgctgtcccacgtccaggtccgtcgcgaagacccggccgaagaggaggcccgcctgcgtcgcgaggcggaggaactggccaagcgcatgcagttccagcacgccgaggctccctcgatggagcaggccgtggccggcgaggaagaagagcttcccgagggcccggctccggtcgtgccgctcgagcctgtgcgcaacgagcagaagatcggccgcaacgagccttgcccgtgcggttccggcaagaaatacaagcactgccacgggcagctggactaa

SEQ ID NO: 30461 - DNA, 924 bp, Pseudomonas aeruginosa
atgcacatcatttttctgagccggcaccatggggccgctcgctccgtccatctgcagccgcggttgctgatgctggccggggcctgcgtggtcggtgccagcctgttggccgggggcttcatgggcgcctggctgttccgcgcgccggctccggtggccggcatcgaagtcgatgccgcgctgcaggcgcagagcgccgagatcagcagcgcccgcgaggacgcgcagcggcagatggacgcactgagcgtgcatctcggcgaactgcaggcgcgcctggttcggctggatgccctcggcgaacgtctcaccgagctggccgacgtcgaccccgacgagttcgacttctccctgagcgtcggccagggtggcgtcgacgaaccgctggagggcagcgcctatgccccgccgtcgttcatggcgacgctggacgaactggcggcacgcctggatacccgcgagcagcagctcgaggtgctggagcaactgctcgccgacaagcacatcagccagtcgacctacctggccggccagccggtgcgccagggctacatctcctcgccgttcgggcgccgggtcaatccggtgagcggccgcctgagcatgcacaagggcatcgacttcgccgcgccggccggcagcgacgtggtggccgtggcggcgggggtggtgacctggtccgggcgcaagaacggctatggcaacgtggtcgaggtcgggcacgccgatggctacaccacgttgtatgcccataaccagaagaacctggtcgaggtcggtgacctggtcaagcgcggccaggtgctggccaaggtcggcagcaccggacgctccaccggctaccacgtacatttcgaagtgatgaaggatggccgggtaatgaatccgcaaagcttcatcgcacgcgcgtctgtttccgagtga

SEQ ID NO: 30462 - DNA, 912 bp, Pseudomonas aeruginosa
atgatcaaacaacgcaccttgaagaacatcatccgggctactggcgtcggtctgcactcgggggaaaaggtttacctgaccctgaaaccggcgccggtggacaccggtatcgtgttctgccgcaccgacctggatccggtcgtggaaatcccggcccgggccgagaacgtcggcgaaaccaccatgtcgaccaccctggtcaagggtgacgtcaaagtggatacggtggagcacctgctctcggccatggccggcctgggtatcgacaacgcctacgtcgagctgtccgcttcggaagtgccgatcatggatggcagcgctggtccgttcgtattcctgatccagtccgccggattgcaagagcaggaagctgccaagaagttcatccgcatcaagcgcgaagtcagcgtggaagagggcgacaagcgcgccgtcttcgttccgttcgacggcttcaaggtcagcttcgagatcgatttcgatcatccggtcttccgtggtcgcacccagcaggcctcggtcgatttctccagtacttccttcgtcaaggaggtcagccgcgcccgtaccttcgggttcatgcgcgacatcgagtacctgcgttcgcagaacctggcactcggcggtagcgtggagaacgcgatcgtggtcgacgagaaccgcgtgctcaacgaagacggcctgcgttacgaggacgagttcgtcaagcacaagatcctggatgccatcggcgacctgtatctgctcggcaacagtcttatcggcgagttccgtggcttcaagtccggccatgccctgaacaaccaactgctgcgtacgttgatcgcagacaaggatgcttgggaagtggtgaccttcgaagacgcgcgtaccgcgcctatttcctatatgcgcccggcggcggcagtgtag

SEQ ID NO: 30463 - DNA, 1185 bp, Pseudomonas aeruginosa
atgtttgaactggtcgataacatcgcacaaaccgccgtcataaaagtgatcggtgtaggtggtggtggcggcaacgccgtcaatcacatggccaagaacaacgtcgagggcgtcgagttcatctgcgccaacaccgacgcacaagcgctgaagaacatcgcggcgcgcaccgttctgcaactcggcccgggcgtcaccaaggggctgggtgccggcgccaatccggaagtcggtcgtcaggcggctctggaagatcgcgagcgcatttccgaagtgctggaaggcgccgacatggtcttcatcaccaccggcatgggtggcggcaccggtaccggcgccgcgccgatcatcgccgaagtggcgaaggaaatgggcatcctcaccgtcgcggtggtgacccgcccgttcccgttcgaaggtcgcaagcgcatgcagatcgccgacgagggcatccgcgcgctggccgagagcgtcgattcgctgatcaccatcccgaacgagaagctgctgaccatcctcggcaaggacgccagcctgctggccgccttcgccaaggccgatgacgtgctggccggtgccgtgcgcggtatctccgacatcatcaagcgtccgggcatgatcaacgtcgacttcgccgacgtgaagaccgtcatgagcgaaatgggcatggcgatgatgggtaccggctgcgccagcggtccgaaccgtgcccgcgaggccaccgaggcggcaatccgcaacccgctgctggaagacgtcaacctgcagggcgcgcgcggcatcctggtgaacatcaccgcgggtccggacctgtccctgggcgagtactccgatgtcggcaacatcatcgaacagttcgcttccgagcacgccactgtgaaggtgggcaccgtgatcgacgcggacatgcgcgatgagctgcacgtcaccgtagtcgccaccggcctgggcgcgcgcctggagaaaccggtgaaggtcgtcgacaacaccgtgcagggcagtgcagcccaggcagccgctccggcccagcgcgagcagcagtcggtgaactaccgcgacctcgaccgtcctaccgtgatgcgcaaccagtctcacggcagcgcggcgaccgcggccaagctgaacccgcaggatgacctggattacctggatatcccggcgttcctgcgtcgtcaggccgattga

SEQ ID NO: 30464 - DNA, 1254 bp, Pseudomonas aeruginosa
atggcaagcgtgcagagcggcaagatgatcgtcggcctcgacatcggtacctccaaggtggtggcgctggtgggcgaggtgacggccgatggccagctggaggtcgttggcatcggtactcatccgtcccgcggcctgaagaagggcgtggtggtgaacatcgagtccaccgtgcagtcgatccagcgcgccatcgacgaggcccagcagatggccggttgccgtatccactcggcgttcgtcggcatcgccggcaaccacatccgcagcctcaattcccacggcatcgtggcgatccgcgatcgcgaggtgaacccggcggatatcgaacgggtactggatgccgcccaggcggtggcgatcccagcggaccagcgggtgctgcataccctggcccaggattacgtgatcgataaccaggaaggcgtgcgcgagccgctgggcatgtccggggtgcgcctggaagccaaggtgcacgtggtgacctgcgcggtgaatgcttcgcagaacatcgagaagtgcgtgcgccgctgcggcctcgaggtcgacgacatcatcctcgagcagttggcctcggcctattcggtgctgaccgaggacgagaaggaactgggcgtgtgcctggtggatatcggcggcggcaccaccgatatcgcgatcttcaccgaaggcgcgatccgccataccgcggtgatcccgatcgccggcgaccaggtcaccaatgacatcgccatggccctgcgtacgccgacccagtacgcggaagagatcaagatccgctacgcctgcgccctggccaagctggccggtgccggcgagaccatcaaggtgcccagcgtcggcgaccggccgccgcgcgaactgtcgcgccaggccctggccgaagtggtcgagcctcgttacgacgagctgttcaccctggtccaggccgagctgcgccgcagcggctacgaggacctgatcccggcagggatcgtcctcaccggcggcacctcgaagatggaaggcgcggtcgagctggccgaggaaatcttccacatgccggtacgcctcggcgtgccgtatagcgtgaagggcctcaccgacgtggtgcgcaacccgatctattcgacgggcgtcggcctgctgatgtacggactgcagaagcagtccgatggaatgtcgatgtctgtgtcaggcagcagctacagcagcgacgaacccaaggcacctgtcctggagcggctcaaacgctgggtccagggcaatttctga

SEQ ID NO: 30465 - DNA, 864 bp, Pseudomonas aeruginosa
atgaatggcgtactgctccgtcatcagcaacccggtggactcggccgcgctccgcgcaagccgatgccgcgcggcgccagccgtctggtggccaaggaaccgctgagcgtgcgcctgccgaaagccgacttcagtttcctcaagtacctggcctggccgctgttgctggccgttctcggctatggcgcctatcgcggcgccgagtacatcctgccgtacgccgaccggccgatcgccaaggtcagtgtcgagggcgacctcagctacatcagccagcgcgcggtgcagcagcggatctccccgtacctggcggcgagcttcttcaccatcgacctggcgggcatgcgcgggcaactggaacagatgccctggatcgcccacgccgaggtgcgccgggtgtggccggaccaggtggtgatccgcctggacgagcaactgccgatcgcgcggtggggcgacgaagcgctgctgaacaaccagggacaggcttttacgccaaaggaactggcgaattatgaacatctgccccgcttgcatggtccacagcgggcgcaacagcaggtgatgcagcaataccagttgctcagccagttgctgcgtcccctcgggttctccatcgcccgcctggaaatgagcgatcgcggcggttgggcgctgaccacggcccagggcgtcgagatccagatcgggcgcgaccacgtggtagacaagattcgccgcttcgtaagcatctacgacaaggcactcaaagatcagatttcgaacattgcgcggatcgacctgcgttaccccaacggcctcgccgttgcgtggcgcgagccggtcacgcccgcgacggtggccacggccagcgccgtgcagtga

SEQ ID NO: 30466 - DNA, 1443 bp, Pseudomonas aeruginosa
gtggttaaagaaccgaatggcgtcacccggaccatgcgccgtatccgccgcatccatttcgtcggcatcggcggcgccggtatgtgcgggatcgccgaagtgctgctgaacctcggctacgaggtatccggctcggacctcaaggcctcggcggtgaccgagcgcctggagaagttcggcgcgcagatcttcatcggccaccaggcggaaaacgccgacggcgccgacgtgctggtggtgtccagtgccatcaaccgggccaacccggaagtggcatcggccctggaacggcggattccggtggtgccgcgtgcggagatgctcgccgagctgatgcgctaccggcacggcatcgcggtagccggcacccacggcaagaccaccactaccagcctgatcgcctcggtgttcgccgccggcggcctggacccgaccttcgtcatcggcggccggctgaacgccgccgggaccaacgcccagctcggcgccagccgctacctggtggccgaggccgacgagagcgacgccagcttcctgcacctgcaaccgatggtcgcggtggtcaccaatatcgacgccgaccacatggcgacctacggcggcgacttcaacaagctgaagaagaccttcgtcgagttcctccacaacctgccgttctacggactggcggtgatgtgcgtggatgatccggttgtgcgtgagatcctcccgcagatcgcccgcccgaccgtgacctacggcctcagcgaagacgccgacgtgcgcgcgatcaacatccgccaggaaggcatgcgcacctggttcaccgtgttgcgcccggagcgcgagccgctggacgtctcggtgaacatgcccggcctgcacaacgtgctgaattccctggcgaccatcgtcatcgctaccgacgagggcatctccgacgaagccatcgtccaggggctgtccggcttccagggcgtaggccggcgcttccaggtctacggcgagctgcaggtcgagggtggcagcgtgatgctggtggacgattacggccaccatccgcgcgaagtcgccgcggtgatcaaggcgatccgtggcggttggccggagcgtcgcctggtgatggtctaccagccgcatcgctatacccgtacccgcgacctgtacgaagacttcgtgcaggtgctgggcgaagccaacgtgctgctgttgatggaggtctatccggccggcgaagagccgatcccgggagccgacagccgccagctgtgccacagcatccgccagcgcggccagcttgacccgatctacttcgagcgcgacgccgacctggcgccgctggtcaagccgctgctgcgcgctggcgacatcctgctttgccagggcgctggcgatgtcggcggcctggccccgcaactgatcaagaacccgctgttcgccggcaagggagggaagggcgcatga

SEQ ID NO: 30467 - DNA, 1074 bp, Pseudomonas aeruginosa
atgaaaggtaatgtcctgatcatggcgggtggcaccggcggacacgtgttcccggcgctcgcctgtgcgcgggagttccaggcgcgcggctatgccgtgcactggctggggacgccgcgcggcatcgagaatgacctggtacccaaggccggcctgccgttgcacctgatccaggtcagcgggctgcgcggcaagggcctgaagtcgctggtcaaggcgccgctggaactgctcaagtcgctgttccaggcgctgcgggtgatccgccagctgaggccggtctgcgtgctcggcctgggtggctatgtcaccggcccgggcggcctggctgcgcgcctcaacggcgtgccgctggtgatccacgagcagaacgccgtggccggcaccgccaaccgcagcctggcgccgatcgccaggcgcgtctgcgaggcattcccggataccttcccggccagtgacaagcgtctgaccaccggcaatccggtgcgcggcgagctgttcctcgacgcgcacgcccgcgcgccgctgaccggccgtcgggtcaatctgctggtgctcggcggcagccttggcgcggaaccgctgaacaagctgttgccagaggccctggcgcaggtgccgctggaaatccgtccggcaatccgccatcaggccggtcgtcagcatgccgagattaccgccgagcgttatcgcacagtggcggtcgaagcggacgtcgcgcccttcatcagcgacatggccgcggcctatgcctgggccgacctggtgatctgtcgcgccggcgcgctgaccgtcagcgagctgacggcggcgggattgcccgccttcctggtgccgttgcctcacgcgatcgacgatcaccagacccgcaatgccgaattcctggtacgcagcggcgccggccgcctgctgccgcaaaagtctaccggcgcggccgaactggccgcgcagctgtccgaggtcctgatgcatcccgaaaccctgcgctccatggcagaccaggcacgcagcctggcgaaacccgaggctacccggacggtggtcgatgcctgcctggaggtggcccgtggttaa

SEQ ID NO: 30468 - DNA, 1347 bp, Pseudomonas aeruginosa
atgagcctgatcgcctccgaccacttccgcatcgttgtcggcctcggcaagagcggcatgtccctggtgcgctacctggcgcgccgcggcttgcctttcgccgtggtcgatacccgagagaacccgccggagctggccaccctgcgtgcccagtatccgcaggtggaagtgcgttgcggcgaactcgacgccgagttcctctgctccgcccgcgaactctatgtcagccccggcttgtcgctgcgcacccctgcgctggtacaggccgccgcgaaaggcgtgcgcatctccggtgacatcgatctcttcgcccgcgaggcgaaggccccgatcgtcgccatcaccggttccaacgcgaagagcaccgtgaccaccctggtgggcgaaatggcggtggccgcggacaagcgtgtcgccgtcggcggcaacctcggcaccccggcgctcgacctgctggccgacgacatcgagctgtacgtgttggagctgtcgagcttccagctggaaacctgcgatcgcctcaacgccgaggtggcgaccgtgctgaacgtcagcgaagaccatatggatcgctacgacggcatggctgactaccacctggccaagcaccggatcttccgcggtgcccgccaggtcgtggtgaatcgcgccgatgccctgacccgaccgctgatcgccgataccgtgccgtgctggtcgttcggcctgaacaagccggacttcaaggctttcggcctgatcgaggaagacggccagaagtggctggcgttccagttcgacaagctgctgccggttggcgaactgaagatccgtggcgcccacaactattccaacgcgctcgccgcgctggcgctgggccatgcggtcggcctgccgttcgacgccatgctcggcgcgctgaaggcgttttccggcctggctcatcgctgccagtgggtacgcgagcggcagggcgtgagctactacgacgattccaaggccaccaacgtcggcgccgccctggcggcgatcgaggggctgggtgccgacatcgacggcaagctggtgctgctcgccggcggagacggcaagggcgccgatttccatgacctgcgcgagccggtcgcgcgcttctgccgggcggtggtactgcttggccgtgacgccgggctgattgcccaggcactgggcaacgcggtaccgctggtgcgcgtcgcaacgctggacgaagcagtccggcaggccgccgagctggcccgcgaaggcgatgcggtgctgttgtcgccggcctgcgcgagcctggacatgttcaagaacttcgaagaacgcggacgcctgttcgccaaagccgtagaggagctagcgtga

SEQ ID NO: 30469 - DNA, 1083 bp, Pseudomonas aeruginosa
atgctcctgctgctggccgaatacctgcaacagttctacaagggcttcggcgtcttccagtacctgaccctgcgcggcattctcagcgtgctcaccgcgctgtcgctgtcgctgtggctggggccctggatgatccgtaccttgcagatccgccagatcggccaggccgtgcgcaacgacggtccgcagtcgcacctgtcgaagaagggcaccccgaccatgggcggcgccctgatccttaccgccatagccatcagcacgctgctgtgggcggatctttccaaccgctacgtgtgggtagtgctggtcgttaccctgctgttcggtgccatcggctgggtggacgactaccgcaaggtgatcgagaagaactcccgtggcctgccgagccgctggaagtacttctggcagtcggtgttcggcatcggcgccgccgtgttcctctacatgactgccgaaaccccgatcgagaccaccctgatcgtgccgatgctgaagagcgtcgagatccagttgggcatcttcttcgtggtcctgacctacttcgtcatcgtcggctcgagcaatgcggtgaacctcaccgacggtctcgacggcctggcgatcatgccgacggtaatggttgccggcgcgctgggcatcttctgctacctgtcgggcaacgtgaagttcgccgagtacctgctgattcccaacgtaccgggcgccggcgagctgatcgtgttctgcgccgcgctggtcggcgccggcctcggcttcctctggttcaacacctatccggcgcaggtcttcatgggcgacgtcggcgcgctggcgctgggcgccgcgctgggcaccatcgcggtgatcgtgcgccaggagatcgtgctgttcatcatgggtggggtgttcgtcatggaaaccctctcggtgatgatccaggtcgcttccttcaagctgaccggacgccgcgtcttccgtatggcgccgatccatcaccatttcgaactgaaaggctggccggagccgcgcgtgatcgtgcgcttctggatcatcaccgtgatcctggtgctgatcggcctcgccaccttgaagctgcgttga

SEQ ID NO: 30470 - DNA, 1377 bp, Pseudomonas aeruginosa
atgcttgagcctcttcgcctcagccagttgacggtcgcgctggacgcccgcctgatcggcgaggacgccgtcttttcggcggtttccaccgacagtcgcgccatcgggcccggccaactgttcattgccctgagtgggccgcgtttcgacggccacgactatctcgccgaggttgccgccaagggcgcggtggctgcgctggtggagcgcgaagtcgccgacgcgcccctgccgcaattgctggtgcgcgatacccgtgcggccctggggcgactgggcgcgctgaaccggcgcaagttcaccggcccgctggcggccatgacgggctccagcggcaagaccacggtcaaggagatgctcgccagcatcctgcgtacccaggccggcgatgccgagtcggtgctggctacccgtggcaatctgaacaacgacctcggcgtaccgctgaccctgctgcaactggcgccgcagcaccgtagcgcagtgatcgaactgggcgcctcgcgcatcggcgagatcgcctacacggtcgagctgacccgcccgcacgtggcgatcatcaccaatgccggaaccgcccatgtcggcgagttcggcggaccggagaagatcgtcgaggcgaagggcgagatactcgaagggctggccgccgacggcaccgccgtactgaacctggacgacaaggccttcgacacctggaaggcccgtgccagcggccgtccgttgctgactttctccctcgaccggccccaggccgatttccgcgccgccgatctgcagcgcgatgcgcgcggctgcatgggcttcaggctgcagggcgtagcgggtgaagcgcaggtccagctcaacctgctggggcggcacaatgtcgccaatgccctggctgccgccgctgccgcccatgcactgggcgtgccgctggatgggatcgtcgccgggctgcaggcgctgcagccggtcaagggccgcgcggtagcgcaactgaccgccagcgggctgcgtgtgatagacgacagctacaacgccaaccccgcgtcaatgctggcggcgattgatatactgagcggcttttccgggcgcaccgtcctggtcctcggagacatgggcgaactcggttcctgggccgagcaggcccaccgcgaggtgggcgcctacgccgctggcaaggtgtccgcgctctatgcggtcggaccgctgatggcccacgccgtacaggcgttcggcgccacgggccggcacttcgccgaccaggccagcctgatcggggcgctggccaccgaacaaccgacaaccaccattttgatcaagggttcccgcagtgcggcgatggacaaagtcgtcgcggcgctgtgcggttcctccgaggagagtcactaa

SEQ ID NO: 30471 - DNA, 1464 bp, Pseudomonas aeruginosa
atgcctatgagcctgaaccaactgtttccccaggccgagcgcgatctgctgatccgcgagctgaccctggatagccgcggcgttcgtccgggcgacctgttcctggcggtgccgggcgggcgccaggatggtcgtgcgcacatcgccgatgccctggccaagggcgcggctgccgtggcttacgaggcggaaggcgccggagagttgccgcccagcgatgcgccgctgatcgcggtgaaggggctggccgcgcaactgtcggcggtcgccgggcgtttctacggcgagccgagccgcgggctggacctgatcggcgtcaccggcaccaacggcaagaccagcgtcagccaactggtggcccaggccctggatctgctcggcgagcgctgcggcatcgtcggcaccctcggcaccggtttctacggcgccctggagagcggccggcacaccacgccggacccgctcgcggtgcaggccacgctggccacgctgaagcaggccggcgcccgcgcggtagcgatggaagtgtcttcccacggcctcgaccagggccgcgtggcggcgctcggtttcgatatcgcggtgttcaccaatctgtcccgcgaccacctcgactatcacggttcgatggaagcctatgccgccgccaaggccaagctgttcgcctggccgggcctgcgctgccgggtgatcaacctggacgacgatttcggccgtcgactggccggcgaggagcaggactcggagctgatcacctacagcctcaccgacagctcggcgttcctctattgccgcgaagcgcgcttcggcgacgccggcatcgaggcggcgctggtcactccgcacggcgagggcctgctgcgcagcccgttgctcggccgcttcaacctgagcaacctgctggcggcggtcggtgcgttgcttggcctgggttatcccctgggcgatatcctccgcactttgccgcaactgcaggggccggtcggccgcatgcagcgcctgggaggcggcgacaagccgctggtggtggtggactacgcgcatactcccgacgccctggaaaaagtcctggaggccctgcgtccgcacgcggccgcgcgcctgctgtgcctgttcggctgcggtggcgatcgcgatgccggcaagcgtccgctgatggctgcgatcgccgaacgcctggcggatgaggtgctggtcaccgacgacaacccgcgcaccgaggccagtgcggcgatcatcgccgatatccgcaaaggcttcgctgccgctgacaaggttaccttcctgccgtcgcgcggtgaggcgatcgcccatctgatcgcttccgctgcggtggatgacgtggtgctcctggccggcaagggtcacgaggattatcaggagatcgacggcgtacgccatccgttctccgacatcgagcaggccgagcgcgccctggccgcctgggaggtgccgcatgcttga

SEQ ID NO: 30472 - DNA, 1740 bp, Pseudomonas aeruginosa
atgaaactgaattatttccagggcgccctctacccatggcggttctgcgtgatcgtcggcctgctgctggcgatggtcggcgccatcgtctggcgaatcgtcgacctgcacgtgatcgaccatgacttcctcaagggccagggcgacgcgcgtagcgtgcggcatatcgccatccctgcgcaccggggcctgatcactgaccgcaacggcgaaccgctggcggtgagcaccccggtcaccaccctgtgggccaaccccaaggagctgatgaccgccaaggaacgctggccgcaactggcggcggcgctcgggcaggataccaagctgttcgccgaccgcatcgagcagaacgccgagcgcgagttcatctatctggtccgtgggctgaccccggagcagggcgaaggcgtgatcgccctgaaggtgcccggcgtgtactccatcgaggagtttcggcgtttctacccggctggcgaagtggtggcccatgcggtcggctttaccgatgtcgacgaccgcggtcgcgaaggtatcgagctggctttcgacgaatggctggccggcgtgccgggcaagcgccaggtgctcaaggatcgccgtggccgcgtgatcaaggacgtgcaggtcaccaagaatgccaaaccgggcaagacccttgcgctgtccatcgacctgcgcctgcagtacctggctcatcgcgaactgcgcaacgctctgctggaaaacggcgccaaggccggcagcttggtgatcatggacgtgaagaccggggagatcctggccatgaccaaccagcccacctacaacccgaacaatcgtcgtaacctgcagccggcggccatgcgcaaccgggcgatgatcgacgtgttcgagccgggctcgacggtcaagccgttctcgatgagcgcggcgctggccagcgggcgctggaaacccagcgatatcgtcgacgtctacccgggcaccctgcagatcggccgctacaccattcgcgacgtatcgcgcaattcgcggcaactcgatctcaccggcatcctgatcaagtcgagcaacgtcggcatcagcaagatcgccttcgacatcggcgccgaatccatctactcggtcatgcaacaggtcggtctcgggcaggacacggggttgggcttccccggcgagcgcgtcggcaacctgcccaaccaccgcaagtggccgaaggcggaaaccgcgaccctggcctacggctacggtctctcggtaaccgcgatccagttggcgcatgcctatgcggccctggccaacgacggcaagagcgtgccgctgagcatgacccgagtcgaccgcgtgccggatggtgtgcaggtgatctcgcctgaagtggcttccaccgtgcagggcatgctgcaacaagtggtcgaggcccagggcggggtgttccgcgcccaggtgccgggttaccacgccgccggcaagagcgggaccgcgcgcaaggtctcggtcggcaccaagggctaccgggaaaacgcctatcgctcgctgttcgccggtttcgccccggccaccgatccgcgcatcgcgatggtcgtggtgatcgacgagccgagcaaggcgggctacttcggcggcctggtgtcggcgccggtgttcagtaaggtcatggctggcgcgctgcgcctgatgaacgtgccgccggataacctgccgacggccaccgaacagcagcaggtcaatgctgcgcccgcaaaaggagggcgtggctga

SEQ ID NO: 30473 - DNA, 942 bp, Pseudomonas aeruginosa
atgaatgccacctaccgccatatcaccgttctgctcgaggaggccgtttccgcactggccccgcgggaggacggctgctatctggacggtaccttcggaagagggggccatagtcgagccttgctcgagaaactgggcgccgggggacgcctgctcggattcgacaaagatccccaggccatccagacaggaaaagcattggcggccgaagacggccgcttcgtcattgtgcagcgctcgttcgccgaactgggcgatgaggtgcgcgcacgcggtctcgaagggcgggtcgatggcgtcctgctcgaccttggcgtgtcgtcgccgcaactcgacgatcccgagcgcggcttcagcttcctcaacgatggtccgctggacatgcgcatgaatcccggccagggcatcagcgcagcggagttcatcgccaacgccaccgaagaggaaatcgcccgggtcttcaaggaatatggcgaagagcgcttcgccaagcggatggcccgcgccatcgtgcagcgccgtcaggagcggccgttcgaacgaactgccgatctcgccgaagtgatcacggttgccaaccccgcctgggagaagggcaagaatccggcgacccgcgcattccagggcctgcgcatccatgtgaacaatgagctgggcgatctcgagcgtggccttgacgccgcgctcgaatcgctggccgtcggtggccggctggtggtgatcagtttccattccctggaagaccgcatcgtcaagctgttcatgcgcaagcacgccaagggcgaggcggacaacctgccgcgcgacctgccgatccgttccaaggtcttcgagccgcgcctgaagctgctgggcaagccgcagtacgcttcggaagaagaactcaaggccaacccgcgctcgcgcagcgcggtcatgcgcgtggcggagaagctgagatga

SEQ ID NO: 30474 - DNA, 456 bp, Pseudomonas aeruginosa
gtgtttcgcggagctaatgccataagtctcgacgccaaagggcgcctcgcgatgccgagtcggtatcgtgacgagctcgtttcgcgttgtgccggccagctcatcgtcactatcgacgcagtcgacccctgcctcaccgtttaccccttgcccgaatgggaactgatcgaagccaagctgcgcgagctgccttctttgcgagaagaaacgcggcgcctgcagcggctgctgatcggtaatgccgtcgatctggaactggacggaaacgggcgtttcctgattccgccgcgcctgcgcgagtacgccaagctggacaagcgggcgatgctggtggggcaactgaacaagtttcagttgtgggatgaggatgcctggaacgccatggctgaagccgacctggcggcaatcaaacaacccggtgggctgccggacgaactacgcgacctgatcctttga

SEQ ID NO: 30475 - DNA, 849 bp, Pseudomonas aeruginosa
gtgtcagcaggcactctgttcgtagtggcgaccccgatcggcaatctcgacgacatcagcccgcgcgccctgcgggtgctgcgggaggtggccctggtggctgcggaggatacccgccattcgatccggctgttccagcacttcggcatcgagacgccattggcggcctgccacgagcacaacgagcgcgaggagggcgggcgcttcatctcccggctgcagggtggggaggacgtcgcgctgatctcggacgccggtaccccgctgatttccgatcccggcttccacctggtgcgccaggcacaggcgctgggtatccgggtggtcccggtgccgggctcctgcgcgctgatcgcggcgctgtcggcggcgggattgccgtcggaccggttcatcttcgaaggtttcctgcccgccaaggctgcgggacgacgcagccgcctccaggcggtacaggaagagccgcgcacgctgattttctacgaggcgccccatcgtctgctggaaagcctggcggacatgcgcgacgtgttcggcggggagcgccgtgcggtgctggcgcgggagctgagcaagaccttcgagaccattcgcagcctgccgttggccgaactgcacgattgggtcgcgtcggacagcaaccagcagcgcggcgagtgcgttgtgctggtggcggggtggcaggcgccggaaggcgaggagtcgatcggtgcggaggcgctcagggtgctcgacctgctgcttgccgagctgccgttgaagaaagccgcggcgctggcggcggaaattaccggggtgcgaaaaaaccttttgtatcaacaggctttgcaacgccaagggaagagttga

SEQ ID NO: 30476 - DNA, 618 bp, Pseudomonas aeruginosa
atggcttcaatcaacaagctgacctgctattccgaccctgccgatcattactgccatcgcatccgcctggtcctggccgagaagaatgtggcggtagaggtgatcgatatcgaggcgggccgctgtccgccgatgctggcggaggtcaacccctacggcagcgtaccgaccctggtcgatcgcgacctggcgctgtacgagccgacggtggtcatggaatacctcgacgaacgctatccgcatccgccgctgctgcccgattatccggtgaagcgtgccaacagccgcctgttgatccatcgtatccagcgggactggtgttccctggtggaccggatcctggatgcgcgcagcaaggaggccgagcgggtccaggcgcgcaaggagttgcgcgagagcctgaccggggtttccccgctgttcgccgacaaggcatatttcctcagcgaggatttcagcctggtggattgctgcctgttgccgatcctctggcgtctgccgttgctgggcatcgagttgccgcggcaggccaagccgttgctcgactacatggagcgcggattcgcccgggaaagcttccgggccagcctgtcttccgttgaacgagatatgcgttaa

SEQ ID NO: 30477 - DNA, 393 bp, Pseudomonas aeruginosa
atgtcggcgactcaaaattacggcactggccgtcgtaagaccgctaccgctcgcgtcttcctgcgtccgggtactggcaagatttccatcaacaaccgtggtctcgatcagttcttcggtcgtgaaaccgctcgcatggtcgtgcgtcagccgctcgagctgaccgagaccgtcgagaagttcgacatcttcgttaccgtcgttggcggtggcgtaagcggtcaggccggtgcgatccgtcacggcatcacccgtgccctgatcgagtacgacgaaaccctgcgtagctcgctgcgcaaggccggctacgtgactcgcgatgcccgtgaagtcgagcgtaagaaagtcggtctgcgtaaagcgcgtaagcgtccgcagtactccaagcgttaa

SEQ ID NO: 30478 - DNA, 1347 bp, Pseudomonas aeruginosa
atgactactcgtatcctgaccggcatcactcctaccggcactccgcacctgggcaactacgccggcgccatccgcccggcgatcctcgccagccgtcggagcgacgtggattcgttctacttcctggcggactaccacgccttgatcaagtgcgacgatcccgctcgtatccagcgctcgcgcctggaaatcgccgcgacctggctggccggcggcctggacgtcgagcgtgcgaccttctaccggcagtcggacatccccgagattcccgagctgacctggttgctcacctgcgtcagtgccaagggcctgctcaaccgcgcgcatgcctacaaggccgcggtggaccgcaatgtcgaggccggcgaagacccggacgccggcgtgaccatgggcctctacagctatccggtgctgatggccgcggacatcctgatgttcaacgcgcacaagattccggtcggccgcgaccaggtgcagcacgtggagatggcccgcgacatcggccagcgtttcaaccacctgttcggcaacggccgcgagttcttcgtcctgcccgaagcggtgatcgaggaaaacgtcgccaccctgccgggcctggacgggcgcaagatgtccaagagctacgacaacaccatcccgctgttcagcccgtccaggcagctcaaggacgccatcgcacgcatcgtcaccgactcgcgcgcgccgggcgagccgaaagacccggacagttcgcacctgttccttctttactcggccttcgccagcgccgaacaggtcgccgcgttccgccaggaactgctcgaaggcctggcctggggcgaagccaagcagcgcctgttccagttgctcgacaacgaactgggcgaggctcgcgagcgttaccaggcgctgatcgccaagccggacgatatcgaggacattctcctcgcaggtgccgccaaggcgcgccgcatcgccaccccattcatcgccgagttgcgcgaggcagtcggcctgcgctccctgcgcgagccgctgaaaagtgccgagagcggcaagaagaaggccgccaaggctgcgcgcctggtcagcttccgcgacgacgacggcagcttccgcttccgcctgctggacgccgccggcgaacagctactgctgtcccgcgccttcgccgacggcaaggccgccggtgcggtgagcaagcgcctgctggctggcgagactgccgacctgcgggccgagggcaatgcctttggcctgtggctggatggcgaggcggtggcgcagagcccggccttcgccgacgccgccgcccgtgacgccgccatcgagcgcacccgcgaagcgctggcaccgcaggagtag

SEQ ID NO: 30479 - DNA, 447 bp, Pseudomonas aeruginosa
gtggaacagtcgctcaccgcctggctgctgccggccctcgccctggtcgccggggtcgccatcggttttctgatcgcccgcctgctgcccaacgccgcgccgaacaaggtgcaacgccagatggacgacctgcaggaccgcttcgacagctatcagcgcgaagtcgtgacccatttcaacaccaccgccagcctcgtgaagaagctgacccagagctaccaggacgtgcaggagcacctctccgacggcgcccagcgcctggccctggacgaacagacccgccagcgcctgctggctgcgctgcatgccgacgaggcctatccggccgagcgccgcgagcgcctgactccgccggcctccggcgaagtgccgaaggactatgcgccgaaaagcccggacagccccggcaccctcgacgccacctacggcctgaaaggcaagtactga

SEQ ID NO: 30480 - DNA, 1104 bp, Pseudomonas aeruginosa
atgcgccgtaccgccctcgccctgcccctgttccttctggtctcagcatgcagcagcgaaccgacgccaccaccgaaacccgccgccaaaccccaggcccgcaccgtcatttcaccccgccccgtacgccagtcggtgcaaccgatactgccgctgcgcggcgattacgcgaacaatccggcggcacagcacttcatcgacaggatggtcagccagcacggcttcaaccgccagcaactgcacgatctgttcgcccagacccagcgcctggactgggtgatccgcctgatggaccggcaagccccgacctataccccacccagcggaccgaacggcgcctggctgcgctaccggaagaagttcgtcacgccaggcaacgtacagaacggcgtgctgttctgggaccaatacgaaaccgacctgcaacgggcatcgcgcgtctacggcgtgccgccggagatcatcgtcggcatcatcggcgtggaaacccgctgggggcgtgtgatgggcaagacgcggatcatcgatgcgctgtccaccctgtccttctcctaccctcgccgcgcggaattcttcagcggcgaactggagcaattcctcctccaggcgcgcaaggaaggcaccgacccgctggccctgcgcggttcctatgccggcgccatgggctacggccagttcatgccgtcttcattcaccaagtacgcggtggacttcgatggcgatgggcatatcgacctgtggaatccgcgtgacgccatcggcagcgtcgccaactatttcaagcagcacggctgggtcagcggcgatcgcgtggcggttcccgccagtggccgggctccctcgctggaagatggcttcaagacgctgtacccgctggacgtgctcgcttccgccggattacgcccgcagggtccgctcggcggccaccggcaagccagcctgctgcgcctggacatgggcaggaactaccagtactggtacggcctgccgaacttctacgtgatcacccgctataaccacagcacccactacgcgatggccgtctgggaactgggcaaggaagtcgaccgggtgcgtcaccgctccgtcgtcaggcaggattag

SEQ ID NO: 30481 - DNA, 636 bp, Pseudomonas aeruginosa
atgctgaccatcgccttgtccaagggccggattctcgacgataccctgccgctgctcgcagcggcgggcatcgtaccgtcggagaacccggacaagagccgcaagctgatcatcccgacgtccctgtccgatgtgcgcctgctcatcgtgcgcgccaccgacgtgccgacctatgtcgagcatggcgccgccgatctcggcgtggccggcaaggacgtgctgatggagtacggcggccagggactctacgaaccgctggacctgcgtatcgccaactgcaagctgatgaccgccggcgccattggcgcgcctgaacccaagggacgcctgcgggtggccaccaagttcgtcaatgtcgccaagcgctactacgccgagcagggccgccaggtcgacgtgatcaagctgtacggctcgatggagctggcgccgctggtcggtctcgccgacaagatcattgacgtcgtggataccggcaataccctgcgcgccaacggcctggagccccaggaactgatcgccacgatcagctcgcgcctggtggtcaacaaggcctcgatgaagatgcagcacggtcgcatccagtcgctgatcgataccctgcgcgacgccgtcgaggcgcgacaccgtcactga

SEQ ID NO: 30482 - DNA, 1266 bp, Pseudomonas aeruginosa
atggataaactgattattaccggcggtaaccgcctcgatggcgaaatccgcatttccggcgcgaagaactcggcgctgccgatcctggccgcgaccctgctggccgatactccggtcaccgtctgcaacctgccgcacctgcacgacattaccaccatgatcgaactgttcggccgcatgggcgtgcagccgatcatcgacgagaagctcaacgtcgaagtcgatgccagcagcatcaaaaccctggtcgcgccgtacgaactggtgaagaccatgcgtgcctcgatcctggtgctgggcccgatgctggcgcgcttcggcgaggccgaagtggccctgccgggcggttgcgcgatcggttcgcgtccggtcgacctgcatatccgcggtctcgaggccatgggcgcgcagatcgaggtcgaaggcggctacatcaaggccaaggcgccggccggcggcctgcgtggcggtcacttcttcttcgataccgtcagcgtgaccggcaccgagaacctgatgatggccgccgcgctggccaacggccgtaccgtgctgcagaacgccgctcgcgagccggaggtggtcgacctggccaactgcctgaacgccatgggcgccaacgtccagggcgctggctccgataccatcgtcatcgaaggcgtgaagcgcctcggcggtgctcgctacgacgtactgcccgaccgtatcgagaccggcacctacctggtggccgcggccgcgaccggtggccgggtgaagctgaaggataccgacccgaccatcctcgaggcggtcctgcagaagctggaagaggccggtgcccacatcagcaccggcagcaactggatcgagctggacatgaagggcaaccggccgaaggcggtcaacgtgcgtaccgcgccgtacccggcgttccccaccgacatgcaggcccagttcatctccatgaacgcggtagccgaaggcaccggcgcggtcatcgagacggtcttcgagaaccgcttcatgcatgtttacgaaatgaaccgcatgggcgcgcaaatcctcgtcgaaggcaacaccgccatcgtcaccggcgtacccaagctcaagggcgctccggtcatggcgaccgacctgcgcgcatccgcgagcctggtgatcgccggcctggtggccgaaggcgacaccctgatcgatcgcatctaccacatcgaccgtggctacgagtgcatcgaagagaaactccagctgctcggcgccaagatccgccgcgtaccgggctag

SEQ ID NO: 30483 - DNA, 981 bp, Pseudomonas aeruginosa
ttgaacatgagccagaacctcgatttcatccattccgcccagcgcaccatcggcctcgagcgcgacgcggtagacagcctgctggcgcggattggcgacgatttcgtcaaggcctgcgaactgctgctggccggcaagggccgggtcgtcgtcgtcggcatgggcaaatccggccacgtcggcaaaaagatcgccgctaccctggccagcaccggcaccccctccttcttcgtgcatccggccgaggccagccatggcgacatgggcatgatcaccaaggacgacgtggtcctcgccctgtccaactccggctcgactgccgaaatcgtcaccctgttgcctctgatcaagcgcctgggcatcaccctgatcagcatgaccggtaaccccgagtcgcccctggccaaggctgcggaagtgaacctggacgccagtgtcggccaggaagcctgcccactgaacctggccccgacctcctccaccaccgtaaccctggtcctcggcgacgccctggcgatcgccctgctcgaagcccgcggctttaccgcggaagacttcgccttctcgcacccgggcggtgcgctgggccgccgactgctgctgaaggtggaagacgtcatgcacgtcggcgaagggctgccgcaggtgctgctcggcacctcgctgaccggcgcgctgatggaaatgacccgcaagggcctgggcatgaccgtagtgctcgacgaacatggcaagcttgccggcattttcaccgatggcgacctgcgtcgcgccctggatcggggcatcgacgtccgccaggtcaccatcgaccaggtgatgaccgtccacggcaagaccgtccgcgccgagatcctcgccgcggaagccctgaagatcatggaagacaacaagatcggcgcactggtggtggtcgacgcggacgaccgtccggtcggcgccctgaacatgcacgacctgttgcgcgcaggagtgatgtaa

SEQ ID NO: 30484 - DNA, 861 bp, Pseudomonas aeruginosa
atgcgcctgatcatcgtcagcggccgctcgggctcgggcaagagcaccgccctgaacgtcctcgaagacaacggcttctattgcatcgacaaccttcccgccagcctgcttcccgacctggcgcagcgcgccctgttgcacacggagctactgcagccacaggtggcggtgtcgatcgacgcccgcaacctgcccagccagttgcagcgcttccccgaactgttgcaggaagtgcgggacaaccacatcaactgcgatgtgctgtatctcgacgccgacgacgagacgctgctcaaacgattctcggaaacccgccggcgccacccgctgaccaccgacacccgttcgctggcggaggcgattggcgacgagagccaattgctcggaccgatcgccgacctcgccgacctgaagctggacaccaccagcctcaacctctatcagttgcgcgacaccatcaaactgcgcctgttgaacaagccggaacccggcaccgcgttcctcgtcgaatcctttggcttcaagcgcggcatgccagtcgacgccgacctggtgttcgatgtgcgctgcctgccgaacccctactggaagcccgagttgcgcgatcattcggggctggagccggaagtccgcgagtatctggccgcccagccggacgtcgaggaaatgtaccaggacatcgtcggctacctgaacaaatggttgccgcgcttcgccgccagtaaccgctcatatgtaacagttgcgataggctgtaccggcgggcaccatcgttcggtctacctcgccgagcggattggcgctgcactcagggattccctgaagaacgtgcagattcgccaccgcgatctcagcagctag

SEQ ID NO: 30485 - DNA, 3831 bp, Pseudomonas aeruginosa
atggcggatgtgggaagcctcggaacgcgactgctacggatcgtcctgggtctgtgcgccctggtactggtgctgctggcgctgtacgtcagccttggccggcaactggtgccgctggtggccgaataccgccagcagctggaggacgaagctggcaagcaactcggcataccggtgcggattgccgaactgacgggctcctggcgcggcttcgagcctctggtggtagcgcgcgacattcaggtcggcgacggcgaacagagtctgcgcctggcgcgggtgcggctggcgccggacctgctcggcagcctgctggcgcgccaggtgcggatcggcagcctggagctggagggactcaagctgaccctgcgcgaaggtgaggatggccagtggagcctggatggcctgccgcacagcgacaagcccagcgatccccggaaactcctgcaattcctgctgcagacccaacgcatctcgctgctggacagtcaactggaggtggcgccgcggggaagcgcagcgctgtcgctcagcgcggtcggcgcgaccctgcgcagttcatcggtcggtgggcagagtctcgatgcccgcctgcaactgccggatggccaacccctggcgctgcacgccgaagggcggatcgacagcgaggactggccgcgcagcagcgccaggttctatctcagcctgccgcagagcgactgggcgcaatggttgccggccggtctgacccaggaatggacgatcgtccgggccaaggccggcggcgacttctggttcgactggcgcgacggcaaggcgcaacggctggtggcacggctgctggcgccgcagttgaaggcctcgtatgccgcgcgcaagccggtggaaatcaacgacctgggcatgaacctgttcttcgatcgcgaagcgcagggctggaaggttcgggtcggcgacctggcggcgaatttcggcgagcagcgctggggcgaggtggagttgctgttgcgtcgcgaccagcagaacaacgagccacactggaagctgcaggccgaccgcgtcgacctgacgcccctggtgccggcgatagaagcgctggcgccgctgccggacgcggcggcggagtgggtggcgggcctgaagccgaagggcatcctgcacaacctgaacgccgatttctggccgcagcgagaggtgcccgagcgggtcagctacgcgaccaacctggaaaaggtcggtatctcggcgttccatgaggttccggcagtggaaaatgtcagcggcaccttgaccggcaccctggccggaggccagctcgacgcatcggcgcaggatttcatgctgcacctggccaaggtgtttcccgagccgtggcgctaccgcgaggctcgcacgcggatgttctggagcctggacgaccgcgccttcaccctcggcagccacctgatgcgggtcgagggcgaggagggcagcctggccggcgacatgctgatccgcctgatgcgcgatcccggcgctgaagactacatggacctgcaggtcggcctcagcgacggcgacgcgcgcttcaccgccaagtacctgccgacccagttgccaggaatgaacaaaagcctggcgaactggttgaagacggcgatccgcagtggccatgtcgagcagggctacttccagtggcagggctcgctgaaccgcggcgcggcggccgaagcccacgtcatgaacctgtacttcaaggttcgcgacggcgagctggcctaccagcccggctggcccgccctgagcaaaacggtcggcgaggtgttcgtcgaggattccggagtccgcgtgctggcctccagcgggaatctgctgaattcccgggtcagcgacgtcaaggtcgacattcccctcggccgtccgggacagacgccgcacctgtatgtggatggggccgtcgacagtaacctgaaggacggcatcaagctgctccaggaagcgccgatcccgacccgcaagatcttcgccggctgggagggcgatgggcccttgcagggccacctgacgctggatattccgctggaccacgacgaggccggcaagaccggggtggtcgtggatttctccaccgtgggcgcgaccctgaagatgcccagtccgaagctggatatgagcgaagtgaagggcgacttccgtttcgacctggccaagggcctgagcgccccggcggtgcaggcccgggtgctgggcagcgaggtacgcgggcggatcgtcgccgaggggcgcggcgatgcgcgcacgcgcttgctgctcaacggccaggtggcggtcaagtcgctgagcgactggctcggcgctggccagcgtccgttgccggtctcgggacgcctgccgttccagctcaacctgctgctggatggcaaggacagccaattgcagatcgattcggatctcaagggcgccgtcgtcgacctgccggcgccgttcggcaagacggccgcccaggcgcggccgacccaatggcggatgaccctggatggcgccgaacgacgttactgggcgcgttacgacggcctcgccagcctggcctatgcggccccggcggacaagccgctgaacggacgcggcgccctgcgcctgggcggtgacccggcgttgctgccctcggcacaggggctgcgggtgcgcgggcgtctggcggaactggactgggacgcctggcaggccaccctgaagcgctacggcaacggcgaccaggccgccagtagcgctgcgggcctgctgcgcggcgccgacctgcgcatcgacagcttcaagggcttcggccaggagctgaagaacctgaccgtcgacctggcccgccaggagcgggcctggcaactggtgctggtcagcgacctcgcatcggggcgcctggtcctgccggatgccaggggcgcgccgatcgtggtcgatctggaccgcctgaacctgccgaagtcgacccttcccgacgagaacaaggtggaggactcggacccgctggccgccgtcgatccgcgcagcctgccggcggtagacgtgaagatcggccaggtcgccctcggcggccagccgctgggcgcctggagcctgaaggtacggccgggcagcaacggcgtggcgttcaacgacctggacctcgacctgcgtggcctgcacgtcaacggcagcctgcgttgggacggcagtccgggcaatacccgcagcacctatcagggccggatcgagggcaagaacctggcggatgtgctcaaggcctggaatttcgcgccgagtgccaccagcgaacgtttccgcatggatatcaacggccagtggccgggatcgccggcctacatggccctgaagcgcttcagcggcagcatggatgcatcgctgcgcaaggggcagttcgtcgaggtcgaaggcagcgcccaggcgctgcgagtgtttggcctgctcaatttcaacgcgatcaaccgccggctgcgcctggatttctcggacatcctcggcaagggactgagctatgaccgggtgaagggggttctctccgccaccgacggcgtctacgtcacccgcgagccgctgaagctggaaggaccgtcgagcaacctggagttgaacggtaccctggacctggctcacgatcggatcgacgccaagctgctggtgaccttgccattgaccaacaacctgaccctggcggcactgatagttggcggtccggcggtcggcggcgcggtcttcgtcgtcgacaagttgctcggcgaccgggtctcgcgcttcgccagcgtgcaatacagcgtcaagggcccctggcaggatccgaagatcagcttcgacaagccattcgagaagccccgctga

SEQ ID NO: 30486 - DNA, 1038 bp, Pseudomonas aeruginosa
atgttcaaaaaattgcgtggcatgttttccagcgatctgtcgatcgacctgggtactgccaatacccttatttatgtgcgcgagcgcggcatcgtcctgaacgaaccgtccgtggtcgccattcgcagccatggcagccagaagagcgtcgtcgccgtgggcaccgaggccaagcgcatgctcggccgtaccccgggcaacatcgccgccatccgtccgatgaaagacggcgtgatcgcggatttcagcgtctgcgagaagatgctgcagtacttcatcaacaaggtccacgagaacagcttcctgcagcccagcccacgcgtgctgatctgcgtgccgtgcaagtccacccaggttgagcgccgggccatccgcgaatccgccctgggcgccggcgcccgcgaggtgttcctgatcgaagagccgatggctgccgccatcggcgccggcctgccggtcgaggaggcccgcggctcgatggtcgtagacatcggcggcggcactaccgagatcgccctgatttccctcaacggtgttgtctacgccgaatccgtccgcgtcggcggcgaccgcttcgacgaagccatcgtcacctacgtgcgccgcaactacggcagcctgatcggcgaatccaccgccgagcgcatcaagcaggagatcggcaccgccttcccgggcggcgacgttcgcgaagtcgacgtccgcggccgcaacctggccgaaggcgtaccgcgcagcttcaccctgaactccaacgaggtcctcgaggccctgcaggagtccctggcgaccatcgtccaggcggtcaagagcgccctcgagcaatcgccgccggagctggcctcggatatcgccgagcgcggcctggtgctgaccggcggtggcgcgctgctgcgcgacctggacaagctgctggcacaggaaaccggcctgccggtgatcgtcgccgaggagccgctgacctgcgtggctcgcggcggtggccgtgcgctggagatgatggaccgccactccatggacctgctctccaccgagtaa

SEQ ID NO: 30487 - DNA, 291 bp, Pseudomonas aeruginosa
atggcgcttgaacgctccgacgtggaaaaaatcgcccatctcgcccgcctgggcctgagcgaggccgatcttccgcgcaccaccgagaccctgaacaacatcctcggcctgatcgaccagatgcaggcggtcgacaccagcggcgtcgaaccgctcgcccatccgctggaagccacccagcgcctgcgcccggacgcggtcaccgagaccgatcaccgcgacgcctaccagaccatcgcccccgccgtggaagaaggtctgtacctggttccgaaagtcatcgagtcataa

SEQ ID NO: 30488 - DNA, 1455 bp, Pseudomonas aeruginosa
atgctgcatcaattgaccctcgccgagatcgcccgcgccctcgccgacaagcaattttccgccgaagagctgacccgcaccctgctcggtcgcatccggcagctggatccccagctcaacagtttcatcagcatcaccgacgacctggccatcgcccaggccaaggcagccgacgaacggcgcgccaacggcgagaacggcgccctgctcggcgcgccgatcgcccacaaggacctgttctgcacccagggcgtacgcaccagctgcggttcgaagatgctcgacaacttcgtctcgccctacgacgccaccgtggtcgagaagctcaccgccgccggcgccgttaccctcggcaagctgaacatggatgaattcgccatgggctcgtcgaaccagtccagccactacggcgcggtgaagaacccctggagcctcgaccgcgtgccgggcggctcctccggcggttccgccgcggcagtcgccgcgcgcctgctgccggccgccaccggcaccgataccggcggctcgatccgccaaccggcggcgctgaccaacctcaccgggatcaagccaacctacggccgggtttcccgctggggcatgatcgcctacgcttccagcctcgaccagggcggcccgctggcgcgcaccgccgaggactgcgcgctgatgctgggggtgatggccggattcgatccgaaggactcgaccagcgtcgaacagccggtggacgactacctggccgccctgcagaagccgctgagcggcctgcgcatcggcctgccgcgggaatacttcggcgccggcctcgacagccgcatcgccgacgcggtgctggccgtggtcgaggagctgaagacgctcggcgccacggtgaaggacatttccctgccgaacatgcagcacgccatcccggcctactacgtaatcgcgccggccgaggcgtcctccaacctgtcgcgcttcgacggcgtgcgctatggctatcgttgcgacgccccgcagaacctggaagacctgtacaagcgctcgcgcgcggaaggcttcggcagcgaagtgaagaaccgcatcatggtcggcacctacgcactctcggccggctactacgatgcctattacctgcaggctcagaagattcgccggctgatcaagaacgacttcgtcagcgcctttgccgaagtggacgtgatcctcggcccgaccacgccgaacccggcctggaagatcggcgagaagaacgacgacccggtttcccagtacctggaagacatctacaccatcaccgccaacctcgccggcctgccggggctgtccatgcccgccggcttcgtcgacggcctgccggtgggtgtccagttgctcgcgccctacttccaggaaggccgcctgctcaacgtcgcgcaccagtaccagcaggtcagcgactggcacacccgcaccccggccggcttctaa

SEQ ID NO: 30489 - DNA, 1446 bp, Pseudomonas aeruginosa
atgcaatgggaaaccgtgatcgggctggaaatccacgcacagctcgccacccaatcgaagatcttctccggcagctcgaccgccttcggcgccgcgccgaatacccaagccagcctggtcgacctggccatgccgggcaccctgccggtgctcaacgaggaggccgtacgcatggcctgcctgttcggcctggcgatcgacgcacggatcgaccggcagaacgtgttcgcccgcaagaactacttctaccccgacctgccgaagggctaccagaccagccagatggaccatcctatcgtcggcaagggccatctcgacatcaccctggaagacggcaccaccaagcgcatcggcatcacccgcgcgcacctggaggaggacgccggcaagagcctgcacgaagacttccagggcatgagcggcatcgacctgaaccgcgccggcacgccgttgctggagatcgtttccgagccggacatccgcagcgccaaggaagccgtggcctacgtcaaggcgatccacgccctggtgcgctacctgggcatctgcgacggcaacatggccgagggctcgctgcgctgcgactgcaacgtctcggtacgaccgaagggccaggccgaattcggcacccgcgccgagatcaagaacgtcaactccttccgcttcatcgagaaggcgatcaaccacgagatccagcgccagatcgagctgatcgaggacggcggcaaggtagtccaggaaacccgcctgtacgacccgaacaaggacgagacccgctccatgcgcggcaaggaagaagccaacgactaccgttacttcccctgtcccgacctgctgccggtggtcatcgagcccgagtacctggcgaagctgcgcgagcaactgccggaactgccggtgcagaagcgcgaacgcttcgagagccagtacggcctgtccgcctacgatgccagcgtgctgtccgccagccgcgagatggccgactacttcgagaaggtccagggcatctgcggcgacgccaagctggcggccaactgggtgatggtcgagctgggcagcctgctcaacaaggacggcctggagatcgagcagtccccggtgtccgccgagcaactgggcggcatgatcctgcgcatcaaggacaacaccatctccggcaagctcgccaagatggtcttcgaagccatggccaacggcgagggttccgccgaccagatcatcgaggccaagggcctgaagcaggtcaccgacagtggcgccatcgagaagatgctcgacgaggtgctggcggccaacgccgagcaggtcgagcagtaccgcgctgccgacgaggccaagcgcggcaagatgttcggcttcttcgtcggccaggcgatgaaggcctcgaaaggcaaggccaacccgcagcaggtgaacgagttgctgaagaaaaagctcgaagcgtga

SEQ ID NO: 30490 - DNA, 4551 bp, Pseudomonas aeruginosa
atgagcaacctgcgccgtttcagccgtagcctggcggtcgccgccctggtcctgctgccgttcgccgccgtccaggcggaagacacggtggaaccgagcggctacacgccgatggccggcgaatccttcttcctgctcgccgacagcagcttcgccaccgacgaggaagcgcgggtccgtctcgaagcgcccggccgcgactaccggcgctaccgcatggagccctatggcggggtcgacgtgcgcctgtaccggatcgaacagccgctggagttcctcaagcggcagaagaacctgcaccgggtcctggccgagggacagttcaagggcgaaggcctgtcgaacaccctggcctatctctgggacaactggtatcgcaagtcgcgccgggtgatgcagcgcgccttctcctacgagtcgcggcaacaggtcaccgaggcggtgcccgagctgaagatgggcaacgccatgaccgcgccgacgccctacgacgcgcagccgcaatacgcgccgattcccggcctgccgctggtcagccagttccgctatccgctgtgggacgccaagcccatcgagccgccgcaggacgtcaagctggccggttcctccagcgagttcatcaacgtcgtgccgggcaatgtctacatcccgctgggcaagctgaagccgggcctgtacctggtcgaggcgcttgtcggcaagtaccgcgccaccaccgtggtgttcgtctccaacagcgtggcggtgagcaaggtcgccggcgacgagctgctggtctggaccgcacgcaagcacgaaggcaccccggtgcccgacaccaaggtgctgtggaccgacggcctgggcgtgatgagcagcggcaataccgacgccgacggcctgctgcggctcaagcacgccagtccggagcgctcctacgtgatcggcgaggaccgcgagggcggggtcttcgtctccgagaacttctattacgacagcgagatctacgacaccaagatctacgccttcaccgaccgcccgctgtaccggccgggcgactgggtctcgttgaagatggtcggccgcgagttcaaggacgcccggcaatcccaggccgccgccagcgcgccggtgcgcctgagcgtgatcgacgccagcggcacggtattgcaaagcctggacctccgcttcgacgcgaagagcggcgccaatggccgcttccaactgccggagaacgccgtcgccggcggctacgagttgcgcttcgactaccgcgggcagacctacagcagcgccttccgcgtcgccgaatacatcaagccgcacttcgaagtcgccctcgacctggccaagccggacttcaagaccgccgagccggtgaagggcgagatcgtcctgctctatccggacggcaagccggtggccaacgcgcgcctgcaactgagcctgcgcgcccagcagttgtcgatggtggacaacgaactgcagtatctcggccagttcccggtggaactgagcagcaccgaactgaccaccgacggcaagggtcgcgccgccatcgaattgccgccggccgagaaacccagtcgctacatgctgaccatcttcgccagcgacggcgccgcctaccgggtcaagaccagcaaggagatcctcatcgagcgcggcgccgcgcgctaccgcctgagcgcgccgcagcgcttcagcgccgccggcgagaaggtcgagttcagctatgccagcgaacagccgaccccgctcaagccgagcagctaccagtggatccgcctggaggaccgcgccaccgacagcggtccggtcgccgacggccgcttcgcgctgaccttcgagcgccccggtacctattccgtggagctgcgcgacgacaagggccagctccttggcgctaccggccactcggtgagcggcgagggcgtgaagtcggtgccgggcaccgtcgaggtggtgttcgacaagcccgagtaccgcaccggcgaggaagcctccgcactgatcaccttccccgagccggtggaggatgcgctgttgtccctggagcgcgacaaggtcgaggccaccgccctgctgtccaagggcgccgactggctgcgcctggaaaagctcaatccgacccagtaccgcgtgtggatcccggtgcgcgaggagttctcgccgaacctgaccttctcggtgctctacaccaagggcggcgactacagcttccagaacgccgggatcaaggtcggcatgccccaggtagagatcgacatcgccaccgacaaggagcgctacgaaccgggcgagacggtgaccgtgaccctggccacgcgcttcgccggcaaaccggtttccagccacctgaccgtcagcgtggtggatgagatggtctatgccctgcaggcggagatcgcccccggcatcgaccagttcttctaccatccgcggcgcaacaacgtgcgcaccagcgccagcctggccttcatcagctacgacgtggcgttgcccggcagcaccagcgcacccggacgggcgaaccgcagcgagcgcggcgtcaaggtactggagcggccgcgccgcgaggacgtcgacaccgccgcctggcagccggagctggtcaccgacgcccagggcaaggccagcttcagcttccgcatgcccgactcgctgacccgctggcggatcaccgcgcgggccatcgacgacaacggccaggtcggccagaagaagcagttccttcgctcggagaagccgctgtacctgaagtggagcgggccgactcgcttccgccagggtgaccagcccgacctcggcctgttcgtcttcaaccagggcgaacagccggtcaaggccgagctgctcagcgggccgcctggcagccagcgcagccagaccctggagctggccaagggagtcaactacattccgctggcgcaacagccgctcagcgatggcgactggagcgccgagttgcgccaggacgggcaggtccgcgaccgcctggcggtgcgcttcaacctgctggccgacggctggcaggtggagcagatgcagaacctcagcctggcggcggcgagcaacccgctgcaactgccggcggacgcgcgcgacgtacgcctgcgcctggccgatggcccggccgctgcctacctgggcaatctcgatgatctgctggagtatccctacggcggcgtcgagcagaccgccagccaactgctgccgctgagcatcgcctatccggcgctggccggcggcgagccgcggattcgcgaccgcctgcgcctgatcatgcagaacagtcgcctgcgcctggtgcagatggccggcccggacgcctggttcgcctggtggggtggcgacgtcgatggcgacgctttcctcaccgcctacgcctactacgccgactggtacgccagccgcgcactggagatccaactgccggccgaacactggcagcgcatcctcgagccctacgccaagcaggcgacgcagaccccgctgctgcagcgtgcgctgatcctggctttcgcccgcgacatgcaattgccggtgaacaccctgctcggcggcctgctcaacgatctggccaacgccggcgaagggcaggcgcgcgcggagccgctggaggccgacgacggcctggtgctgggcgacccggactcggccgtcggcctggccgcggcgcgagtgctggcggtggaccttgcacggcaactgcgggtcgcggtgcccgcgccgctggccgcccaggccgagacggcgacgcagcgcctgcgtgaggccggcttgccgttcaccgatgccttgctggcctctcgctcggccgtggatggccagcaggccagcgctctgctgcaacgcctggcgccggcgcaatcgaccctggaacgcgccctggccctgacctggctgcagggcgccctggcccaggcgccgcagggcaagctgccgcagccgccgaaggactggcaggcgcagcgcggcgccagcggcgaaacctactggcaatggcgcggccgcggcattccgagctgggtcgacctggacgaggcgccggcccggccgttgccggttgcgctcagctaccgcagcgcccaggcgccgagcgggcaactgccggtgcagatcagccgtcgtctgctgcgcctggtgcccggtgagggggcgttcgagttcaaggtcgaggaggttggcgacaagccgctttccagcgacgaactgtatctcgacgaagtgaccctgaacgttccggaagacaccgctctacgctacggcatgctggaattgccgctgccgcccggcgcggatgtcgagcgcaccacctggggcatcaagatcagcggcctggccggcgacgaagcgaccaccctggagcgcgcgcgcaacgaaccgggcgagttgttctacggggtgccggtggacagcctgagtggcgagcagcgtttccgtcacctggtgcgtttctcccagaaaggcagcttcaacctgccaccggcccgctacctgcgtctctacgcgccggaacagcaggccctggaagccaagccggcgctggccaaggtcaaggtcgagtga

SEQ ID NO: 30491 - DNA, 1614 bp, Pseudomonas aeruginosa
atgcgtagaaacgccgtcatccgctccgcgatcattccctcgctgctcggcgcagcgctggtcgccgccgttccccaggccttcgccagcaacctgatcttctgctcggaaggcagcccggccggcttcgatcccgcccagtacaccaccggtaccgatttcgacgccgcggcggaaaccgtcttcaaccgcctgacccagttcgagcgcggcggcaccaaggtccttcccggcctcgcggaaagctgggacgtcagcgacgacggcaagacctataccttccacctgcgcaagggcgtgaagttccacagtaccgactacttcaagccgacccgcgaattcaatgccgacgacgtgctgttcaccttcgaacgcatgctcgacaaggatcatccgttccgcaaggcctaccccaccgagtttccctacttcaccgacatgggcctggacaagaacatcgccagggtcgagaagctcgacgagcatacggtgaagttcaccctcaacgaggtcgacgcggccttcatccagaacctggcgatgcccttcccatcgatccagtccgccgaatacgccgcgcaactgctcaagcagggcaaggccagcgacatcaaccagaagccgatcggcaccggcccgttcgtgttcagccgctaccagaaggatgcgcagatccgcttcaagggcaacaaggactactggaagccggacgaggtgaaggtcgacaacctgatcttcgccatcaacaccgacgcctcggtgcgcgcgcagaagctcaaggccggcgagtgccagatcaccctcaacccgcgccccgccgacctcgacgcgctgaagaaggacccgaacctgaacctgccgtcgcaggccggcttcaacctcggctacatcgcctacaacgtcacccacaagccgttcgacaagctggaagtacgccaggcgctggacatggcggtgaacaagaaggccatcatcgacgccgtctaccagggcgccggccagttggcgagcaacggcatgccaccgacccagtggtcctacgacgagaccatcaaggacgcgccctacgatccggccaaggccagggagctgctgaagaaggccggcgtcgccgagggcaccgagatcaccctgtgggccatgccggtacaacgcccctacaaccccaacgccaagctgatggcggaaatgctgcagaacgattgggcgaagatcggtatcaaggcgaagatcgtcacctacgaatggggcgaatacatcaagcgcgccaagggcggcgagcatgacgccatgctgatcggctggagcggcgacaacggcgacccggacaactggctcggcaccctctacggctgcgacgcggtggacggcaacaacttctccaaatggtgcgacgccggctacgacaagctggtcaaggatgccaagcgcaccaccgaccagggcaagcgcaccgagctgtacaagcaggcccagcacatcctcaaggaacaggtgccgatcaccccgatcgcccactccaccgtgtaccagccgatgcgcaagacggtacacgacttcaggatcagtcccttcggcctgaactcattctacgaggtcagcgtcggcaagtag

SEQ ID NO: 30492 - DNA, 1602 bp, Pseudomonas aeruginosa
atgcgtaagatccttccccttcgggcctggctggcagccggtctgatcctcggctccccgttctcccacgccgccagcaacctggtgttctgctcggagggcagcccggccggcttcgatcccgcccagtacaccaccggcaccgactacgacgcgacctcggtcaccctgttcaaccgcctcgtccagttcgagcgcggcggcacccgggcgatcccggccctggcggaaagctgggacatcggcgacgacggcaagacctacaccttccacctgcgcaagggtgtgaagttccacagcaccgactacttcaagccgacccgcgaattcaacgccgacgatgtgctgttcaccttccagcgcatgctcgacaagaatcatccgttccgcaaggcctaccccaccgagtttccctacttcaccgacatgggcctggacaagaacatcgccagggtcgagaagctcgacgagcacagggtgaagttcaccctcaacgaggtcgacgccgccttcatccagaacctggcgatggacgtcgcctcgatccagtccgccgagtacgccgggcagttgctcgaggccggcaagccacagcagatcaaccagaagccgatcggcaccgggcctttcatcctgagccgctaccagaaggatgcgcagatccgcttcaagggcaacaaggactactggaaacccgaagacgtgaagatcgacaacctgatcttctcgatcaacaccgacgccgcggtgcgcgcgcagaagctcaaggccggcgagtgccagatcaccctcaacccacgccccgccgatctcaaggccctgcaggaagcggcgaacctgaaggtgccctcgcagccaggcttcaacctcggctacatcgcctacaacgtcacccacaagccgttcgaccagctcgaagtacgccaggcgctagacatggcggtgaacaagcaggccatcatcgacgccgtctaccagggtgccgggcaactggcggtgaacggcatgccgccgacccagtggtcctatgatgaaaccatcaaggacgccccgttcgatccggccaaggcccgggaactgctgaagaaggccggcgtcgccgagggcaccgagatcaccctgtgggcgatgccggtgcagcgtccctacaaccccaacgccaagctgatggccgagatgatccaggccgactgggcgaagatcggcatcaaggccaggatcgtcagctacgaatggggcgagtacatcaagcgcgcccacgccggcgagcacgacgccatgctgttcggctggaccggcgacaacggcgatccggacaactggctggcgaccctctacggctgcgactcgatcaacggcaacaacgtatcgaaatggtgcgacgcggcctacgacaagctggtcaaggctgccaagcgggtctccgaccaggacaagcgcagcgagctgtacaagcaggcccagcacatcctcaaggagcaggtgccgatcaccccgatcgcccactccaccgtctaccagccgatgagcaagtcggtccacggcttcaagatcagtcccttctcgcggaacgccttctatggcgtagccaaccagccctga

SEQ ID NO: 30493 - DNA, 1011 bp, Pseudomonas aeruginosa
atgcttagtttcattgctcgacgactggggctgctgatccccaccttcttcggcgtgaccctgctcaccttcgcgctgatccgcctgattcccggcgacccggtggaagtgatgatgggcgagcgccgcgtcgacccgcagatgcacgccgaggccctgcaccgcctgggcctggacaagccgctgtaccagcagtacctggactatgtcggcaacctcgcccagggcaaccttggaaaatccatacgcacacatgagcctgtctggaatgagtttctcacgctattttcagccaccctggaactttcattcgcagcaatgctttttgccggcacactcggcctcctagcaggagtggtagccgcactcaagcgaggttcgatttttgaccacggagtaatgacaatatctctagcgggctactcaatgccgattttttggtggggcctgctcttgatcatgctcttttccgtttcattaggctggactcctgtttctgaccgtatcggcgtgctgtatgaggtggagccgaagaccggcttcatgctcatcgacaccctgctctccgacgaggaaggcgcgttcctcgacgccgtgcgccacctgatcctgccggccatcgtgctgggcaccatcccgctggcggtgatcgcccgcatgacccgctcggcgatgctcgaggtcctgcgcgaggactacgtgcgcaccgcccgcgccaagggcttgtcgccggcccgggtggtcttcgtgcacgccctgcgcaacgcgctgatcccggtgctgacggtgttaggcctgcaggtcggcaccctgctcgccggcgcggtgctgaccgagaccatcttctcctggccgggcatcggcaagtggctgatcgacgccatcagcgctcgcgactacccggtggtgcagaacggcatcctgctggtcgccaccctggtcatcctggtcaatttcgtcgtggacatcctctacggcctggccaacccacgcattcgccaccaacgctga

SEQ ID NO: 30494 - DNA, 4254 bp, Pseudomonas aeruginosa
atgaacaagagctatacgctggtctggaaccaggccacaggctgttggaacgtcgcaagcgaaggtacccgtcggcgcagcaagagcggacgcggcaaggcgctcgtagtcgccggagcgtcactgctcggcctgttctgccaggcccccgccttcgccctgcccagcggcgccacggtcgtttcaggcgatgccggattccagacatccaccgatggccggcatatggtcatcgaccagcagagccacaagctgatcaccaattggaacgagttcagcgtccgtgccgatgagcgggtcagcttccaccagccgggccaggacgccgtcgccctgaaccgggtgatcggccgcaacggcagcgatatccaggggcggatagatgccaacggcaaggtcttcctggtcaatcccaacggcgtggtcttcggcaagtccgcccaggtcaacgtaggcggcctggtggcttccaccctggacctggccgacagggacttcctcgccggcaactaccagttctccggcgactccggcgcaaccgtaagcaatgccggcagcctgcaagccagcgaaggcggcagcatcgccctgctgggcgcccgggtcagcaacgacggcttgatccaggcgcaactcggcgacgtggccctgggcgcaggccagggcatcaacctcaatttcgacggcgacggcctgctcaacctgcaggtggacaagggctcggtcgacgctctcgcacacaacggcggcctcatccgcgccgatggcggccaggtgctgatgagcgcccgcagcgccgacagcctgctcaagaccgtcgtcaacaaccagggcactctcgaggccaggacgctacgcagcgcggaaggacgcatcgtcctcgacggcggcgaacagggtaccgtgcgggtggccggcaagcaggacgccagcgccatcggcggaggcaatggcggcctggtgctgaaccagggcgcgaacgtcgagatacagcgaaccgcgcaggtggacacccatgccgaccagggcgcaaccggcacctggaggattctctcgcacgaggtcagcgtagccgctgtcggccaggcaaacgctgccggtgatggttccggccaggtccatgtagcgcagggcccagccggggccaatgcgtccgatagcaacggcgtgaccatcgttcagcagcagccggccgtcgacctcgccgccggcgccaacggtacctccgcagtgcagagccagagcggcgccaacatcggctcgggcgccaatggcatcagcgtcgtgcaaagccagaacagccccaatatcggctcgggcgccaatggcatcagcgtcgtgcaaagccagaatggcgccaatatcggcgccggcgcgagtggcatcagcgtcgtgcagagccagaacagccccaacatcggctcgggcgtcaatggcgtgactgtcgtgcagagccagaacggtgccaatatcggttcgggcgcaagtggcatcaccgttgtgcaaagccagaatggcgcaaatatcggttcaggcgcgagtggcatcagcgtcgtgcagagccagagcggccccagcatcggctcgggcgtcaatggcgtcacaatcgtgcagagccagagcggtgccaacatcggccccggcgtcagcggaatcgatgtcgtccagacccagactctccccaacctgagcccaggcgccaatggctccagcatcgtccaggtccagacgctacccgatatcgccgccgacgccggcaatgtgcatgtcgtgcaggtccagaccggcggtaacaaggtcttcggcaactccgccaccaacgtcaggtcacgtaccgttcaggcccggagcaacgagaatgtcggttccggcctggcgaatccaagcagcgcgggaaaaggctcgacgttgcatgccgataccctggcccgcaacctttccacaagcaacgtcgaagtggtcgccacccggggcaacgcgcatgtcggcgcgccgctgtcctgggacagcggcaacggcctgacgctaaccgccgagcgcggggacctcaggatcaatggcgcgctgacggcccagggggaaaacgccagccttactctcaatgccgggcagcgccctctccgtatcgacgacagcctctctctcactggccagggagcccgggtcgaattcaattcggacaagggttatgccctggccgaaggcacccggatcaccctgtccggcaagaacgcaggattccgcgccaatgggcgggactacagcgtgatccaggacctgcagcagttgcgcggcatcgatagggacctgggcggcagctatgtcctcggcaatcgaatcgcaggcggcaactccagcttcctgtcgataggcaacgcgagcgccttcggcggtaccttcgacggcctgggcaacaccatcgataatctcgccgtctacggcaccggcgcctactccggcctgttcagcgtcaaccggggcaccctccgcaacctgaacctggaacgcatttccgccgatggagcacaggccacccactacaatgtccaggtcggtagcctggccgccgtcaacctcggtcgcatcgacaatgtgaacgccagcgacatccgtatcgccgcggcctcgaagctgaacagcctcggcgggctggtcgcactgaacctgggtagtatcgacaacgccagcgccagcggcacgctggtcggcaaccgccacacctatgctctgggcggactcgcagccgaaaacatcagcacagccaggggcgtggccagcatctccaacagccgggccgattttgccatctccggccagttgaaggaccatgccagccactacggcgcggggggcctggtaggcaggaaccgcggcggcctcatccgcagcagcggcagtcagggaacgctgtcgctgagcggtcacggaatgaacctgggaggactggtcggatacagttccgccggcggactggcggacgtttccgcctccgtcgacgtctcaggcaacggacagcgcggcctgtacggtgggctcatcggcctcaacgtaaacagtggtattgcccacgccacggccagcggcaaggtccggggcacagacgcggaagcactgggcgggctgatcggccggaacctgaacgcggccatcaacaacgccagcgcccatggcgatgtcagcctgcaagccggtcgctacctgggaggcctgatcggccacaaccaggcaggcaacctggccaacgtcagtaccagcggcaacctgagtggtgggtcgctgctccaggccggcggcctgatcggtctcaacgccaatgcctcgctggtcaatgcctccgccaagggcaatgtcgctacccgcggagcagaagcggttggcggtctgctcggagaaaacctgtacggctccgtcatcaacggttccgccagtggcgaagtcaccgacggcagcggcaaaaccctgggtggcctgatagggtccaacctcggcggcaatcattccaacctgaaggcctccgggtgggtaaacgcaggggcgaacagtgacgtgggagggctgatcggccacaaccggggcggcaaccacagcaccctggcggcatccggcaatgtcaccgggggcaagggcagtcgcgtcggcggactcgtcggctataacgatgccgcctcgctgacgaacgtctcggcttcgggcaacgtcagcgccagtggttccagggccatcggcgggttgatcggcagtgacctgcgaggttcgctgatgctcgccagcagtcatggaatcgtgaacgacaagaccagccacaacctgggagggttggtcggccgcggtgaaaacacctcgatccgctccgccaaggccagcggtgcggtgagcggaggcgccgggatcagggccggcggactggtcggctccctggagggctggcaggctctcatcctgggggcctcggccggcggcgatgtgacggcgggctacgatagctatattggcgggctggtgggcttcagcaccgccaccatcagcggcgcttccgcttccggcaaggtcggaggctcgggtctgctgggcggcctggtcgcctggaaccaggggaatgtcatgggttcttcggccagcggcaggctggagccacaaatccccaaccagatccatggcggactgatcggcatcaattttggctggcagtcctggaactcggtatacggggctgcggcgaccgttccaatgataggtcgccactacaacctgtga

SEQ ID NO: 30495 - DNA, 2832 bp, Pseudomonas aeruginosa
atgaccgactacaaagcgacgctaaaccttccggaaaccgccttcccaatgaaagccggcctgccccagcgcgagccggaaaccctgaagttctggaacgacatcggtctgtaccagaagctgcgggccattggcggcgaccgtccgaagttcgtcctgcacgatggccctccgtacgccaacggcagcattcacatcggtcacgcggtcaacaagattctcaaggacatcattgtccgctccaagaccctggcgggctacgacgcgccctatgtcccgggctgggattgccacggcctgcccatcgagcacaaggtcgagaccacccacggcaagaatcttccggcggacaagacccgcgaactgtgccgcgaatacgcggccgagcagatcgaagggcagaaggccgacttcattcgcctgggcgtgctcggcgagtgggacaacccctacaagaccatgaatttcgccaacgaggcgaacgaaatccgcgccctcgcggaaatggtcaagcaggacttcgtgttcaagggcctgaagccggtcaactggtgcttcgactgtggttcggcgctggccgaggccgaggtcgagtacgccgacaagaagtcgccgaccatcgacgtcggcttcccggtggcggatgccgacaagctggccgcggccttcggcctggcggccctggacaagccggcgcagatcgtcatctggaccaccacgccctggaccatcccggccaaccaggcgctgaacgtgcatccggagatcgactacgcgctggtcgatgccggcgatcgctacctggtgctggccgaggccctggtcgagtcctgcctggcgcgctaccagcgcgagggcaaggtggtcgccaccgccaagggcgaggcgctggaactgatcaacttccgccatccgttctacgagcgcctgtcgccggtctacctggccgactacgtggccctcgacgccggcaccggtatcgtccactcatcgccggcctacggcgaagacgacttctacacctgcaagcgctacgggatgagcaacgacgacatcctcagcccggtgcagagcaacggcgtctacgtcgactcgttgccgttcttcggcggtcagttcatctggaaggccaaccccaacgtggtggccaagctggaagaggtcggcagcctgctggcccacgaaaccatcaatcacagctatatgcactgctggcggcacaagacgccgctgatctatcgcgccaccgcgcagtggttcgtcggcatggacaagcagcccaggcagggtgcttccctgcgcgagcgagcgctggaagccatcacccagaccgaattcgtcccgggctggggccaggcgcgtctgcacggaatgatcgccgggcgtcccgactggtgcatctcgcgccagcgcaactggggcgtaccgatcccgttcttcctgcacaaggccagtggcgaactgcatccacgcaccgtggagctgatggaagaggtcgcgcagcgagtcgagaaggaaggcatcgaagcctggttcaagctcgacgccgccgagctgctcggcgaggaggccgcgcagtacgagaagatcaacgacaccctggacgtctggttcgactccggcaccacccattggcacgtgctgcgtggttcccaccggatcggccatgccagcggcccggtcgccgatctctacctggaaggttccgaccagcaccgcggctggttccactcctcgctgctgaccggctgcgcgatcgacaaccatgcgccgtaccgccagttgctgacccacggtttcaccgtcgacgagtccggccgcaagatgtccaagtcgctgggcaacaccgtggtgccgcagaccgtcatcgataccctgggcgccgacatcctgcgcctgtgggtggcttcgaccgattactcgggcgagatcgcggtatcccagcagattctccagcgtagcgccgatgcctaccggcggatccgcaataccacgcgcttcctgctgtccaacctgaacggtttcgatccggccacggatctgctgccgccccaggaaatgctggccctggatcgctgggcggtcgatcgcgccctgctcttgcagcgcgagatcgaagaggcgtaccgcgagtaccgcttctggaacgtctattccaaggtgcacaacttctgcgtacaggagctgggcgggttctacttggacatcatcaaggaccgccagtacaccaccggcgccaacagcgtcgcccggcgctcctgccagaccgcactgttccacatcgccgaggccctcgtacgctggatcgccccgatcctggcgttcaccgccgaggaagtctggaagttcctgcccggcgagcgcgccgagtcggtaatgctcgccacctggtacgacggcctcaacgaactgccggccgacgtgacactgaatcgccagtactgggaacaggtcatggcggtgaaggccgcggtcaacaaggagctggagaaccagcgcgcggccaaggccgtgggcggcaacctgcaggccgaggtcaccctgtatgcggaagacgcgctgcaggcccaattggccaagctgggcaacgagctacgcttcgtcctgatcacctcgaccgcgaccctggcgccgctgtcggcggctccggccgacgcggtggacagcgaagtcgccggcctcaagctgaaagtggtcaagtcgacccacgccaagtgcggtcgttgctggcaccatcgcgaggacgtcggtcagcacgctgcgcatcctgacctgtgcggtcgctgcatcgagaacatcgaaggcagcggcgaggttcgccactatgcctga

SEQ ID NO: 30496 - DNA, 939 bp, Pseudomonas aeruginosa
atgcagctgcttcgcggactacacaacctgcagcccctggccgggggctgcgtcgccaccatcggtaacttcgacggcgtccacctcgggcaccaggctatcctggcgcgtctgcgcgagcgctcgctggagctgggcgtacccagctgcgtggtgattttcgagccgcagccgcgcgagttcttctcccccgattcggcgccggtgcgtctgacccgcctgcgcgagaaactcgagttgctgcgtgggcagggcgtcgacgtggtgctctgcctggccttcaaccgccgcttgcgcgagctgtcggcagccgagttcgtccgccaggtcctggtcgatggactggcggtgcggcatcttgaagtgggcgacgatttccgtttcggctgcgaccgctccggtgacttcgccttcctggtgaacgccagtcgcgagcaggggttcaccgtcgaggcggccaccaccgtcgaactggacggtgtgcgggtgagcagcacgcgggtccgccaggccctggccgagggcgacctgcatctcgccgagcgccttctggggcgtcccttcagcctgagcggacgggtcctgcatggacagaaactcggccggcaactgggctcgcccacggccaacattcaactgaaacggcgcaaggcgccgttgaacggcgtctacctggtcagtacgctggtcgatggccagcgttgccagggggtggcgaacatcggcacccgcccttcggtgaacggcgacggccgtccccatctggaagtgcacctgctcgatttcgccggcgatctatacggccggcatctgcaggtgaccttccaccagaagctgcgcgacgagcagcgttttgcctccctggaggcactcaaggcggcgattctcgcggatatcgccgccgcccgggcctactggctgggccaaccgcttgattga

SEQ ID NO: 30497 - DNA, 1539 bp, Pseudomonas aeruginosa
atgaatcttctcaaatcattggcggcggtgagttccatcaccatgctgtcgcgggtcctcggcttcgtccgcgataccatcctggcgcggatcttcggtgccggcctcgccaccgacgcctttttcgtcgccttcaagctgcccaacctgttgcggcggatcttcgccgagggggcgttttcccaggctttcgtgccgatcctggcagagtacaagaaccagcagggcgaggaggcgacgcggaccttcatcgcctacgtttccggcttgctcacgctggtgctggcgctggtcacggcgctcggcatcctcgccgcgccctgggttatctgggtcaccgcgccgggcttcgccgataccccggaaaagttcgccctgaccaccgacctgctgcgggtgacctttccttatatattgctgatctcgctgtcgtccctggccggcgcgatcctcaacacctggaaccgcttctcggtgccggccttcgtgccgaccctgctgaacgtcgcaatgatcggcttcgcgctgttcctcacgccttatttcgatccgccggtcatggtgctgggctgggcggtgctggccggcggcctgttgcagctcctctatcaactgccgcacctgaggaagatcggcatgctcgtgctgccgcgcctgaacctcagggacagcggcgtctggcgggtgatgaagctgatgctgccggcgatcctgggggtctcggtgagccagatctcgctgatcatcaacaccatcttcgcctcgttcctggcagccggttcggtgtcctggatgtactacgccgaccgcctgatggagctgccttccggcgtattgggcgtggcgctggggacgatcctcctgccgatgctggcgaagacctattcgaacaaggatcgccatgagtactcgcgcctgctcgactggggcctgcgcctgtgcttcttgctggtgctgccgtgttcgctggccctggcgatcctcgccgaacctctgactgtctcgctgttccagtacggcaagttcaccacggtggacgcggcgatgacccagcgcgcgctggtcgcctactccgtcggcctgctcggcatcatcctggtcaaggttctggcgccgggcttctatgcccagcagaacatccgtacgccagtgaagatcgcgctcttcaccctggtttccacccaactgatgaacctggccttcatcggcccgcttcagcatgccggcctggccctgtccatcggcctggccgcctgcctgaatgccggcctgctctactggcaactgcgcaagcagcgtctgtacctgccgcaaccgggctgggcgaagttcctggtcaagctggtggtcgcggtgctggcgatgtcggcggtgctgctggccacgatgcactggctgccggcctgggagcagggcgccatgctggagcgattcctgcgcctcggcctgctggtggttgccggtctcctggcctatttcggtatgctcgcgctgctgggtttccgcctgcgcgacttttcccgccgggcggtgctgtga

SEQ ID NO: 30498 - DNA, 276 bp, Pseudomonas aeruginosa
gtggccaacacaccttccgccaaaaaacgcgccaaacaggctgagaagcgtcgcagccacaacgccagcctgcgctccatggtgcgcacctacatcaagaacgtcgtgaaagccatcgacgccaaggacctggaaaaagcccaggccgccttcaccgccgctgtaccggtgatcgaccgcatggctgacaaaggcatcatccacaagaacaaggctgctcgtcataagagccgtctgagcggccacatcaaggccctcagcaccgctgccgcctaa

SEQ ID NO: 30499 - DNA, 1221 bp, Pseudomonas aeruginosa
atgaaattcgtcgatgaagtatcaatccacgtgaaagccggtgacggcggcaatggcctcatgagctttcgtcgcgagaagttcatcgaaaagggcggtcccaacggcggcgacggtggcgacggcggttccatctatctggaagccgacgtcaacctgaacaccctggtcgactatcgctacacccgccgtttcgatgcccagcgcggcgagaacggcggcagcaaggactgcaccggggccaagggcgacgacctgatcctgccggtgccggtcggtaccaccgtgatcgacgccaatacccaggaaatcatcggcgacctgaccgagcccggtcagcggctgatggtcgctcagggcggctggcacggcctcggtaacacccgtttcaaatccagtaccaatcgggcgccgcgccagaccaccccgggcaagccgggtgaggcgcgcgacctcaagctggaactgaaggtgctggccgacgtcggcctgctgggactgccgaatgccggcaagagcactttcatccgtgcagtgtccgcggccaagccgaaggtggccgactatccgttcaccaccctggtgccgaacctcggcgtggtcagtgtcggtcgctacaagagcttcgtggtcgccgacattcccggcctgatcgaaggtgccgccgaaggcgccgggctgggcatccgcttcctcaagcatctggcgcggacccgcatcctcctgcatctggtggacatggcgccgctggacgaaagcgatccggccgatgccgccgaggtcatcgttcgcgagctgggtcgcttcagtccggcgctgaccgagcgcgagcgctggctggtgctgaacaagatggaccagatcctcgatccggccgagcgcgaggcgcgcaagcaggcggtgatcgagcggttgggctgggaaggcccggtctatgtgatctccgccctggagcgcgatggcaccgaggcgctcagccaggacatcatgcgctatctcgacgagcgtaccctgcgcctggaagaagatccgcagtatgccgaggaactggccgaactcgaccggcgtatcgaggacgaggcgcgggcccgtctgcaggccctggacgatgcgcgcgcgctgcggcgttcgggtctgaagaacgccggtgcggtggatgacgatgatttcgatgatgaggaagacgacggcgacggtccggagatcttctacgttccctga

SEQ ID NO: 30500 - DNA, 258 bp, Pseudomonas aeruginosa
atggcacacaaaaaagctggcggttctacccgcaacggccgcgactcagaaagtaaacgccttggcgtgaaactgttcggcggccaggctgtaaaggctggcaacatcctggttcgtcagcgcggcaccaaattccacgccggttacggcgttggcctgggcaaggaccacaccctgttcgcgaaagtggacggcgtggtcaagtttgagaccaaaggcgcctttggtcgcaaatacgtgagcatcgttgctgcctaa

SEQ ID NO: 30501 - DNA, 312 bp, Pseudomonas aeruginosa
atgtacgcagtgattgttaccggtggcaagcagcacaaagtcaccgaaggcgaattcctcaaggtcgagaaactcgacgtcgctaccggcgaagcgatcgatttcgaccgcgtcctgctggttgccaatggcgaagacgtgaaaatcggcctgccggtcgtcgaaggtgcgaaggttaccgctgaagtggtttcccacggccgtcacgacaaggtccgcatcatcaagttccgccgtcgtaagcaccacatgaagcgtcagggccaccgccagtggttcactgaaatcaagatcaccggcattcaggcctaa

SEQ ID NO: 30502 - DNA, 969 bp, Pseudomonas aeruginosa
atgcaaccccaggccttctaccgcgtggtggcggaagatttcaccgccgtcgacgggatcatccgtcgccaactcacctcccgcgttcccctggtggaaaagatcggcgactacatcatctccgccggcggcaagcgcctgcgtccgctgctggtcctgctcgccggcaagaccctgggctacaagggcgacgacctctgcctgctggccgccaccatcgaattcctgcacacctccactctgctgcacgacgacgtcgtcgacgcctccggcctgcgccgcggccgctccaccgccaatgccctgtggggcaacgcgccgagcgtgctggtaggcgacttcctttatgcccgctccttcgaaatgatggtcgagctgggttccatgccggtcatgcgcatcatatcccaggccacccgggtgatcgccgagggcgaagtgctgcaattgtccaaggtacgcgacgccagcactaccgaagagacctacatggaagtgatccgcggcaagaccgcgatgcttttcgaggcctcgacccacagcgccgccgcgctgtgccaggccggcgaggaacagtccgaggcactgcgccgcttcggcgactacctgggaatcgccttccagctggtggacgacctgctcgactaccgcggcgacgccgcgaccctcggcaagaacgtcggcgacgacctcgccgaaggcaagcccaccctgccgctgatcgtcaccatgcgcgacggcaccgaggaacaggccgcgctggtacgcaaagccatccagcaaggtggcagccaggacctggagagcgtctgtgccgccgtcgaggcagccggcgccctggactataccgccaacctcgcccgcgactacgccgcccgcgccatcgcctgcctggatacgctgccggacaacgaataccgctccgccctggtcgaactcagcgaattcgctgtcgcccgaacccactga

SEQ ID NO: 30503 - DNA, 1338 bp, Pseudomonas aeruginosa
atgacgcaatccgtcgacgctttcctcgagcgcctgaagcggcgcgatcccgatcagcccgaattccaccaggcggtggaagaggtgctgcgttccctctggccgttcctcgaggccaacccacactacctggaagccggcatcatcgaacgcatcgtcgaacccgagcgggcgatcctgttccgcgtaccctgggtcgacgaccagggccgggtacgggtcaaccgtggctaccgggtgcagatgagcagcgccatcggcccctacaagggcggcctgcgcttccatccctcggtcaacctcggggtgctgaagttcctcgccttcgagcaggtcttcaagaactccctgaccactctgcccatgggcggcggcaagggcggctccgacttcgatccgaagggcaagagcgacgccgaggtgatgcgtttctgccagtcgttcatgagcgagctgtaccgccacgtcggcgccgacctggacgtgccggccggcgacatcggcgtcggcgcgcgtgagatcggctacctgttcggccagtacaagcgcctgtccaaccagttcacctcggtgctgaccggcaagggcctgagctatggcggcagcctgatccgcccggaggcgaccggcttcggctgcgtctacttcgcccaggaaatgctcaaggatcgtggccgcggcttcgacggccagcgggtggcgatctccggctcgggcaacgtcgcccagtacgcggcgcgcaaggtcatggaaatgggcggcaaggtgatctcgctgtccgattccgaaggcaccctgtatgccgaggcggggctctccgacgagcagtgggaatacctgatggagctgaagaacgtgcgccgcgggcgcatccgcgagatggcggagcagttttccctgcagtttctcgaagggcgccggccctggggcctggcctgcgatatcgcgctgccctgcgcgacccagaacgaactggatgccgaggatgcgcggcgcctgctggccaacggctgcgtctgtgtcgccgaaggcgccaacatgccctcgaccctggaagccgtcgacctgttcctcgaggccggcatcctctacgcgccgggcaaggcgtcgaacgccggcggggtggcggtgagcggcctggagatgtcgcagaacgccatgcgcctgcgttggagcgagggcgaggtggataccaagctgcacggcatcatgcagtcgatccaccatgcctgcctgctgtacggcgaggagcaggggcgggtcaactacgtgaagggggcgaacatcgccggcttcgtcaaggtcgccgatgcgatgctggcgcagggcgtggtctga

SEQ ID NO: 30504 - DNA, 1665 bp, Pseudomonas aeruginosa
ttggctcagtacgtctacaccatgcatcgggtcggcaagatcgttccgcccaagcgtgaaatcctcaaggacatctccctgtcgttcttccccggcgccaagatcggcgtgctcggcctgaacggcgcgggcaagtccaccctgctgcggatcatggccggcgtcgacaccgagatcgaaggcgaggcccggccgatgccggggatcaacgtcggctacctgccgcaggagcccaagctggacccgcaggccaccgtgcgcgacatcgtcgaagaggccgtcggccagatcaagcaggcccaggcgcggctggacgaggtctatgccgcctatgccgagccggatgccgacttcgacgccctggccgccgagcaggccaagctggaggcgatcctgcaggcatccgacggacacaacctggaacgccagctggaagtcgccgccgacgccctgcgcctgccgccgtgggatgccaaggtcgagcacctgtccggcggcgaaaagcgccgcgtagcgctgtgccgtctgctgctgtcggctcccgacatgctgctgctggacgaaccgaccaaccacctggacgccgactcggtggcctggctggagcatttcctgcacgacttccccggcaccgtggtggcgatcacccacgaccgctacttcctcgacaacgtcgccggctggatcctcgaactcgaccgtggccatggcatcccgttcgaaggcaactactccggctggctggaatccaaggccgcccgcctggcccaggaagccaagcaggaagcctcccacgccaaggccatgaaggccgagctggagtgggtacgccagggcgccaagggccgccaggccaagtccaaggcgcgcctgcagcgcttcgaggaactgcagtcgcaggaattccagaagcgcagcgagaccaacgagatctacatcccggccgggccgcgcctgggcgacaaggtcatcgaactgcacaacgtgaccaagggctacggcgaccgcgtgctgatcgacaacctgtccctgagcattcccaagggcgctatcgtcggtgtgatcggcggcaacggcgcgggcaagtcgaccctgttccgcatgctcaccggcaaggagcagccggactccggcaccatcgagatcggcgagaccgtgcagatcgccagcgtcgaccagagccgtgacagcctggaaggcaacaagaccgtgtgggagcaggtttccgacggtttcgagcagatcaagatcggcaactacgaagtcccctcgcgcagctatgtcggtcgcttcaacttcaagggcgccgaccagcagaagttcgtcaaggacctctccggcggtgagcgtggccgtctgcacctggccctgaccctgaagcagggcggcaacgtgctgctgctcgacgaaccgtccaacgacctcgatgtggaaaccttgcgcgcgctggaagaagcgctgctggacttccccggcgctgccatcgtgatctcccacgaccgctggttcctcgaccggatcgccacccacatcctctcctacgaggacgatggcaaggtgaccttcttcgaaggcaactacaccgagttcgaggccgaccgcaagaagcgcctgggcgatgctgcgtcccagccgcaccgcgtgcgctacaagaaactggcgtaa

SEQ ID NO: 30505 - DNA, 4248 bp, Pseudomonas aeruginosa
gtgtcgaccccctcgctaaccccgtcgccgcctcccgccggcgacccactgaccgtacccgaccgaccggcagccaaggctggcctgctgttgctggtcctgttgatgctcggcctgctgctctggcagatgagccaggagctgcgccagcaggaacgcttcgaacacgagcgggccgcggcccagctcgatcgtctcaacgaccgcctgtccctgaccctcgaactcaaggcgcgcaccgccctcgccctgctcccgggcgtgccccccagcgagcgtggcgagatacagggcaggctgttgccgcgcatcagcgatgcgctgccgcaggtgcgccagttgcaatgggtggacagcgccccgcagacggacagcccgtcgccggaaacgacgctgcccgagcagttgcgccagcacgccggctccggtctctaccactattgcctcgacccgcgcgacggcgaatccctctacctgaccctgcgcgaacccggcagccgccgcgacagtggcttctggctgttgcacctggccagcgacagcctcgcccagtggagtcccgacctgcccaccggcaacctgctctggcgcctggaagaccaatacgccgggcgggtgctctggcataccccggggagcacggcgctgctcgacgacatgcagaccctcggcgtggaaccgctgcgcaacagcgactggcagcttcgcggactctacgacagcacgcgagtgcggctcggcctgctgccgggaatcggcggcgagctggcgatcttcctcctgctggtcggcgtcaccgtgtacatgctgctgcgcctgcaccgcgagcaacagggcctgcgcgccatgaccctggcctcgcagcgcagcctgcgccaggcggccacggcactggcggcgatcgacgagcgggtgctggtgacccgcgccgacggccgcctcagctacctcaatccccaggccgaacgcctcttcggcatcagttcggcccaggcccgccagcatcacctgctgggcctgctgccggacctcgagccaggctggctgacggacgccggtggcgacggcgagacccgtagcgagttgctgccgctgcgggtacgcggcgagccgcggacgttcaccctcagccgccatccgctggccagctatccggcgctcgccgaccaggcctggaccctccgcgagcagatcctccagggcgggcaggtctgggtgttgcgcgacgtcaccgaggaacagcacgccctcggcgtcctggaggaaacccggcggcgctaccaggacatcttcgaaggggtcggcgtggccctctgcgtgctcgacctctccgccctgcgccaggctcttgtggagcaaggcttggacagctgcgccgcactgcgcgcctggctcgccggcgaacccgggcggcagcaggcgctgctggagcggatccgcatcaccgagatcaacgatgtcagtcgccgcctgctacagatcgattccaccgaacaggcctggcagcgcttgctcgaccacggcccgctacaaccggacagcctgcgcctgcaggtgatcgaggcgctcatcgagcgccggccggtactcgaacttgaagccacgctgcgctgcggcaagagcacgccgcggcacctgtggttgcaactgcgcctgccggaaaaccccggcgaatggcatgcggtgaccctcagcctgtccgacgtcaccagtcgcaaggaagtcgaactgtcgctgatcgagcgcgagaagttctggtcggacgcggtccaggcggtgcccgataccctctacatccacgacctgcacgcgcgccgggtgatcttcagcaaccatcacctgggccagcagttgggctacaaccaggaagaactggcgcggatgggcgagaacttctgggaaaccctgctgcaccccgacgaccaggaatactactggcgcatccgcaacctgcagcacgtggtcggcgacggcctgctgctcgacagccagttgcgctggcgccaccgcgacggccgctggcactggttcgacatccgcgagcaggccttcagccgcgaccgcagcggtcgcgtggcgcgcctgatcggcgtggccaaggacatcaccttcaccgtcgaggcgaacaacgcgctgcgcgagaacggccgacgctaccgcatgctggcggaaaacatcagcgacgtgatcttctccaccgacgccgaactcaacgccagctacgtcagcccctcggtacagcacgtgttcggctacagcccggaatgggcgctgctcaacggcctccatcagaccgccaccaacccgcgccagctcggccgcctgaacggcctgctgcgccgcgtgcggcacgccatcggcgaccgccagaagctcgccgagctgcgggaaaaccctggccagcatctgttcgccctcgactgcctgcgcgccgacggacgcaagattcccatcgaactgcggatcgtcctgatgtgggacgagcacgaccgcttcgaaggcctgctcggcatcgcccgcgacatcagccagcagcgccgcgccgaacgcgagctgcggatggcggcgacggtattcgaacactccacggcggcgatcatggtcaccgacccggccggctacatcgtccaggtcaacgattccttctcgcgcctgaccggctacagcccggccgacgtgctcgaccagcagccgcgcctgctcaccgccgaccgccaggaagccaaccagctcaagcacgtgctcgccagcctgcagcacagcggcagctgggaaggcgagatcctgcagaagcgcaagaccggcgagctctatccatcctgggtcggcatcaccgcggtgcgcgacgaggaaggcgacctggtcagcttcgtctgcttcttcagcgacatcagcgagcgcaaggccagcgagcggcgcatccaccgcctggcctactacgacgccctcacccacctgcccaaccgcacgctgttccaggaccgtctgcataccgccctgcagcaggccgagcgcaacggccagtgggtggtgctgatgttcctcgacctcgaccgcttcaagccgatcaacgactccctcggccacgccgccggcgaccgcatgctgcaggaagtggcgacccgcctgagcgcctgcgtcagccaggacgataccgtggcgcgcatgggcggcgacgaattcaccctgctgctgccttcccagggcgaccgcgagatcgccctgaaacgggcgatccaggtcgccgagctgatcctcggccgtctggcccggccgttcaccctggaaggccgtgaattcttcgtcaccgccagcatcggcgtggccttgtcgccccaggacggcgccgaactgagcctgctgatgaagaacgccgacacggcgatgtaccacgccaaggagatgggcaagaacaacttccagttctaccaggccgagatgaacgctcgcgccctggagcgcctggaactggaaagcgacctgcgccgcgcccttgaactgggcgagttcgtcctccactaccagccgcagttcaccggcgacggccgccgcctgaccggcgccgaggccctgctgcgctggcagcatccgcgccgcggactggttccgccgagcgagttcattccggtgctggaggagatcggcctggtggcccaggtcggcgactggctgctggcggaagcctgcaagcagttgcgcagctggcacaaggccaaggtgcgggtgccaaaggtctcggtgaacctctcggcacggcagttcgccgatggccagttgggcgagcggatcgccgcgatcctctacgagacaggcatcccgccggcatgcctggagctggaactgaccgaaagcatcctgatgagtgacgtcgccgaggccatgcagatcctctccgggctcaagcgcctcggcctggccatcgcggtggacgacttcggcaccggctactcctcgctgaactacctcaagcagttccccatcgacgtgctgaagatcgaccgcagcttcgtcgacggcctgccccacggcgaacaggacgcacagatcgcccgggcgatcattgccatggcccacagcctgaacctgatggtgatcgccgagggcgtggagagccaggcccagctggacttccttcgcgagcacggctgcgacgaggtgcaaggctacctgttcggccggccgatgcccgccgagcagttcggcatgctctacgccagcgacgtgctgttcatgttcaacgagggctga

SEQ ID NO: 30506 - DNA, 1254 bp, Pseudomonas aeruginosa
atgttcagccgtgatttgaccctcgcccgctacgatgccgaactctttgccgcgatggagcaggaagcccagcgccaggaagagcacatcgagctgatcgcctccgagaactacaccagcccggcggtgatggaagcccagggttcggtgctgaccaacaagtacgccgaaggttatccgcacaagcgctactacggcggctgcgagtacgtcgatatcgtcgagcaactggccatcgaccgcgccaagcaactgttcggcgccgattacgccaacgtccagccgcacgccggctcccaggccaacgccgcggtctacctggccctgctgtcggccggcgacaccatcctcggcatgagcctggcccatggcggccacctgacccacggcgccagcgtctcctcctccggcaagctgtacaacgccgtgcagtacggcatcgacgccaatggcctgatcgactacgacgaagtcgagcgcctggccgtggagcacaagccgaagatgatcgtcgccggcttctccgcctattcccaggtcctcgatttcgcccgcttccgcgccatcgccgacaaggtcggcgcctacctgttcgtcgacatggcccacgtcgccggcctggtcgccgctggcgtctacccgaacccggtgccgttcgccgacgtggtcaccaccaccacccacaagaccctgcgcggtccgcgcggtggcctgatcctggcgcgcgccaacgaggagatcgagaagaagctcaactccgcggtattccccagcgcccagggcggtccgctggagcacgtgatcgcggccaaggcggtgtgcttcaaggaagccctgcagccggagttcaagacctaccagcagcaggtcctgaagaacgcccagagcatggcccaggtcttcctggaccgcggtttcgacgtggtttccggcggcacccagaaccacctgttcctgctctccctgatcaagcaggacatcaccggcaaagacgccgacgccgccctcggccgcgcgttcatcaccgtgaacaagaactcggtcccgaacgacccgcgctcgccgttcgtcacctccggcctgcgcatcggtaccccggccgtgaccacccgcggcttcaaggaagccgagtgccgcgagctggccggctggatctgcgacatcctcgagaacatgggcgacgagtccgtggtcgacggcgtacgcgagaaggtcaaggcgatctgcgccaagttcccggtctacggcaactaa

SEQ ID NO: 30507 - DNA, 1005 bp, Pseudomonas aeruginosa
atgtccgaagtagccaacgacaaccacgccccgatccccgtcaccgtgctcaccggcttcctcggcgccggcaagaccaccctgctcaagtacctgctgcaggccgagcacggcatgaagatcgcggtgatcgagaacgagtacagcgagacgccgatcgacggccagttgctcggcgtcgagccggtgcaggtgatgacgctgtccaatggctgcgtctgctgctcgatcaacaccgacctggaaaaggccctgttcctcctgctggagcgccgcgacaacggcgaaatcgacttcgaccgcctggtgatcgagtgcaccggcctggccgatccggcgccggtggcgcagaccttcttcgccgacgaggaactctgccagcgctacgtgctggacggcatcatcaccctggtggacgccgccaacgccgagcgtcacctgcaggaaaccatcgcccaggcccaggtcggcttcgccgaccgcatcctggtgagcaagaccgacctggtcgacgccgccaccttcgaggccctgggccagcgcctgcaacggatcaaccggagggcgctggtgcatgtggtcgagcacggccgcatcgacctggcgcacctgctcgacgtacgtggcttcaacctcaacgccgacctcggtcctggcatcggcctgcgcccgctgcgagcggtggcagccaaggacagccgcgatcgcatcggcaccctggtactgcgcagcgacacgccgctcgatctcgaaaggctgagcgagttcatggacgacctgttgcagtggcatggcaattccctgctgcgctacaagggcgtgctgaacatcgccgacgagccgcgtcgcctggtgttccagggcgtgctgcgactctacggcttcgactgggatagcgagtggcgggacgacgaggcgcgcgagagcgtgatcgtgttcatcggcgacaacctgccggaggacagtatccgcgagggcttcgaacgcatcgtcgaaggccgctga

SEQ ID NO: 30508 - DNA, 204 bp, Pseudomonas aeruginosa
atgttcaacgacctcagccgcatgggcaaatacctgggccaggccgcccggatgctggtcggcatgcccgactacgacacctatgtcgagcacatgcgcaacaagcacccggacaagccggtgatgacctacgaggagttcttccgcgagcgccaggaggcgcgctacggtggcggcaagggtcggccgatccgctgctgctga

SEQ ID NO: 30509 - DNA, 2067 bp, Pseudomonas aeruginosa
atgaacaataacaatagcctgctacgtcacctcgcctggctggtggtggcgatcgtgggcgccgcggccctgggcgtcgtcgccctgcgtcgtggcgaagcgatcaacgccttgtggatcgtggtggcggcggtggccatctacctggtcgcctaccgttactacagcctgttcatcgccagcaaggtgatgcaactggaccccaaccgcgccactcccgcggtactcaacaacgatggcctggactacgtcccgaccaacaagcacatcctcttcggccaccacttcgccgccatcgccggcgccggtccgctggtcggtccggtccttgccgcgcagatgggctacctgcccggcaccctctggctgatcgccggcgtagtcctcgccggcgcggtgcaggacttcatggtcctgttcatctccagccgtcgcaacggccgctcgctgggcgagctggtgcgcgaggaaatgggccaggtggccgggaccatcgcgctgttcggcgccttcctgatcatgatcatcatcctcgcggtgctcgcgctgatcgtggtgaaggctctggccgacagcccctggggcatgttcaccgtcctcgcgaccattcccatcgcgctgttcatgggcgtctacatgcgcttcatccgccccggccggatcggcgagatctcgatcatcggggtgttcctcctgctcggttcgatctggctcggcgggcaggtcgcggccagtccggaatgggcgccgcatttcaccttcagtggaatccagatcacctggatgctgatcggctacggcgccgtcgcctcggtactgccggtgtggctgctgctggcgccgcgcgactacctgtcgaccttcctcaagatcggcaccatcatcggcctggcgatcggcatcctgatcgtcatgccggaactgaagatgccggccctgacccagttcaccgacggcaccggcccggtctggaaaggcagcctgttcccgttcctgttcatcaccatcgcctgcggcgcggtgtccggcttccacgcgctgatctcctcggggaccacgccgaagctgctcaaccgcgagcccgacgcccgctacatcggctacggcggcatgctgatggagtccttcgtggcgatcatggcgatggtcgccgcctcggtgatcgagccgggcatctacttcgccatgaacagcccgccggcggtggtcggcgccgacgtcaacgcggtggccgcgaccgtcagcagctggggcttcgccatcacgccggagcaactcacccagaccgcccaggacatcggcgagaccaccatcctggcccgtgccggcggcgcgccgaccctggcggtggggatcgcgcacatcctccaccaggtgctgccgggcgagaacaccatggccttctggtaccacttcgcgatcctcttcgaggccttgttcatcctcaccgcggtggacgccggcacccgtgccgggcgcttcatgctgcaggacctgctgggcaacttcgtgccggcgctgaagaagaccgagtcgtggaccgccaacatcatcggcaccggcggctgcgtggcgctgtggggctggctgctgtaccagggcgtggtcgacccgctgggcgggatcaataccctgtggccgctgttcggcatttccaaccagatgctcgccggcatcgcgctgatgctcgccaccgtggtcctgatcaagatgaagcgccagcagtatgtctgggtcaccatcctgccggcggcctggttgctgatctgcaccaccaccgcgggcctgatcaagatcttcgacagcaacccggcggtcggcttcgtcgctcttggcgagaagtacgccaccgcgctggatgccggccaggtgctggcgccggccaaggatatcggccagatgcagcacgtggtgctgaacgcctacatcaacgccggtctgaccgtgctgttcctgctggtggtgttcagcgtactgttctacgccatcaaggtcggcatcgcggcctggggcaagagcgagcggaccgacaaggaaaccccgttcgagcccatccccgacgcctga

SEQ ID NO: 30510 - DNA, 1362 bp, Pseudomonas aeruginosa
atggccaaggccaagcgcatgtacggctgcaccgagtgtggcgcgaccttcccgaaatgggccggccagtgcgcggactgcggggcctggaacaccctggtggagaccgtcgtcgaggccgcgccgagcggctccggccgcggcggctgggccggccagcaggccaacctgaagaccctggcggaggtcagcgtcgaggaaatgccgcgcttcacgaccggctccaccgaactggaccgggttctcggcggcggcctggtggacggttcggtggtgctgatcggcggcgatcccggcatcggcaagtcgaccattctcctgcagaccctttgcaacctggccagccgcgtcccggcgctgtacgtcaccggcgaggaatcccagcagcaggtggcgatgcgcgcgcggcgcctgtcgttgccggaagacaagctcaaggtgatgaccgagaccagcatcgaaaccatcatcgccaccgcgcgccaggagcagccgcgggtgatggtgatcgactcgatccagaccatcttcaccgagcagttgcaatcggcgccgggtggcgtcgcccaggtccgcgagagcgccgcgatgctggtgcgctatgccaagcagagcggcacggcgatcttcctggtcggccacgtgaccaaggaaggcgccctggccggcccgcgggtgctcgaacacatggtcgacaccgtactgtatttcgagggcgaatcagacggccgcctgcgcctgctgcgggcggtgaagaaccgcttcggcgcggtcaacgaactgggagtgttcggcatgaccgacaaaggcctgaaggaagtgagcaacccttcggcgatcttcctcacgcgggcccaggaagcggtgcccggcagcgtggtgatggccacctgggaaggctcgcggccgatgctggtggaggtccaggcgctggtcgacaccagtcacctggcgaatccgcggcgggtgaccctgggcctcgaccagaaccgcctggcgatgctgctggcggtgctgcaccggcacggcggtatcccgacctacgaccaggacgtgttcctcaacgtggtgggtggggtcaaggtgctggaaaccgcctccgacctggcgttgatggcggcggtgatgtccagcctgcgcaaccgcccgctgccgcacgacctgctggtgttcggcgaggtcgggctgtccggcgaggtgcgtccggtgccgagcggccaggagcgcctgaaggaagccggcaagcatggtttcaagcgtgccatcgtacccctcggcaacgcgccgaaggaggcgccggcgggattgcaggtgatcgccgtgacgcgcctcgagcaggccctggacgccctcttcgagtga

SEQ ID NO: 30511 - DNA, 6465 bp, Pseudomonas aeruginosa
atggtccgtccggatagccagcgcggcaagcgcacctcttcgaaagctggtagggaagggcgtttcgtccttgccgccagcagcaccctcatgttcgccatcgccagcatcaacgcggccatggcggcacctaccggtgcccagttcaaccccaacgagatcaagatcagccagcagggcaagaccacgctgatcgaccagagcacccagcgcgcgatcatcaactggaagggcttcgacgtctccgccgacgaggcggtgcgcttcaaccagcccggtgtgacctcgtcgaccctgaaccgggtcaccgcaggccaggaaagcgtgatcgccgggcgcatctccgcgcccggccaggtgatcatctacaactccaacggcgtggtcttcagcggctcggccaaggtcgacgtgggctccctgatcaccaccacggcgaacatcagcgacgaacacttccgccagggcaagctgatcttcgaccagcccggaaaccccgacgcgcggatcgtcaacgacggcagcatcagcgtcgcggagaaaggcctggcggccttcgtcgcgccgtccgtggccaacaacggcgtgatcaacgcccgcctcggcaccgtggcgatggccgccggcaatgccgcgaccatcgacctctacggcgatggcctggtgtcgatcgccgtgaccgacccggttacccgcaagccgcaggatgcccaggcgctggtcagcaacggtggcgcgatccaggccgacggcggtagcgtgctgatcaccgccgagcaggcttcccgggtggtcgacaacgcggtcaacctgtccggcgtgatccttgcccgcggcaccgaggtgcgcgagggcagcgtggcgctggtaagcaagtccggggacatccagatcgccggcaagatcgacgtcagcggtccgaagaacggcggcgacgtgctggtcagcgggcagcaggtggccctggcgagcaccgccagcatcgacgcccgcggcaccgcacagggcggcagcgtgcgcatcggcggcgacttccagggccgcggcgagctgccacgggcgaagaacgctacgctggccaagggcgccagcatcgacgtctcggctaccggcaagggcaatggcggcctggcggtggtctggtccgacggcaatacccgcatggacgggcggatcctcgcgcgcggcggcgcccagggcggcaacggcggcctggtggagacctccggcaaggtcaacctgagcatcgccgacagcgcctacgtcagcgtcgccgcaccctacggcaacggtggcacctggctgctcgacccgaccaccctgcgcatcgtcgcctccggcggcacctccggctcggtggggggcgccaacggcgccagcggcgacgcgacggtgaatgcctcggtggttaccggtgcgctggcaggcggcaaggtgaccctcagcgccagcgaccggctgtcggtggaagcgccgctgatcaccagcaacctgggcggcgccagtcgcggcctggagctgatcgccaccggacctgccggtgcggtggatatctctgcgccgatcctgttccgcaacggcagcctggcaatccgcgccggcggcaacatcaatttcctcagcggcggcacgccgcagaccagcggcatcgtcgacctgggcagcggcaccctgtggatgcagaccagcaccgccggcaagatcagccagcaggccggtaccgcgctgatcgccgccaacctcgccggccgtgctggtagcatcgacctggcttcctgggacaactacgccggcaacctggcgctgcagaccttcaacggtacgctcaagtaccggcagagcaacgccaccggcgtgaccacgagcggcacggtgttcgatccgttcatcaaccagagcatgaccggcaccgcgcagaacatcgtctccagcgtcggtacgcggattctcgaggccaacagcgttggcaccaccggcaactacacgctgactgccgacggcaacagcgagttcgaccgcctggtgttcaccgcgctgccctatcggcgggtcagcggttccgccagtttccctaccaacgactcgtcggactacctggtgaccaacctgcgctaccaggtcaacggcagcaacgtcaccgccaccccgaacggcggtgcgcccagcgggttcaccgtcgccgccggcaacggcagcgtcaccacctggaccggaaactggggcaccagttggggcgtcaagggcttcggcggcgtgatcggcgtgaccgacgagctgcagtacgacgtcggcaccggcctgaccgaggaactgatcttcggcctcggcggcaagaccagccgcgtcgatacccgcctggacctgttcatgcgcgagggagcgttcaacagcttcgccgagcgcgcccaggtggagatgttcaagaccaccaccactgccggcgacatcctttcccgccagcagaccgccaccctgaccgccaatgacgctacccgcgtctacggtgatgtgaatccgactctgacggccacgatgtccggcatcaacgccatcgacgcctacgtcaacagtcagttcaacgacctctaccaggcgaccgccagcaccacggcgacccaggcgtcgaatgtcgggcagtacgcgatcaccggtaacgccaatggcagcgagtatttcagccagcgttaccaactggtgcgccaggacggcaggctgaccgtcacgccggcgcaattgatcgtcagcgccgacgccaagaccaaggtctatggcgacgccgatccgaccctcacctaccaggtcagtggcctgaagaacagcgataccgccgctggcgtgctgagcggcaacctcggccgggtggccggggagaacgtcggcaactacgggatactccagggcgggctgggcctcaacacggccaattacaccctcagctacgtcggcaacgacctgcgcatcaccccggcacaactgaacgtgatcgccgatgccaagaccaaggtctacggcgacctggatccggcgctgacctaccaggtctccggtctcaagcgcggcgataccgccggtgccgtgctcaacggcggcagcctgagccgcgtggctggcgagaacgtcggcgtgtacggcatcaaccagggtggactgggcctggtcagcagcaattacaccctgaactaccagggcaataacctgaccatcaccaaggcactgctcaatgtgatcgccgatgccaagaccaaggtctatggcgatgccgatccggcactgacctaccaggtgtccgggctgaagaacggcgacaccgccggtgccgtgctcaacggcggcagcctgagccgcgtggctggcgagaatgtcggcgtgtacggcatcaaccagggtggactgggcctgctcagcgcgaactacgacctgagctaccagggcaataacctgaccatcaccaaggcgctgctgaatgtgatcgccgacgccaagaccaaggtctacggcgatgccgatccgagcctgacctaccaggtcagcggcctgaagaacggtgataccgccggttcgatcctgaccggtgggttgaaccgcgccgcaggcgagaacgtgggtgtgtatggcatcaaccagggcgacctggcattgaacagcggtaactacgacctgagctaccagggcaataacctgaccatcaccaaggcactgctgaatgtgatcgccgacgccaagaccaaggtctacggcgatgccgatccgagcctgacctaccaggtcagcggcctgaagaatggcgataccgctggcgcggtgctcaatggcggcggcctggttcgtgtctccggcgaaaacgtaggcaactatgcgattcagcagggtggcctgggtctggtcagcggtaactatgacctggcttaccagggcaacaacctgaccatcaccaaggcactgctgaatgtgatcgctgatgccaagaccaaggtctacggcgatgccgatccgagcctgacctaccaggtcagcggcctgaagaacggcgacagcgccggttcgatcctgaccggcgggctgaaccgcgccgcaggcgagaacgtgggtgtgtatggcatcaaccagggcgacctggcattgaacagcggtaactacgacctgagctaccagggcaataacctgaccatcaccaaggcactgctgaatgtgatcgccgatgccaagaccaaggtctatggcgatgccgacccgagcctgacctaccaggtcagcggcctgaagaatggcgataccgctggcgcggtgctcaatggcggcggcctggttcgtgtctccggcgaaaacgtaggcaactatgcgattcagcagggtggcctgggtctggtcagcggtaactatgacctggcttaccagggcaacaacctgaccatcaccaaggcactgctgaatgtgatcgccgacgccaagaccaaggtctacggcgatgccgatccgagcctgacctaccaggtcagcggcctgaagaacggtgataccgctggcgcggtgctcaacggtggcagcctgagccgcgtggctggcgagaatgtcggcgtgtacggcatcaaccagggcgacctggcattgaacagcggtaactacgacctgagctaccagggcaataacctgaccatcaccaaggcgctgctgaatgtgatcgctgacgccaagaccaaggtctacggcgatgccgatccgagcctgacctaccaggtcagcggcctgaagaatggcgataccgctggcgcggtgctcaatggcggcggcctggttcgtgtctccggcgaaaacgtaggcaactatgcgattcagcagggtggcctgggtctggtcagcggtaactatgacctggcttaccagggcaacaacctgaccatcaccaaggcactgctgaatgtgatcgctgatgccaagaccaaggtctacggcgatgccgatccgagcctgacctaccaggtcagcggcctgaagaacggcgacagcgccggttcgatcctgaccggcgggctgaaccgcgccgcaggcgagaacgtgggtgtgtatggcatcaaccagggcgacctggcattgaacagcggtaactacgacctgagctaccagggcaataacctgaccatcaccaaggcactgctgaatgtgatcgccgatgccaagaccaaggtctatggcgatgccgacccgagcctgacctaccaggtcagcggcctgaagaatggcgataccgctggcgcggtgctcaatggcggcggcctggttcgtgtctccggcgaaaacgtaggcaactatgcgattcagcagggtggcctgggtctggtcagcggtaactatgacctggcttaccagggcaacaacctgaccatcaccaaggcactgctgaatgtgatcgccgacgccaagaccaaggtctacggcgatgccgatccgagcctgacctaccaggtcagcggcctgaagaacggtgataccgctggcgcggtgctcaacggtggcagcctgagccgcgtggctggcgagaatgtcggcgtgtacggcatcaaccagggtggactgggcctggtcagcggtaactatgacctggcttaccagggcaacaacctgaccatcaccaaggcgctgctcaatgtgatcgccgacggcaagaccaaggtctatggcgacgctgacccgagcctgacctaccaggtcagcggcctgaagaacggtgacagcgccggctcgatcctgaccggcgggctgaaccgcgacgcaggcgagaacgtgggtgtgtatggcatcaaccagggcggcctggtgctgaccagtggcaactatgacctggcctaccagggtaatgacctgaccatcaccaaggcgctgctcaacgtattcgccgatgccaagagcaagcaggtcggcaccgccgacccggcgctgacctatcaggtttccggcctgaagaatggcgatagcgccggtcaggtgctcgccggcgggctcggtcgggtgggcggcgaagccgtaggccagtacgacatcctccagggtgggcttgccctcaccagcggcaactaccagctcaactaccagggcaacctgctgagcatcctgccgctgccggtcacgccgggcgacctggggcaactggcagcgctctccgacttgcgcgaactgcagaaggggcgcgatccggatacccccggggatgcggtctaccgcaccaccacgctggaaaacccgttcctcgaaaacccgttcctgcgcgcctacgctctgggcatggacgtcagcgatcctaacctgctgccggctaccgccgcgggtccggcggaggacgccagcgccaagcgggtggggcagttcaccgatcgtccgctcagggcagaggccgagagtggggcgggttgctcgaaccagagctacctggccgactactggagctgcttcaacaagcctctgaatttctaa

SEQ ID NO: 30512 - DNA, 999 bp, Pseudomonas aeruginosa
atggaccctcgcagtgaagtgctgctgcgccagcgccacctcttcgcgaccccgctgctgctggccggcctgcccgccgacgacctgctcgccgagctaccgcaggcccagggctggagctggcacgccggcgagcaggcgcagttggacgcccgcttccccggccgtagccgtttcgacacgcgcgcgccgactggcgcctggacttcggccgttctgttcctgcccaagtcccgcgaactgaccgactacctgctggccagcctggccgcccgcctgcccggcggcgaactcttcctggtcggcgaaaagcgcggcgggatcgagcgcgcgagcaagcagttggccgcctacggcaagccccgcaaactggatagcgcgcggcattgccagctctggcaggtgcgtatcgaacaggcgccggccgagcccgacctgcacgccctggcccagcgctacagcctgccgctggccgatggcgagctgcaggtggtgagcctgccgggggtgttcagccatggccgcctggatcgcggcagcgcgctgctgctggggcaactgcaagccctgcccggcggccatctgctggacttcggctgcggtgccggggtactcggggcggtcctcaagcgtcgctaccccgccagtcgcctgagcctgctcgacgtcgacgccttcgctgtcgagagcagccgactgaccctcgccgccaacggcctggacggcgaagtgatcgccgccgacggcatcgacggcgcgccgcgcgaactcgccgcgatcgtcagcaacccgcccttccaccagggcgtgcacaccgactaccaggcctccgagcgcctgctgcaacgcgccgccgaacacctggcgccgggcggcgaactgcgcctggtcgccaacagcttcctgaagtacccgccgttgatcgaacgccacctcggcccctgccggacactcgccgaaggcgacggtttccgcatctactccgcccgtcgctcctga

SEQ ID NO: 30513 - DNA, 639 bp, Pseudomonas aeruginosa
atgcccgtacatgagatccgccaccccctcatccgccacaaactgggcctgatgcgccgtgccgatatcagcaccaagaacttccgcgaactggcccaggaagtcggcgccctgctgacctacgaagcgaccaaggacctgcccctggaacagtacgaaatccccggatgggccggcccggtgacggtggagaagatctccgggaagaagatcaccgtggtgccgatcctgcgcgccggcatcggcatgctcgacggcgtgctcagcctgattcccggcgccaaggtcagcgcggtcggcgtcgcccgcaacgaagagaccctggaagcacgcacctacctggaaaaactggcgccggacatcgccgagcgacgctcgctgatcatcgacccgatgctcgccaccggtggctcgatggtcgccaccatcgacctgctgaagaaggccggcagcaaggaaatccgcgccatggtgctggtcgccgcccccgagggcatcgaggcggtacgcaaggcccacccggacgtgatcatctataccgcctcgatcgacgagaagctcgacgagaacggctacatcattccgggcctgggcgacgccggcgacaagatcttcggtaccaagcagaaggaagcctga

SEQ ID NO: 30514 - DNA, 918 bp, Pseudomonas aeruginosa
atgcacattctcttgaccggcggtaccggcctgatgggtcgccgcctgtgcgcccgctggcgacaggccggacaccggctgaccgtgttcagccggcggccgcagcaggtggaatcgctgtgcggcgtcggcgtgcgcggcatcgatcgtttcgacgagtacggcgaccagccgctcgacgcggtggtcaacctggccggcgagccgatcgcggacaaaccctggagccacaagcgcaaggcgctgctgtgggaaagccgggtacgccttaccgagcgcctggtggaatggctggacgctcgtgagcagcgcccggaccttctgttatcgggttctgcggtgggttggtatggcgacagcggcgagcgcccggtgaccgaggagggggcggcggccggcgaggatttcgctagcgagctatgcctagcctgggagcagatcgcccgcgaggcggagaagctcggcacccgtgtcgtgctgttgcgcaccggcctggtgctggcccccgagggcggcttcctcgggcgcctgttgccgctctaccggctcggcctgggcggaccgctgggtgacggccggcaatggatgccgtggattcatatcgaggatcaaatcgagctgatcgattttcttttgcggcggcccgatgccagcggtccctataatgcgtgcgctcccaacccggtgcgcaaccgcgatttcgccaaggccctgggccgggcgctgcacaagccggcgcggataccgacccccgggttcgtcctgcgcctcgggctgggagaaatgtccggattgctgctcggcggccagcgagccttgccgcaacgcttgcaggacgccggctaccgttttcaattcaccgacctggacgtggcgctggccgatgtcctggacgcccgacgaaaggatcaggcatga

SEQ ID NO: 30515 - DNA, 798 bp, Pseudomonas aeruginosa
atggcggttgagtcggccgcggtcggcgttttcgattccggggtcggcgggctcagcgtattgcgtgagattcgtgcgcgcctgccatccgaatcgttgctctacgtcgccgacaacgcccatgtgccctacggcgagaagagcgcggagtacatccgcgaacgctgcgagcggatcggtgatttccttctggagcagggcgccaaggctctggtactggcctgcaataccgcgacggctgcggctgcggcggaattgcgcgaacgttatccgcaggtgccgctggtggccatggagcctgcggtgaagccggccgcggcggccacccgcaacggtcgggtcggcgtcctggccaccaccggaactctgaagagcgcgcgtttcgccgccttgctcgaccgcttcgccagcgacgtacaggtcttcacccagccctgcccggggctggtcgagcgcatcgaagccggcgatctctatgggccgcaaacccgggcactgctggaacgcctgctggcgcccatcctcgaacagggctgcgatacgctgatcctcggctgtactcattatcccttcgtcaaacccctgctggccgagctgatcccggcggagatggcggtgatcgatacgggagcggctgtcgcccggcagctggagcgcgtattgtcggcgcgggcgctactggcctctggccaggccgcgacgccgcgtttctggaccagcgcgctgccggaggagatggaaaggatcctgccgatcctctggggaagcccggaaagcgtaggaaaattagtcgtttag

SEQ ID NO: 30516 - DNA, 759 bp, Pseudomonas aeruginosa
atgctgagcgacgaggaactgctgcgctacagtcgccagatcctgctggcgcaggtcgacgtcgagggccagctgcgcctgaagcgcagccgcgcactgatcgtcggtcttggcggcctgggttcgccggtggcgctgtacttggccgcggccggggtcggcgagctgcacctggcggatttcgatacggtcgacctgaccaacctgcaacggcaggtcatccacgatggcgccagcgtgggtatcggcaaggtggagtcggcgatgcgccggctgggcgcgctgaatccgcagatccgcctggtcagccatagcgccgcgctggatgaggactccctcgatgccgccgtggcggcggtcgacctggtgctcgactgcaccgacaacttcgccacccgcgaggcggtcaacgtcgcctgcgtgcgcgccggcaagccgctggtcagcggcgcggcgatccgtctcgagggccagctttcggtattcgatacccgccgcgacgaaagtccctgctaccactgcctctacgggcacggcagcgaggccgagctgacctgcagcgaggccggcgtgatcggtccgctggtggggctggtcggtagcctgcaggcgctggaggcgctcaagctgctggccggtttcggcgaaccgctggtgggccgcctgctgctggtggacgccctcggcacgcgcttccgcgaattgcgggtgcgtcgcgatccttcctgtgccgtctgcgggcaacgccatggcggttga

SEQ ID NO: 30517 - DNA, 831 bp, Pseudomonas aeruginosa
atgaccactatctgtacccttctcaaggattcccaactgcccgattcgcccagcgcccggctcgacaccgagttgctgctggcggcggcgatgggcaagccgcgcagcttcctgcgtacctggccggagcgcatcgtgccgcgcgaggccaacgagcggttcgacgactggatcgcccgtcggcgcaacggcgagccggtggcctacatacttggccaccagggcttctggagcctggacctggaggtcgcgccacacaccctgatcccgcgcccggacaccgaactgctggtggaaaccgcgctggcgaccctcgcggcggacaccgctaccgtgctcgacctgggcaccggcaccggcgccatcgccctggccctggccagcgaacggccgctgtggacggtgactgcggtggaccgcgtggaagaggccgtggcgttggccgagcgcaatcgccagcggctgctcctggagaacgtcgaggtgcgccgcagccactggttctccgctctcgatggccgacgcttccggatgatcgtcggcaatccgccgtatatccctgccagcgatccgcacctgagcgagggcgacgtgcgtttcgagccgaagagcgcgctggtcgcgggtagcgatggcctcgacgatatccgccagatcgtcgcccaggcgccgcggcatttgctggacgaaggctggctgctgctcgagcacggctatgatcaaggggcggcggtgcgcgaactgctcggcgcccgcggcttcgccggggtacatacgttgcgcgacctcggcggcaacgagcggatcacactcggacaatgggcatgctga

SEQ ID NO: 30518 - DNA, 1269 bp, Pseudomonas aeruginosa
atggccttcattgccctcggcatcaatcacaagaccgcctcggtggctgtccgcgagcgcgtggctttcactccggaacagatggtcgaggcgctgcagcagctctgccgcctgaccaccagccgcgaggcggccatcctgtcgacctgcaaccggagcgaactctacctggagatcgaccatccgaccgcggacgacgtgctcgcctggctggcggactaccatcgcctgactctcgacgagttgcgcgcctgtgcctatgtgcaccaggacgaagacgcggtgcgccacatgatgcgcgtggcctccggcctcgactcgatggtcctcggcgagccgcagatcctcggccagatgaagtcggcctacgccgtcgcgcgcgaggccggcaccgtcggtccgctgctcggccgcctgttccaggccaccttcagtacggcgaagaccgtccgcaccgataccgccatcggcgagaacccggtgtccgtggcgttcgccgcggtgagcctggccaagcagatcttcagcgacctgcaccgcagccaggcgctgctgatcggcgccggcgagaccatcaccctggtcgcgcgccacctgttcgagcaaggcgtgaagcgcatcgtggtggccaaccgcaccctggagcgcgccagcctgctcgccgagcagttcggcgcccatgcggtgctgctttcggagatccccgaggagttggccaacagcgatatcgtcatcagctccactgccagccagttgccgatcctcggcaagggcgccgtggagcgcgcgctgaagcagcgcaagcacaagccgatgttcatggtcgacatcgccgtgccgcgcgacatcgagccggaagtcggcgaactggacgacgtctacctctatagcgtcgacgacctccacgaagtagtggcggagaatctcaagagccgccagggcgctgcccaggccgccgaggaactggtcggcagcggcgtcgccgagttcatgcagcgcctgcgcgaactggccgcggtggacgtgctgcgcgcctatcggcagcaggccgagcgcctgcgcgatgaggagctgggcaaggcccagcggcaactggccaacggtgccgaccccgccgaggtgatggcccagctggcccgcggcctgaccaacaaactgctgcacgcgcccagcgtgcagatgaagaaaatgtccgccgagggccgcatcgacgcgctggccctggcccaggagctgttcgccctcgacgagggcgcgccgcgccactga

SEQ ID NO: 30519 - DNA, 942 bp, Pseudomonas aeruginosa
gtgtccaagatgatggtcttcacggggaacgctaaccccgatcttgcacgacgcgtcgtgcgtcagctgcacattcctcttggcgatgtttcagttggcaaattctccgatggcgaaatcagcgtcgaaatcaacgaaaacgtccgcggcaaggacgtattcctgattcagccgacctgcgcgccgaccaacgacaacctgatggaactggtggtgatggccgatgccttccgccgctcctcggccactcgtatcaccgctgtcatcccctacttcggctatgcccgccaggatcgccgtccgcgttccgcccgcgtggccatcagcgccaaggtagtggccgacatgctgaccgtcgtcggggtcaaccgtgtcctcacggtcgacctgcacgcggatcagatccagggcttcttcgatatcccggtagacaacatctacggttcgcccgtgctggtggacgatatcgaagaccagcgcttcgagaacctgatgatcgtctccccggacatcggcggcgtggtgcgcgcgcgcgccgtggccaagtccctgggcgtggatcttgcgatcatcgacaagcgtcgtcccaaggccaaccagtccgaagtgatgcacatcatcggtgacgtcgaaggccgtacctgcgtactggtagacgacatggtcgataccgccggcaccctcggtcacgccgccaaggccctgaaagagcacggcgccgccaaggtcatcgcctactgcacccacccggtgctgtccggccgtgccatcgagaacatcgagaaatccgtactggacgagctggtggtgaccaacaccatcccgctgtccgccgctgcccaggcctgtggccgcatccgccagctggacatcgctccggtcgttgcggaagccatgcgccggatcagcaacgaagaatcgatcagcgcgatgttccgctga

SEQ ID NO: 30520 - DNA, 1101 bp, Pseudomonas aeruginosa
atgggattcaactgcggcatcgtcggcctgcccaacgtcggcaagtccaccctgttcaacgccctgaccaaatccggtatcgcggcggaaaacttcccgttctgcaccatcgagccgaacagcggcatcgtgccgatgcccgacgcgcgcctgaacgccctggccgagatcgtcaagcccgagcgcgtactgcccaccacaatggaattcgtcgacatcgccggcctggtggcgggcgcctccaagggtgagggcctgggcaacaagttcctcgccaacatccgcgagaccgacgccatcgcccacgtggtgcgctgcttcgaagacgacaacgtgatccacgtgtccaacagcgtcgaccccaagcgcgacatcgagatcatcgacctcgaactgatcttcgccgacctcgacagctgcgagaagcaactgcagaaagtcgcccgcaacgccaagggcggcgacaaggaagccctggcccagaaggccctgctggaaaagctcatcccccacttcaccgagggcaagccggcgcgttcgctgctgaagaacctcggtgacgaggagaagcgcctggtgcgcagcttccacctgctgaccagcaagccggtgatgtacatcgccaacgtcgccgaggacggcttcgagaacaacccgcacctggatgtggtgaaggccatcgccgaggaagaaggcgcggtggtggtgccggtgtgcaacaagatcgaagccgagatcgccgagctggaagacggcgaagagaaggacatgttcctcgagtccctcggtctcgaggaacccggcctgaaccgtgtgatccgtgccggctacggcctgctcaacctgcagacctacttcaccgccggggtgaaggaagtccgcgcctggaccgtccgcgtcggcgccaccgccccgcaggccgccggcgtgatccacaccgacttcgagaaaggcttcatccgcgccgaagtggtcgcctacgacgacttcatccagttcaagggcgaacagggcgccaaggaagccggtaaatggcgcctggaaggcaaggactacatcgtcaaggacggcgacgtgatgcatttccgcttcaacgtgtaa

SEQ ID NO: 30521 - DNA, 1008 bp, Pseudomonas aeruginosa
atgcctgttcgacttctcaaccgtttccgccacgccgccctggcgtgcctgctcggttcgctttccctcaatgcggcggccgatcccgtcacccttaccctctacaatggccagcacgccgccaccggtatcgccatcgccaaggccttccaggacaagaccggcatccaggtgaagatccgcaagggcggcgatggccagctcgccagccagatcaccgaggaaggcgcacgctcgccggccgacgtgctctacaccgaggaatcgccaccgttgatccgcctggccagcgccggcctgctggccaagctggagccagagaccctggccctggtcgagccggagcacgccggcggcaacggcgactggatcggcatcaccgcccgcacccgggtactggcctacaacccgaagaagatcgacgagaaggatctgccgaagagcctgatggatctttccgatccgtcctggtccggccgtttcggcttcgtgcccaccagtggcgccttcctcgaacaggtcgccgccgtgatcaagctcaagggccaggaggaagccgaggattggctgaccggcctgaaggccttcggctcgatctacaccaacaacgtcaccgccatgaaagccgtggagaacggcgaggtcgacatggcgctgatcaacaactactactggtacaccctgaagaaggaaaagggcgagttgaactcgcgcctgcactacttcggcaaccaggacccgggcgcgctggtcaccgtctccggcgccgcggtgctcaagtccagcaagcaccccagggaagcccagcagttcgtcgccttcatgctcagcgaggaaggccagaaggcgatcctcagccagtccgccgagtacccgatgcgcaaggggatgcaggccgatccggcgctgaagccgttcgccgaactggacccaccgaaactgaccccggccgatctgggtgaggccagcgaggccctcagcctcgaacgcgacgttggcctgaattga

SEQ ID NO: 30522 - DNA, 1017 bp, Pseudomonas aeruginosa
atgcgcgttttctacgataaagactgtgacctctcgatcatccagggcaagaaagttgccatcatcggctacggctcccagggccacgcccatgcctgcaacctgaaggactccggcgtcgacgtcaccgtgggcctgcgtagcggctccgccaccgtggccaaggccgaagcgcacggtctgaaggttgccgacgtgaagaccgccgtcgccgcagccgacgtggtcatgatcctcaccccggacgagttccagggccgcctgtacaaggaagagatcgagccgaacctgaagaagggcgccaccctggccttcgctcacggcttctccatccactacaaccaggtcgtcccgcgcgccgacctcgacgtgatcatgatcgcgccgaaggcaccgggtcacaccgtgcgttccgagttcgtcaagggcggtggcatccctgacctgatcgccatctaccaggacgcttccggcaacgccaagaacgtcgccctgtcctacgcctgcggcgtcggcggcggtcgtaccggtatcatcgaaaccaccttcaaggacgagaccgaaaccgacctgttcggtgagcaggccgttctctgcggtggttgcgtcgagctggtcaaggccggtttcgaaaccctggtcgaagccggttacgcgccggaaatggcctacttcgagtgcctgcacgagctgaagctgatcgtcgacctgatgtacgaaggcggcatcgccaacatgaactactccatctccaacaatgccgaatacggtgagtacgtaaccggtccggaggtgatcaacgccgagtcccgtgctgccatgcgcaacgccctgaagcgcatccaggacggcgagtacgcgaaaatgttcattaccgaaggtgcggccaactacccgtcgatgactgcctaccgccgcaacaacgccgctcacccgatcgagcagatcggcgagaagctgcgcgcgatgatgccgtggatcgcagccaacaagatcgtcgacaagagcaagaactaa

SEQ ID NO: 30523 - DNA, 492 bp, Pseudomonas aeruginosa
atgcgacacatcatttccctgctgctggaaaacgagccaggcgcattgtcccgcgtggtcggcctgttctcccaacgcaactacaacatcgaaagcctgaccgtggcgccgaccgaggacccgaccctgtcgcgtctgacgctgaccaccgtggggcacgatgaggtgatcgagcagatcaccaagaacctcaacaagctgatcgaagtggtcaagctggtggatctgtcggaaagcgcccatatcgagcgcgagctgatgctggtgaaggtcaaggccacgggcgcccagcgcgccgaggtcaagcgcaccaccgatatcttccgtgggcagatcgtcgacgtcaccagtagcgtctataccgtgcaactggcgggtaccagcgacaaactggacagcttcatccaggccatcggcactgcgtcgatcctggaagtggtccgcagtggcgtcactggcatcgcccgtggcgacaagactctgagcatctga

SEQ ID NO: 30524 - DNA, 1725 bp, Pseudomonas aeruginosa
gtggagcttttatctggcgctgaaatggtcgtccgctcgttgcgcgacgaaggcgttaagtacatctacgggtacccgggtggtgccctcctgcatatctacgacgcgctcttcaaggagcacgacgtgacccacatcctggtgcgccacgaacaggcggctacccatatggccgacggctacgcccgcgccaccggcaagcccggtgtcgtgctggtgacttccggcccgggcgcgaccaacgccatcaccggtatcgccaccgcatacatggactccatcccgatggtgatcctgtcgggccaggtgccgagcaacatggtcggtaccgatgcgttccaggaaaccgacatggtcgggatctcccggccgatcgtgaagcacagcttcatcatcaagcatccctcggaaattcccgaggtgatcaagaaggccttctacctggcgcagtccggtcgtccggggccggtggtcgtggatattccgaaggacatgggcgacccgacgcagaaattcgaatattcctatccgaagaaggtcaagttgcgttcgtacagcccggccgttcgcggtcactcgggacagatccgcaaggccgccgagatgctcctggccgccaagcgcccggtggtctattccggcggcggcgtgatcatgggcaatgccgcggcgccgctgaccgagctggcgcagatgctcaacctgccggtgaccaacaccctgatgggcctcggcgggtatcccggcgcagaccgccagttcctcggcatgctcgggatgcatggcagcttcaccgccaacctggcgatgcatcacagcgacgtgatcctcgcggtcggcgcgcgtttcgacgaccgggtcatcaacggtgcggcgaagttctgcccgaacgccaagatcatccacatcgacatcgatccggcgtcgatttccaagaccatcaaggccgacatcccgatcgtcggcccggtggacagcgttctcaccgaaatggtcgcgatcgtcagggaaatcggcgagaccccgaaccaggatgcccaggctgcctggtggaagcagatcgacgagtggcgtggtaaccgtgggttgttcccgtacgacaagggcgacggcagcatcatcaagccgcagaccgtcatcgagacgctctacgaggttacccatggcgatgccttcatcacctccgatgtcggccagcaccagatgttcgcctcgcagtactacaagttcaacaagcccaatcgctggatcaactccggcggtctcggcaccatgggcttcggcttcccggcggcgatgggcatcaagctcaacttcccggacgacgatgtcgcctgcgtgaccggcgagggcagtatccagatgaatatccaggaactgtctacctgcctgcagtacgacctgccggtgaagatcgtcaacctgaacaatggtgccctgggcatggtccgccagtggcaggacatgcagtacaacagccgttattcgcattcctacatggaatccctgccggacttcgtcaagcttgccgaagcctacgggcatgtcggcatgcgcatcaccgacctgaaggatctgaagccgaagatggaggaggcgttcgccatgaagaatcgcctggtcttcctcgacatccaggtggacgccagcgaacacgtctatccgatgcagatccgtgacggcgcgatgcgcgacatgtggctgagcaagacggagcgtacctga

SEQ ID NO: 30525 - DNA, 2325 bp, Pseudomonas aeruginosa
atgacgcgtccccgatccccccgttcccgtaacagcaaagcacgcccggcacccggcctgaacaaatggctcagctgggctctcaagctcggcctcgtcggcctggtgctcctcgccggcttcgccatctatctcgatgccgtggtgcaggagaaattctccggccggcgctggaccatcccggcgaaggtctatgcccgcccgctggagctgttcaacggcctgaagctgagcagggaagacttcctgcgcgaactcgacgccctcggctaccgtcgcgagcccagcgtgagcggccctggaaccgtatcggtggcggccagcgcggtcgaactcaatacccgtggcttccagttctacgaaggcgcggaaccggcccagcgcgtgcgcgtgcgcttcaacggcaactacgtcagcgggctgagccaggccaacggcaaggaactggcggtggcgcgccttgagccgctgctgatcggcggcttgtatccggcgcaccatgaggatcgcatcctggtcaagctcgaccaggtgccgacctacctgatcgacaccctggtcgcggtcgaggatcgcgacttctggaaccaccatggtgtgtcgctgaaatccgtggcgcgggcggtgtgggtcaacaccacggccggccagttgcgccagggcggcagcaccctgacccagcagttggtgaagaacttcttcctgagcaatgagcgcagcctgagccgcaagatcaacgaagcgatgatggcggtgctgctggaactgcactacgacaagcgcgacatcctcgagtcctatctcaacgaggtgttcctcggccaggatgggcaacgagcgatccatggcttcggcctggccagccagtatttcttcagccagccgttggccgagctcaagctcgaccaggtggcgctgctggtcggcatggtcaaggggccgtcctacttcaacccgcggcgttacccggatcgtgcgctggcgcggcgcaacctggtgctcgacgtgctcgccgagcagggcgtggcgacccagcaggaagtcgacgccgccaagctgcgcccgctcggcgtgacccggcagggcagcatggccgacagctcctatccggccttcctcgacctggtcaagcgccagttgcgccaggactaccgcgacgaggacctgactgaggaagggctgcgcatcttcaccagcttcgatccgatcctgcaggagaaggccgagacctccgtcaacgaaacgctcaagcgtctcagtgggcgcaagggggtcgaccaggtcgaggcggcgatggtcgtgaccaatccggaaaccggtgagatccaggccctgatcggcagtcgcgacccgcgcttcgccggcttcaaccgggccctggacgcggtgcggccgatcggttcgctgatcaagccggcggtctacctgaccgctctcgagcggccgagcaagtacaccctgaccacctgggtacaggacgagcccttcgcggtgaaaggccaggacggccaggtctggcgaccgcagaactacgaccggcgctcgcatggcacgatcttcctgtaccagggcctggcaaactcctacaacctgtccaccgccaagctcggcctcgacgtcggtgtgcccaacgtgctgcagaccgtcgcccggctgggtatcaaccgtgactggccggcctatccgtcgatgctgctgggcgccggttcgctcagtccgatggaggtcgccaccatgtaccagaccatcgccagcggcggcttcaacacgccgttgcgggggatccgcagcgtcctcactgccgacggccagccgctcaagcgctatccgttccaggtcgaacagcgcttcgactcgggcgccgtctacctggtgcagaacgccatgcagcgggtcatgcgcgaaggcaccgggcgttcggtgtacagtcaattgccgtcgtcgctgaccctcgccggcaagaccggcaccagcaacgactcgcgcgatagctggttctccggtttcggcggcgacctccaggctgtggtctggctcggtcgcgacgacaacggcaagacgccgcttaccggcgccaccggtgccttgcaggtgtgggccagcttcatgcgcaaggcgcatccgcaatcgctggaaatgccgatgccggagaacgtggtgatggcctgggtcgacgcgcagaccgggcagggctcggcggcggattgcccgaatgccgtacagatgccctatattcgtggcagcgagcccgcccagggcccaggctgcgggagccagaaccccgccggcgaggtgatggactgggtacgtggctggctgaattga

SEQ ID NO: 30526 - DNA, 984 bp, Pseudomonas aeruginosa
gtgttggtcctctggttgtccctcgccctcggtcccgtcagcctgccgctgggcgataccctgcgcgccgcgctgcgcctggccgggctgccgctcgatggaacgggcctggcccaggcggaaatgatcctcggccagatccgcctgccgcggaccctgctcggcctggccgtgggcgcggtgctggcgctgtccggggtggcgatgcagggcctgttccgcaacccgctggccgatccagggctggtcggggtgtccagcggcgcggccctcggcgcggcgctggccatcgtgttcggcgcctcgctgggtggcttgccggcgttcctcgcgccttacctgctgtcactgtgcgccttcggcggcggcctgggggtgacctggctggtctatcgacttggccgccgcgatggccagaccagcgtggccaccatgttgctggcagggatcgccttgaccgcgctgtccggcgcggtgatcggactgtttacctatctcgccgatgacgccaccttgcgtaccctgaccttctggaacctgggcagcctgaacggcgccagctacccacgactctggccgctgctgctggtggcgctgctggtggcctgctggctaccgcgccgggcagatgcgctgaacgcactgctgctcggcgagtccgaggcccgtcacctgggcttcgacgtcgagcgattgaaggccgaactggtgctttgcactgccctcggcgtcggcgccgcagtggcggcggcggggatgatcggcttcatcggcctggtggtgccgcacctgatccgtctggttgccggtccggatcatcggacgttgctgccggcctcgatgatggccggcgccattctcctgctgcttgccgacctgctggcgcgcctggcgctggctccggcggagttgccgatcggcatcgtcacggcactgatcggcgcgccgttcttcctttatctgctattgcgggggcgggcctga

SEQ ID NO: 30527 - DNA, 1236 bp, Pseudomonas aeruginosa
atggctgaatcacgccctgcgcgccgtttcgcgcgcatcgaccgccttcccccctacgttttcaatatcaccgccgaactgaagatggccgctcgtcgccgtggcgaggacatcatcgacctgagcatgggcaatcccgacgggccgaccccgccgcatatcgtcgagaagctctgcaccgtcgcccagcgcgaagacacccatggctactccacctcgcgtggcatcccgcgcctgcgccgggccatctcgcactggtaccgtgaccgctacgacgtgcagatcgacccggaaagcgaagccatcgtcaccatcggctccaaggaaggcctggcgcacctgatgctggcgaccctcgaccatggcgacaccatcctcgtgcccaacccgagctatccgatccacatctacggtgcggtgatcgccggcgcccaggtgcgctcggtgccgctggtgccgggcatcgatttcttcaacgagctggaacgggcgatccgcgaatcgattcccaagccgcgcatgatgattctcggtttcccctccaaccctaccgcgcagtgcgtcgagctggacttcttcgagcgcgtggtggcgctggccaagcagtacgacgtgatggtcgtgcacgacctggcctatgcagacatcgtctacgacggctggaaagcgccgtcaatcatgcaggtaccgggtgccaaggatatcgccgtggagttcttcaccctgtcgaagagctacaacatggccggctggcggatcggcttcatggtcggcaatcccgagctggtctcggccctggcgcggatcaagagctaccacgactacggcaccttcacgcccctgcaggtggcggccattgccgctctggaaggcgaccagcagtgcgtccgcgatatcgcccggcagtaccagcagcgccgcgacgtcctggtgaaggggctgcgcgaggccggctggatggtggagaacccgaaggcctcgatgtacgtctgggcgaagatccccgagccctacgcgcatctgggctcgctggagttcgccaagaagctgttgcaggacgccaaggtctcggtgtcgccggggatcggcttcggcgactacggcgacgatcatgtgcgtttcgccctgatcgagaaccgcgaccgcctgcgccaggcggtgcgcgggatcaaggcgatgttccgcgccgacgggctgctgtcgccgcagaggaaggtcgatagcctggcggagtga

SEQ ID NO: 30528 - DNA, 447 bp, Pseudomonas aeruginosa
atgtccaccaaagcaaaacaacagagcagccagcagatgacccgcggcttcgaaccctatcaggaaaccaagggcgaggagtacatgagcgagcgcatgcgcgcgcacttcaccgcgatcctgaacaaatggaaacaggagctgatggaagaggtcgaccgtaccgtgcatcacatgcaggacgaagcggccaacttccccgatccggccgaccgcgccagccaggaagaagaattcagcctggaactgcgcgcccgcgaccgcgagcgcaagctgatcaagaagatcgacgagaccctgcaactgatcgaagacgaagagtacggctggtgcgactcctgcggcgtcgagatcggcatccgtcgcctggaggcgcgccccaccgcgaccctctgcatcgactgcaagaccctcgcggaaatccgcgagaagcaactcggctcctga

SEQ ID NO: 30529 - DNA, 882 bp, Pseudomonas aeruginosa
atgacctcttcctatgtaggccgcttcgccccgacgcccagcggctacctgcacttcggttccctggtggcggccgtcgcctcctacctggacgcgcgtgccgtcggcggccgctggctggtgcgcatggaggacctcgacccgccccgcgaagtcccgggcgcccagcaggcgatcctggaaaccctggagcgctacggcttcgaatgggacggcgcggtggagcggcagagcgaacgcttcccggcctacgccgcagtggtcgagcaactgctgcgcagcggcctggcctacgcctgcacttgctcgcgcaagcagcttgagggattcgccgggatctacccgggcttctgccgcgacgccgggcacgcccgcgaggatgcggcgatccgcctgcgcgtgccggagctggaatatcgcttcgtcgaccgcgtgcagggcgaagtccgccagcatctcggccgcgaggtcggcgatttcgtcatccagcgccgcgacggtctctacgcctaccaactggcggtggtgctggacgacgcctggcagggcatcaccgacatcgtccgcggcgccgacctgctcgactcgaccccgcgccagctttacctccaggaactgctggggttgagccagccgcgctacctgcacgtgccgctgatcgtccagccggacgggcacaagctcggcaagtcctaccgctccccaccactgcccgccgagcaggccgccgcgccgctgacccgcgccctgcgcgcgctcggccagcggccgccggccgaactggcccaggccagcgccagcgaggcgctggcctggggcgtggcgcactgggacgccacgcgcatcccgcgctgcgctacccttcccgaggaacgcctgtag

SEQ ID NO: 30530 - DNA, 1404 bp, Pseudomonas aeruginosa
atgctgaaaaagctgatccagaccattcgttcccccctgcgccgtccgcgcgccgtccgtacaaccccggaagtcatcggtaacaaccagcactccctgcgccgggaccagttcagccggaacgccgtcaaggtcgtcgagatcctccagcgggccggctaccaggcctacgtggtcgggggctgcgtacgcgaccagatgctcggcatcgctcccaaggacttcgatgtcgccaccagcgccacgccggagcaggtccgcgccgaattccgcaacgcgcggatcatcggccgccgcttcaaactggtacacgtgcacttcggccgcgagatcatcgaggtcgccaccttccgcgcccatcatccggaaggccaggacgatggcgatagccgcgcgtccagcaacgaaagcggccgcatcctgcgcgacaacgtctatggcagcctggaagacgacgcccagcgccgcgacttcaccatcaatgccctgtacttcgacgtcaccagcgagcggctgctggactacgccaatggcgttcacgacatccgcaatcgcctgatccgcctgatcggcgatccggagcagcgttatctggaagacccggtgcggatgctgcgggcggtacgtttcgccgccaagctcgacttcgagatcgagaagcacagcgccgcgccgattcgccggctggccccgttgctgcgggaaatcccttcggcgcgcctgttcgacgaggtgctcaagctgttcctcgccggccgggccgagcgcactttcgagctgctggtcgagtacgaactgttcgcgccgctgttcccggccagcgccaaggcactgcaggccaaccccgactacaccggcaagctgatccgccaggccctggccaataccgatgcgcgaattcgccagggcaagccggtaaccccggccttcctcttcgccgcactgctctggccggccctgccggcacgcgtcgcgcagttgcaggagaaaggcatgccggccatcccggcgatgcaggaagccgcccacgaactgatcagcgaacagtgccagcggatcgccattcccaagcgtttcaccctgccgatccgcgagatctgggatatgcaggaacgtctgccgcgacgccagggcaagcgcgccgacctgctcctggaaaacccgcgcttccgcgccggctacgacttcctcctgctgcgcgaaagtgccggcgaggaaaccgaaggactcggccaatggtggaccgattaccaggaagtcagcgacagcgagcggcgcaacatgatccgcgacctggtcagccaggaagacggcagcgccccgcgcaagcgtcgccgcggcggcaacagcggccgtcggcgccgcgggccgcgcaaggaaggcagcggcggaagcggcgaatga

SEQ ID NO: 30531 - DNA, 489 bp, Pseudomonas aeruginosa
atgatccagcgcgtctacgtggcgctgggcagcaacctggccgaaccgcgcgagcagatccaggctgccctcgatgccttcgagcggcttcccgagacccgcctggtcgccgtctcgccgctctacatcagcgacccgctcggccccgccgaccagccgcgcttcgtcaacggcgtggcggccctcgacaccaacctggcgccgctcgacctgctcgacgccctgcaggccatcgaactggaacaggggcgcgtccgcgacctgcgctggggtccgcgcacgctcgacctggacatcctgctgttcggcgaacaattgctcgacctgccgcgcctgaaggtgccgcactaccacatgcaggcgcgcgctttcgtgctctatcccctcgccgatctcgcccccgacctgcgcctgcccgatggccgccacctgccggagctgctcgcggcctgtccgttcgagggcatcgaacgccttccgggcgcctga

SEQ ID NO: 30532 - DNA, 801 bp, Pseudomonas aeruginosa
atgcctgatgtaaccctgaccaccctgcaagggttgaagcagagcggcgagaagatcgccatgctgacctgctacgacgccaccttcgcccacaccgccagccaggccggcgtggacgtgcttctggtcggagattcgctcggaatggtattgcagggtcacgacagcaccctgccggtcagcaacgaggaaatggcctatcacacggcctgcgtgaaacgcggtaacaaaggttccctgatcgtcaccgacctggccttcgaatccagccattccgtggcccagacccttgccgacgcggtccgcctgatgcaggccggcgcacacatggtcaagctggagggtggggtctggctggcggagccgatcgcccgcctggcacagatgggcgtgccggtctgcgcgcatctcggcctgaccccgcaggcggtcaacctgttcggcggcttcaaggtccagggccgccaggaaacccaggcgcgccagttgcgcgccgatgccatcgccctggagcaggccggcgccgccatgctgctgctggagtgcgtgcccagcgtgctggccgaagagatcacccaggcggtgaagatcccggtgatcgggattggcgccggtgcggcgaccgatggccaggtgctggtcatgcacgacatgctcggtctctcgctgaccggccgctcgcccaagttcgtcaaggatttcatgcaaggccaggagagcatcccggccgccatcgcggcctatgtccgcgccgtcaaggacgtgtccttccccgccgccgaacacggattcaacgcatga

SEQ ID NO: 30533 - DNA, 1665 bp, Pseudomonas aeruginosa
atgaagcaccacctcactccgctggatgccacgcaactcgacagttggcgcgccctggccgcccatcgccaggaactgcaggacttcaggatgcgccaggcgttcatcgacgatccggagcgcttcaagcggttttccttcagcgcctgtgggctgttcctcgacttctcgaagaacctgattcgccaggacaccatcgacctgctggtgaagctggccgaggaagcacggctgagcgacgcgatccgggcgatgttcgacggcgaggcgatcaatgcctccgagcgccggccggtactgcataccgcgctgcgtcgaccgatcggcgacaaggtgctggtcgatggcgtcgacgtgatgccggaagtccaccgcgtcctgcaccagatgaccgagctggtgggctacgtgcacaacggcctgtggcgcggctataccgaaaagccgatcaccgacgtggtgaacatcggcatcggcggctccttcctcggcccgcaactggtatccgaagccttgctgccattcgcccagaaaggcgtgcgctgccactacctggcgaacatcgacggtagcgagttccatgaactggccagccgcctgaacgccgagaccaccctgttcatcgtttcctccaagtccttcgggaccctggaaaccctgaagaacgcccaggccgcacgcgcctggtacctggcccagggcggcaccgaggaagagctttaccgccatttcatcgccgtctccagcaacaaggaggccgcgatcgcctttggcatccgcgaggaaaacatcttccccatgtgggactgggtcggcggccgctactcgctgtggtcggccatcggcctgccgatcgccatgtccatcggcatctccaacttcaaggagttgctgtccggtgcctacaacatggaccagcacttccagaccgcgccgttcgaacgcaacatcccggtgctgctcggcctgctcggcgtctggtacggcgacttctggggcgcgaacagccacgcgatcctgccctacgactactatctgcggaatatcaccgaccacctgcaacaactggacatggaatccaacggcaagagcgtgcgccaggacggcacgccggtcaccagcggcaccgggccggtgatctggggtggtgtcggctgcaacggccagcacgcctaccatcagttgctgcaccaaggcacccagttgatcccggcggacttcatcgtcccggtgagcagctacaacccggtggccgaccatcaccagtggctgtacgccaactgcctgtcgcagagccaggcgctgatgctcggcaagagccgcgaggaggccgaggccgaactgcgcgccaagggcctgccggaagccgaagtgcagcgcctggcgccgcacaaggtgattccgggcaaccgaccgagcaacaccctggtggtcgagcgcatcagcgcccgccgcctcggcgcgctgatcgccatgtacgagcacaaggtctacgtacagagcatcctctggggcatcaacgccttcgaccaatggggcgtggagcttggcaaggaactcggcaagggtgtctattcgcgcctggtcggcagcgaggaaaccccggccgaggacgcctcgacccaaggcctgatcgacttcttccgcggccgccatcgcggctga

SEQ ID NO: 30534 - DNA, 1938 bp, Pseudomonas aeruginosa
atgttcgagatcagcgtccacccggtgccggacgccgtccgccagcgtgcctacctgaacgacgacgactaccagcgcctgtaccgccaatccgtcgagaaccccgacgagttctggggcgagcaggccaaggccttcctcgattggttcaagccctggcacagcgtccaccacggcgacctgaggaaaggccaggccacttggttcaagggcggccagttgaacgtcgcctacaactgcatcgatcgccacctggaacgccgcggcgaacagatcgcgatcgtctgggaaggcgacaaccccagcgaatccgcgcacatcacctaccgcaagctgcaccacaacgtctgccgcctggctaacgtgctgaagagccgcggcgtggaaaagggcgaccgggtctgcatctacatgccgatgattcccgaggccgcctacgccatgctcgcctgcgcccgtatcggggcggtgcactcggtggtgttcggcggcttctcgccggactcgctgcgcgaccgcatcctcgatgccgactgccgcaccgtgatcaccgccgacgagggcgtgcgcggcggcaagtacatcccgctgaagcagaatgtggaaaaggcactgaaggactgcccggacgtctctaccgtggtggtggtcgagcgcacccagggcgacataccctgggtcgaaggccgcgacatctggtaccacgaggcgctccacgcggcctcagccgactgcccggcggaagcgatggacgccgaggacccgctgttcatcctctatacctccggcagcaccggcaagccgaagggcgtgttgcacaccaccgggggctacctgctcggcgcggcgatgacccacaagtacgtgttcgactaccacgatggcgacgtctactggtgcaccgccgacgtcggctgggtcaccggacacagctatatcgtctacggcccgctggccaacggcgccaccaccctcatgttcgagggcgtgcccaactacccggacgcctcgcgcttctggcaggtgatcgacaagcaccaggtgaatatcttctacaccgcgccgaccgcgatccgcgcgctgatgcgcgaaggcgacgccccggtccgccagacctcgcgcagcagcctgcgcctgctcggctcggtgggcgagccgatcaacccggaggcttgggagtggtactaccaggtggtcggcgagaagcgctgccccatcctcgatacctggtggcagaccgagaccggcagcatcctgatcaccccgttgcccggcgccactgcgctaaagccaggctcggctacccgcccgttcttcggcgtgcaacccgtgctgctcgacgagaaaggcaaggaaatcgacggcgcgggcagcggcgtactggcgatcaaggccagttggccgagtcagatccgcagcgtctacggcgaccaccagcggatgatcgacacctacttcaagccctaccccgggtattacttcagcggcgacggcgcgcgccgcgacgaggacggctactactggatcaccggccgggtcgacgacgtgatcaatgtctccggacaccggatcggcaccgccgaggtcgagagcgcgctggtcctgcacgatgcggtggccgaggcggcagtggtcggctgcccgcatgacgtgaagggccaggccatctacgcgttcgtcaccctgatggccggcagtcagcccagcgaggcgctacaacaggaattgctggccctggtcggcaaggagatcggcagcttcgccaagccggatcacctgcaatgggcgcccagcctgccgaagacccgctccggcaagatcatgcggcgtatcctgcgcaagatcgcctgcaacgagctggacagtctcggcgatacctcgaccctggccgatccgggagtggtgcaggggttgatcgacaaccgcctcaaccgctga

SEQ ID NO: 30535 - DNA, 198 bp, Pseudomonas aeruginosa
atgaattccgatgtgatcaaaggtaagtggaagcaactcaccggcaagatcaaggagcgttggggcgatctgaccgacgacgatctccaggctgccgacggacatgccgaatacctggtcggcaagctgcaggaacgctatggctggtccaaggaaagggccgaacaggaagttcgcgacttcagcgaccgcctgtga

SEQ ID NO: 30536 - DNA, 2106 bp, Pseudomonas aeruginosa
gtgaacccggtaaccaagcaattccagttcggtcagtcgaccgtcactctcgagaccggccgtatcgctcgccaggccaccggcgccgtactggtcaccatggacgacgtcagcgtgctggtcaccgtggtcggcgccaagtcgccggccgaaggccgcgacttcttcccgctgtccgtgcactaccaggaaaagacctacgccgcaggccgtatccccggtggtttcttcaagcgtgaaggacgtccttccgagaaggaaaccctgacctcgcgcctgatcgaccgtccgatccgtccgctgttccccgaaggtttcatgaatgaagtgcaggtcgtctgcaccgtcgtctccaccaacaagaagtccgatccggacatcgccgcgatgatcggcacctccgccgccctggcgatctccggcattccgttcgccggcccgatcggcgccgcccgcgtcggtttccatccggaaatcggctacatcctcaaccccacctacgagcaactgcagagttccagcctcgacatggtcgtggccggtaccgaagacgccgtgctgatggtggagtccgaggccgacgaactgaccgaagaccagatgctcggtgccgtgctgttcgcccatgacgagttccaggcggtgatccgtgccgtcaaggagctggccgccgaagctggcaagccggcctgggactggaaagccccggcggaaaacaccgtgctggtcaacgccatcaaggcagagctgggcgaagcgatctcccaggcctataccatcaccatcaagcaggaccgctacaaccgtctgggcgagctgcgcgaccaggccgtggccctgttcgccggcgaggaagagggcaagttcccggcttccgaggtcaaggacgtattcggcctgctggaataccgcaccgttcgcgagaacatcgtcaacggcaagccgcgtatcgacggtcgtgacacccgtaccgtgcgtccgctgcgcatcgaagtcggcgtgctcggcaagacccacggttccgcgctgttcacccgtggcgaaacccaggccctggtcgttgcgaccctcggcaccgcgcgtgatgcccagctgctggataccctggaaggcgagcgcaaggacgccttcatgctgcactacaacttcccgccgttctcggtaggcgagtgcggccgcatgggcagcccgggtcgtcgtgaaatcggccatggccgtctggcccgtcgtggcgtcgccgccatgctgccgacccaggacgagttcccctacaccattcgcgtggtttccgagatcaccgagtccaacggttccagctcgatggcctccgtgtgcggcgcctccctggcgctgatggatgccggtgtgccggtcaaggcgccggtcgccggtatcgccatgggcctggtcaaggaaggcgagaagttcgccgtcctgaccgacatcctcggtgacgaggaccacctgggcgacatggacttcaaggttgccggtaccgacaagggcgtcaccgccctgcagatggacatcaagatcaacggtatcaccgaagagatcatggagatcgccctgggccaggccctggaagctcgcctgaacatcctcggccagatgaaccaggtcatcgccaagccgcgcgccgagctgtccgagaacgccccgaccatgctgcagatgaagatcgactcggacaagatccgcgacgtcatcggcaagggcggcgcgaccatccgtggtatctgcgaagagaccaaggcctcgatcgacatcgaggacgatggcagcgtgaagatctacggcgaaaccaaggaagccgccgaggccgccaagctgcgcgtcctggcgatcaccgcggaagccgagatcggcaagatctacgtcggcaaggtggagcgcatcgtcgacttcggtgccttcgtcaacatcctgccgggcaaggacggcctggtgcacatctcgcagatcagcgacaagcgcatcgacaaggtcaccgacgtgctgcaggaaggccaggaagtgaaggtcctggtgctcgacgtggacaaccgtggccgcatcaagctgtcgatcaaggacgtggctgccgccgaagcttccggcgtgtaa

SEQ ID NO: 30537 - DNA, 270 bp, Pseudomonas aeruginosa
atggcactgagcgttgaagaaaaagcgcagatcgttaacgaatacaagcaagctgaaggcgacaccggttccccggaagtgcaggtagccctgctgtccgccaacatcaacaagctgcaggatcacttcaaggccaacggcaaggatcaccattcccgccgtggtctgatccgtatggttaaccagcgccgtaagctgctggactacctgaagggcaaagacgtgtctcgctacactgccctgatcggccgtctgggtctgcgtcgctaa

SEQ ID NO: 30538 - DNA, 915 bp, Pseudomonas aeruginosa
gtggcccaggtgaagcgtatccgccgctccatcagcggcatcctggtgctcgacaagccgcgcggcatgagttccaaccaggcactgcagaaagtccgctggctgctcaatgccgagaaggccggccacaccggcagcctcgacccgctggccaccggggtgctgccgctgtgcttcggcgaggcgaccaagttctcccagtatcttctcgatgccgacaagggttacgagacggtgatgcgcatgggcatcaccaccaccaccggcgacgccgagggcgaactgctcgccgagcgggacgtgaccgtcggtcgggacgatctcgaacaggccctgccgcgcttccgtggcgacatagagcaggtgccgccgatgtactcggcgctgaagaaagacggacagccgctgtacaagctcgcccgtgcaggagaggtagtggagcgcgaggcgcgttctgttactattacgcgcctggatttgctctccttcgagccgccctgtgcgaccctggccgtttcctgcagcaaaggcacctacgtgcgtacgctggtggaagatctcggccaggtcctgggctgcggcgcgcacgtcgcggcactgcggcggacccaggccgggccgttcgccctggcccaggcgatcaccctcgagacgctcgaacgcgtgcatgccgaaggtggtccggaagcgctggaccaattcctgatgccggaagacagcggcctgttgcattggccggtgttgcagttgtccgagcacagtgcgtactactggctgcacgggcagccggtgcgggccccggaagcgccgaagttcggctggctgcgggtgcaggatcacacaggtcgtttcatcggtatcggtgaagtgaccgacgacgggcgtatcgccccgcgtcgactgattcggtcataa

SEQ ID NO: 30539 - DNA, 1482 bp, Pseudomonas aeruginosa
atgagcaaagaagtactgctggttgttgagtcggtatccaacgaaaagggcgtaccggccggcgtgattttcgaggcgctggagctggctctggcgaccgccaccaagaaacgtttcgaggacgaggtcgacctgcgcgtcgagatcaatcgtcataacggcagctacgagactttccgtcgttggcacgtcgtcgccgacgaggactaccaggaccccgccaccgagatcaccgtcgaggacgtccaggagcagaagccgggcgcgaaggtcggcgaggtcatcgaagaaaagatcgaatccatcgagttcggccgcatcgctgcgcagactgccaagcaggtcatcgtgcagaaggtccgcgaggccgagcgcgcccaggtggtcgatgcctaccgcgagaaggtcggcgagatcatttccggtaccgtgaagaaggtcacccgcgacaacgtcatcgtcgatctcggcaacaacgccgaggcgctgctggcccgcgaccagatcattccacgcgagaccttccgcgttggcacccgcgtgcgtgccctgctgaaggagatccgtaccgagaaccgcggtcctcagctggtcctgtcgcgtaccgcgccggaaatgctgatcgagctgttccgcatcgaagtaccggaaatcgccgagcagttgatcgacgtgatggccgccgcccgtgacccgggctcgcgcgccaagatcgccgttcgttccaaggacaagcgcatcgacccgcagggcgcctgcatcggtatgcgcggttcgcgcgtccaggcggtatccggcgagatcggtggagagcgggtggacatcgtcctgtgggacgacaacccggcgcaattcgtgatcaacgccatggctccggccgaggtggcggcgatcatcgtcgacgaggatacccataccatggatatcgccgtcgccgaggacaatctggcgcaggctatcggccgcagtggccagaacgtccgtctggccagccagttgaccggctggaccctgaatgtgatgaccgaggcggatatccaggccaagcaacaggccgagaccggggatatcctgcagcgcttcgtcgacgagctggatgtcgacgaggaactggcccaggtactggtggaagagggcttcacgactcttgaggaaatcgcctacgtaccgatggaagagatgctcagcatcgatggcttcgacgaagacatcgtcaacgagctgcgctcccgtgccaaggatcgcctgctgaccaaggccattgcgaccgaagagaagctcgccgacgcacaaccggcagaagacctgctcagcctcgatggcatgagcaaggagctggccctggacctggcgctgcgtggcgtaaccacccgtgaagatctggccgagcaatcgatcgacgatctgctcgacatcgacggcatggacgaagagcgtgccggcaagttgatcatggccgcccgggcccattggttcgagtaa

SEQ ID NO: 30540 - DNA, 1338 bp, Pseudomonas aeruginosa
atgagcagaaaatacttcgggactgacggtatccgtggtcgtgttggcgagtttccgattactccggacttcgttctcaagctgggctgggcggtgggcatggccttccgccggcagggcaactgccgggtcctgatcggcaaggacacgcgcagctcgggttacatgttcgagtcggccttcgaggccgggctctccgcttccggcgccgataccctgttgctgggaccgatgcctacccccggcatcgcctacctgacgcggactttccacgccgaggccggggtggtgatcagcgcttcgcacaatccccacgacgacaacggcatcaagttcttctccgggcaggggaccaagctgccggacgacgtcgagctgatgatcgaggaactgctcgatgcgccgatgaccgtggtggagtccgcccgtctcggcaaggtttcgcggatcaatgacgcggcggggcgctacatcgaattctgcaagagcagcgtgccgaccagcaccgacttcaacggtctcaaggtcgtgctcgactgcgccaacggcgctacctacaagatcgctcccagcgtcttccgggaactgggcgcggaagtgacggtgctggcggccagcccgaatggcctgaacatcaacgacaagtgcggttccactcacctggatggcctgcaggctgcggtggtcgagcaccatgccgacctcggcatcgccttcgacggcgacggcgaccgggtgatgatggtcgaccataccggtgcggtcgtggatggcgacgaactgcttttcctcatcgcgcgcgacctgcaggaaagcgggcggctgcaaggtggtgtggtcggcaccctgatgagcaacctcggcctggagctggctttgcaggaactgcatatcccgttcgtgcgggcgaaggtcggcgatcgctatgtgatggccgaactgctggctcggaactggatgctgggaggggagaattcggggcatatcgtctgctgccagaacaccacgacgggcgatgccatcatcgcggcgctacaggtgctgatggcgctcaagcatcgcggccagaccctggcagaggcgcgccaggggattcgcaagtgcccccaggtgttgatcaatgtgcgcttcaagggcgaaaacgatccgctcgagcacccctcggtgaaggaggccagcgtccgcgtcaccgagcaaatgggcggtcgcggtcgtgtcctgctgcgcaaatccggcacagagccgttggtccgggtgatggtcgagggcgacgaggaagctagcgttcgtgcccacgccgaacagctggcaaaaattgtttctgaggtatgtgcttga

SEQ ID NO: 30541 - DNA, 852 bp, Pseudomonas aeruginosa
atgagcaatccgcaatacccgacccgactgccttgcggcagtcgggttcttgatttggcccgcccacatgtcatgggcatcctcaatgtcacccccgattccttttccgacggcggccgttacgaccggctggacgatgccctgcggcatgccgagcgcatggtgctggaaggcgcaacgctcatcgacgtcggcggcgagtcgacccgtcccggtgcgcgcagcgtttctccgacggaggagctggagcgggtcgctccggtagtcgaacgcatcgcccgcgaactggacgtcgtgatttcggtggatacctccacgcctgcggtcatgcgcgaaactgcgcgtctcggagcgggtctgatcaacgacgtccgttcgctgcagcgcgacggtgcgttggatgctgcggtggatagcggcctggcggtctgcctcatgcacatgcgtggagaaccgcagaccatgcaggatgcgcctgcctaccaggatgtggtggcggaagtcggcgcgttcctgcaggagcgtgtggatgcctgcgtggcggccggaatcgaccgcgagcggctgttgctggatccgggtttcggttttgccaagacactggagcacaacctggtgctgttcaggcatctgcaggcgctccatggtctgggcctgccgttgttggtcggcgtttcgcgcaagagcatgatcggcaaggtactggggcgggaggtggacgaacgcctctacggcagtctcgcgctggcggccctggcgctggccaagggcgcacggataattcgagtgcatgacgtggcggcgaccgtcgacgtgatgcgaatgatctccgccgttgaaatggcggattga

SEQ ID NO: 30542 - DNA, 1920 bp, Pseudomonas aeruginosa
atggcaaagaatctgattctgtggctgatcatcgcggcggtactggtgaccgtgatgaacaatttctcgagcccgagcgagccacagacgctgaactactcggacttcatccagcaggtcaaggatggcaaggtcgagcgagtgaccgtggatggctatgtcatcaccggcaagcgtagcgacggcgataccttcaagaccatccgcccggcgatccaggacaacggcctgatcggcgacctggtcaacaacaacgtcgtggtcgagggcaagcagcccgaacagcagagcatctggacccagttgctggtcgccagcttcccgatcctggtgatcatcgccgtcttcatgttcttcatgcgccagatgcagggtggcggcggcggtcgcggcggcccgatgagcttcggcaagagcaaggcgcgcctgctgtccgaggaccaggtcaagaccaccttcgctgacgtcgccggctgcgacgaggccaaggaggaggtcagcgagctggtcgagttccttcgcgatccgggcaagttccagcgcctgggcggccgtatcccgcgcggcgtgctgatggtcggcccgcccggcaccggcaagaccctgctggccaaggccatcgccggcgaagccaaggtgccgttcttcaccatttccggttccgacttcgtcgagatgttcgtcggcgtgggcgcctcccgtgtccgcgacatgttcgaccaggccaagaagcacgcgccgtgcatcatcttcatcgacgagatcgacgccgtcggccgccatcgcggcgccggcctgggcggcggtcacgacgagcgcgagcagaccctcaaccagttgctggtggagatggatggcttcgagatgaacgatggcatcatcgtcatcgctgccaccaaccgtccggacgttctggacccggcgctgctgcgtccgggccgcttcgaccgccaggtggtggtcggcttgccggatatccgcgggcgcgaacagatcctcaaggtgcacatgcgcaaggtgccgctgggcgaccatgtcgatcctgccgtcatcgcccgcggtacgcccggtttctccggcgccgacctggccaacctggtcaacgaggcctcgctgttcgccgcgcgctccaacaagcgcatcgtcgacatgcgcgagttcgagctggccaaggacaagatcatgatgggcgccgagcgcaagaccatggtcatgtccgagaaggagaagcgcaacaccgcctaccacgaggccggccacgccatcgtcggtcgcctggtgccggagcatgacccggtctacaaggtgtccatcattccgcgcggacgtgccctgggcgtgaccatgttcctccccgaggaagatcgctacagcctgtccaagcgcgcgctggaaagccagatctgctcgctgttcggcggccgtatcgcggaagagatgaccctcggcttcgaaggcgtcaccactggcgcttccaacgacatcatgcgtgctacccagttggcgcggaacatggtgaccaagtggggtctgtccgagaaactcggcccgctgatgtacgcggaggaggagggcgaggtgttcctcggccgtagcgccggcagccagcacgccaatgtgtcgggcgagaccgccaagatgatcgaccaggaagtccggcgcatcatcgacgactgctacggtaccgccaagcgactgctcgacgagaaccgcgacaagctggagatgatggccgacgcactgatgaagtacgagaccatcgactccgaccagatcgacgacatcatggccggtcgcgtgccgcgcgagccgcgtgactggcagggtggttcgggtaccggcaccccgccggccaacctggaagagtcgggccgccgcgagaacacccctcccatcggtgggccggccggcgagcactga

SEQ ID NO: 30543 - DNA, 3222 bp, Pseudomonas aeruginosa
atgccaaaacgtacagacataaagagcatcctgatcctcggtgccggccccatcgtgattggccaggcctgcgaattcgactactccggcgcccaggcctgcaaggccctgcgcgaggagggctaccgcgtcatcctggtgaactccaaccccgcgaccatcatgaccgatccggcgatggccgacgcgacctacatcgagccgatcaagtgggccaccgtggccaagatcatcgagaaggaacgccccgacgcgctgctgccgaccatgggcggccagactgcgttgaactgcgccctggacctggagcgccacggcgtgctggagaagttcggcgtggagatgatcggcgccaatgccgataccatcgacaaggccgaggaccgctcgcgcttcgacaaggcgatgaaggatatcggcctggcctgtccgcgctcgggcatcgcccacagcatggaggaggcctacggcgtgctcgagcaggtcggcttcccctgcatcatccgtccgtccttcaccatgggcggcaccggcggcggtatcgcctacaaccgtgaagagttcgaagagatctgcgcccgtggcctcgacctgtcgccgaccaacgagctgctgatcgacgagtcgctgatcggctggaaggaatacgagatggaggtggtccgcgacaagaaggacaactgcatcatcgtctgctccatcgagaacttcgacccgatgggcgtgcacaccggtgactcgatcaccgtggcgccggcgcagaccctgaccgacaaggaataccagatcatgcgcaacgcctcgctggcggtattgcgcgagatcggcgtggaaaccggcggttccaacgtgcagttcggcatctgcccgaacaccgggcgcatggtggtgatcgagatgaacccgcgggtttcccgctcctcggccctggcctccaaggccaccggtttcccgatcgccaagatcgccgccaagctggcggtcggctacaccctcgacgaactgcagaacgacatcaccggcggtcgcaccccggcgtcgttcgagccggccatcgactacgtggtgaccaagatcccgcgcttcgccttcgagaaattcccgaaagccgatgcccgcctgaccacccagatgaagtcggtcggcgaagtcatggccatcggccggaccttccaggagtcggtgcagaaagccttgcgtggcctggaagtcggcgccaccggcttcgatccgaagctcgacctgaacgacccggaggccgacagcatcctcaagcgcgagctgaccgtgcccagcgccgagcgtgtctggtacgtcgccgacgccttccgcgccggcaagagcgtcgaggaagtgttcgagctgacccgcatcgacgaatggttcctggtgcagatcgaggacctggtcaaggacgaggagaaggtcaagaccctcggcctgtcctccatcgatcgcgagctgatgtacaagctcaagcgcaagggcttctccgacgcgcgcctggccaagctgctcggcgtcaccgagaagaacctgcgcagccatcgccacaagctgaaggtactgccggtctacaagcgtgtcgatacctgcgccgccgagttcgccaccgacaccgcctacatgtattcgacctacgaggaagagtgcgaggccaacccgtcgagccgcgagaagatcatgatcctcggcggcggtccgaaccgcatcggccagggcatcgagttcgactactgctgcgtgcacgcggcgctggcgatgcgcgaagacggctacgagaccatcatggtcaactgcaacccggaaaccgtctccaccgactatgacacctccgaccgcctgtacttcgagccggtgaccctcgaggacgtccttgagatcgtccgcgtcgagcagcccaagggcgtgatcgtccagtacggcggccagaccccgctgaagctctgccgcgccctcgaagaggccggcgtgccgatcatcggcaccagtccggacgccatcgaccgtgccgaagaccgcgagcgcttccagcagatggtccagcgcctgaacctgcgccagccggccaacgccaccgcgcgcagcgaagacgaggccctggccgcgtccaaggccatcggttatccgctggtggtacgcccgtcctacgtgctgggcgggcgggcgatggaaatcgtctaccaggaagaagaactcaagcgctacatgcgtgaggcggttcaggtttccaacgacagcccggtgctgctcgaccacttcctcaactgcgccatcgaagtcgacatcgacgcggtatgcgacggcgagatcgtggtgatcggcgcgatcatgcagcatatcgagcaggctggcgttcactccggcgactccgcctgttcgctgccgccgtactcgctgccgcagcacatccaggacgagatccgcgagcaggtcaagaaaatggccctggagcttggcgtggtcggcctgatgaacgtgcagatggcggtgcagggcgaggatatcttcgtcatcgaggtcaatccgcgcgcctcgcgtaccgtgccgttcgtctccaagtgcgtcggcgagtcgctggccaaggtcgccgcccgcgtcatggccggcaagaccctggccgaggtcggcttcacccaggaaatcatcccgccgttcttcagcgtcaaggaagcggtgttcccgttcgccaagttccccggcgtcgatccgatcctcggcccggaaatgaagtccactggtgaagtgatgggcgtcggtgatagctttgccgaagcctttgccaaggctcagttgggggccagcgagattctcccgaccgccggttgcgccttcatcagcgtccgcgaagacgacaagccgttcgccgcccaggtggctggcgacctggtcgcgctgggcttcgaagtggtagccaccgccggtaccgcgcgtgtcatcgaggccgcgggcctgccggtgcgtcgcgtgaacaaggtgaccgaaggtcgcccgcacgtggtggacatgatcaagaacgacgaggtcaccctgatcatcaacaccaccgagggccggcagtccatcgctgactcctactccattcgtcgaaacgccctgcagcacaagatctgctgcaccaccaccattgcgggtgggcaggcgatctgtgaggcgctcaagttcggtcccgagaagaccgttcggcgtctgcaggatctccacgcaggaatcaaggcatga

SEQ ID NO: 30544 - DNA, 1137 bp, Pseudomonas aeruginosa
ttgactaagccagccatacttgcacttgccgacggcagcatttttcgcggtgaagccatcggtgccgacggccagaccgttggcgaggtggtgttcaacaccgccatgaccggctaccaggaaatccttaccgatccttcctacgcccagcagatcgtcaccctgacctacccgcacatcggcaataccggtaccaccccggaagacgccgaggccaaccgtgtctgggccgccggcctgatcattcgcgacctgccgctgatcgccagcaactggcgcagcaagcagtcgctgcctgactacctgaaagccaacggcaccgtcgccatcgccggcatcgatacccgtcgcctgactcgcatcctccgcgagaagggttcgcagaacggctgcatcctggctggtgccgacgctaccgaggaacgcgcgctggagctggctcgcgccttccccggcctgaagggcatggacctggccaaggaggtcaccaccgccgagcgctacgagtggcgctccagcgtctggaacctggaaagcgacagtcacccggagatcccggccggtgaactgccgtatcacgtggtggcctacgactacggcgtcaagctgaacatcctgcgcatgctggtggcgcgcggctgccgcctgaccgtggtgccggcgcagacaccggccagcgaagtgctggcgctgaaccctgacggcatcttcctttccaacggccccggcgaccccgaaccgtgcgactacgcgatccaggcgatccgcgaattcctcgataccgagatcccggtgttcggcatctgcctcggccatcagttgctggccctggcctctggcgccaagaccctgaagatgggccacggccaccacggcgccaaccacccggtgcaggacctggacagcggcgtggtgatgatcaccagccagaaccacggtttcgcggtcgacgagagcaccctgccggacaacctgcgagccactcacaagtcgctgttcgacggtaccctgcagggtatcgagcgcaccgacaaggtcgctttcagcttccagggccaccccgaggcgagccccggtccgcatgacgtcgccccgctgttcgaccgcttcatctcggcgatggccgagcgtcgctga

SEQ ID NO: 30545 - DNA, 807 bp, Pseudomonas aeruginosa
atgcgacgtatagccgtagtgggcgccgccgggcgcatgggcaagaacctgatcgaggccgttcagcagaccggcggtgccgccgggctgacggcggcggtggatcgtccggatagcaccctggtgggggcggacgccggcgagctggccggtctcggccggatcggcgtgccgctgtccggggacctgggcaaggtctgcgaggagttcgacgtcctgatcgacttcacccatccctccgtaaccctgaagaacatcgagcagtgccgcaaggcgcgccgggcgatggtcatcggcaccaccggcttcagcgccgacgagaagctgctgctggccgaggcggcgaaggatatcccgatcgtcttcgctgccaacttcagcgtcggcgtgaacctttgcctgaagcttctggataccgcggcacgggtgttgggcgacgaagtggatatcgagatcatcgaggcccatcaccggcacaaggtcgatgcaccgtccggcaccgccttgcgcatgggcgaggtggtagcccaggcgctcggccgggacctccaggaagtggcggtctacggacgcgaggggcagaccggcgcgcgggcgcgggaaaccatcggcttcgccaccgtgcgcgccggcgacgtggtgggcgaccacaccgtgctgttcgccgccgagggcgagcgcgtggagatcacccacaaggcttccagccgcatgaccttcgcccgtggcgcggtgcgtgcggcgctgtggctggagggcaaggagaacggcctgtacgacatgcaggatgtgctcggcctacgctga

SEQ ID NO: 30546 - DNA, 1914 bp, Pseudomonas aeruginosa
atgggcaaaatcattggcatcgacctgggtaccaccaactcctgcgtggctatcctggagaacggtaacgtcaaggtcatcgagaacgccgagggcgcgcgtaccaccccctcgatcatcgcctacaccaacgatggcgaaaccctggtgggccagccggccaagcgccaggcggtcaccaacccgcagaacaccctgtatgcggtgaagcgcctgatcggccgtcgcttcgaagagaacgtggttcagaaagacatccagatggtgccgtacagcatcgtcaaggccgacaacggcgacgcctgggtggaagtgaagggccagaagatggcgcctccgcagatttccgccgaagtgctgaagaaaatgaagaagaccgccgaagactacctcggcgagccggtcaccgaagcggtgatcaccgttccggcctacttcaacgacagccagcgccaggccaccaaggacgccggccgcatcgccggcctcgacgtcaagcggatcatcaacgagccgaccgcggcggcgctggcctacggcctggacaaggccaagggcgaccacaccgtgatcgtctatgacctgggcggcggtaccttcgacgtgtcggtgatcgagatcgccgaagtcgacggcgagcaccagttcgaagtgctggccaccaacggcgacaccttcctcggcggcgaagacttcgacatccgcctgatcgactacctcgtcgacgagttcaagaaggaaagcggcatcaacctgaagggcgacccgctggccatgcagcgtctgaaggaagcggccgagaaagccaagatcgagctgtcctcgacccagcagaccgacgtcaacctgccgtacgtgactgccgacgcgagcggtccgaagcacctgaacgtcaaggtttcccgcgccaagctggagtccctggtcgaagacctggtgcagcgcaccatcgagccgtgccgcaccgcgctgaaggatgccggcctggatgtttccgatatccatgaagtgatcctggtcggcggccagacccgcatgccgctggtacagaagaccgttgccgagttcttcggcaaggaagcgcgcaaggacgtcaacccggacgaagccgtggctgtcggtgccgccatccagggcgcggtcctggccggcgacgtgaaggacgtgctgctgctcgacgtgaccccgctgaccctcggcatcgagaccctgggcggcgtgatgaccggtctgatcgagaagaacaccaccatcccgaccaagaagtcgcaggtgttctccaccgccgacgacaaccagggcgcggtgaccatccacgtgctgcagggcgagcgcaagcaggccgcgcagaacaagtcgctgggcaagttcgacctggccgacattccgccggctccgcgcggcgtgccgcagatcgaggtgaccttcgatatcgatgccaacggcatcctgcacgtctcggcgaaggacaaggccaccggcaagcagcagtccatcgtgatcaaggcatcctccggcctgtccgaggatgagatccagcagatggtccgcgatgccgaggcgaacgccgaggaggaccgcaagttcgaggaactggctgccgctcgcaaccagggcgacgcgctggtccacgcgacccgcaagatgatcaccgaggcgggcgacaaggccaccgccgaggacaaggcgaccatcgagaaggcgctgggcgagctggaagcggcggtgaagggcgacgacaaggccgagatcgaggccaagatgaacgctctgtcccaggcttccaccccgctggcgcagaagatgtacgccgaacaggcccagcagggcgaagacgctccccagggcgagcaggcgaaagccgctgacgacgtggtggacgccgagttcgaagaggtcaaggacaacaagtaa

SEQ ID NO: 30547 - DNA, 480 bp, Pseudomonas aeruginosa
atggctaagcagaagaaacacccttcggggaccatcgcgcagaacaagaaggctctgcacgactatttcatcgaacaacgcttcgaggcgggcgtcgccctggcgggctgggaagtgaaaagcctgcgcgccggcaaggcccagttggtcgacagctacgtgctgctcaaggatggcgaggcctggctgctcggcagccacatcacgcccctgaccaccgccagcacgcacgtgatcgccgacccggtgcgcacgcgcaagctgctgctgcacaagcgcgaactgggcaagctgttcggcgccgtgcaacagaagggctacgcctgcgtcgctctgtcgatgtactggaagaagcacctggtcaagtgcgagatcgccctggccaagggcaagaaggacttcgacaagcgccacaccgagaaggagcgcgactccgatcgggagatccagcgcgccatgcgccacggcaaggacgactga

SEQ ID NO: 30548 - DNA, 774 bp, Pseudomonas aeruginosa
atggaatttggtcaggtcaggcagcgccgtctgtcggatgacatcgttgcgcaactggaggcgatgatcctggagggcacgctgaagtccggcgagcggctgcccgccgagcgcgtgcttgccgagcagttcggggtttcccggccgtcgctgcgcgaggcgatccagaaactggtggcgaaggggctgctggtcagccgccagggtggcggcaactatgtgaccgaatcgctgggcgcgactttcagcgatccgctgctgcacctgctggagggtaacccggaggcccagcgcgacctgctggagtttcgccacacgctggaagggtcctgtgcctactacgcggcgctgcgtgcgacctccctcgatcaccagcgcctgaccgaggccttcgaggcgctccaggcctgctatgcgcgcaacgaccaggtcagcgcggaagagggtgccgccgacgcgcgcttccacctggcgatcgccgaggccagccacaacaccgtgctgctgcacaccatcaagggcctgttcgacttgctgcggcgcaacgtggtgaccaatatcggcgggatgtacgcgcagcgcacggaaacccgcgcgcaactgatggagcagcaccagcgcctatacgacgcgatcatcagcggtcaggcggagctggcccgggaggtgtccaaccagcacatccactatgtgcaggaggtcctggcggaggtccaggaagaggcgcgcaggatgaagcgctcgcagcgccggcgcagcgtgcaggaagactag

SEQ ID NO: 30549 - DNA, 1278 bp, Pseudomonas aeruginosa
atgacccagctgcgccgggtcgccattgtcggcggcaaccgtattcccttcgcccgctcgaacaccgtgtacgccacggcgagcaaccaggagatgctcacttccgccctggaaggcctggtggagcgctacaacctgcacggagagcgccttggcgaggtggtggccggcgccgtgctgaagcattcgcgcgacttcaacctgacccgcgaatgcgtgctcggttcgcgcctggccccggaaaccccggcctacgatatccagcaggcctgcggtaccggcctggaggcggcgatcctggtggccaacaagatcgccctcgggcagatcgacagcggcatcgccggcggcgtcgataccacttccgacgctccgatcggggtcaacgagggcctgcgcaagattctcctcgaggccaaccgcggcaagagcaacctggacaagctcaagagcctgctgaagatccgcccgcgccacgtggtcccggccatcccgcgcaacggcgagccgcgcaccgggctgtcaatgggggagtcctgcgaactgatggcgcagacctggcagattccccgcgacgagcaggacaggctggccttcgagagccaccacaagctggccgcggcctatgaggagggctggcagaacgacttgatgacgccgttccgcggcctgacccgcgaccagaacctgcgcccggatatcgacctggagaagatcggcaccctcaagccggtgttcgagcgcggttcgcgcggcaccctcacggcggccaactcgacgccgctgaccgacggcgcctcggtggtactgctggccagcgaggagtgggcgaaggcgcgcggcctgccgatcctggcctatttcaaggacggcgaggcggcggcggtgaacttcgtcgatcgccaggagggcctgctgatggcgccggtctacgcggtgccgcggctgctggcacgcaacggcctgagtctgcaggacttcgactactacgagatccacgaggccttcgccgcccaggtgctctgcaccctgaaggcctgggaagaccccgagtactgcaagacccgcctcggcctcgaccagccgctgggctccatcgaccgcagcaagctcaacgtcaagggcagctcactggccgccggccacccgttcgccgccacgggaggacggatcgtcgccaacctggccaagctgctctcgctggcggagcagggacgcgggctgatttccatctgcgccgccggtgggcagggtgtgaccgcgatcatcgagcggtaa

SEQ ID NO: 30550 - DNA, 930 bp, Pseudomonas aeruginosa
gtgtcacgcaccattcttcagccggggcagatcgaagccgccgccaacattcccccgcacctgcaccagccgtcgcgcgacctgttcgcccgccgcggcgagcgcctgctgcaactggccgaggggcacccgatgggcgactacctgcggctggtcgccggtctctgccggctccagcaggcgctgctggacaacccgccggcgctggccccgctcgaccccgagcgcctgcgcaagagccgcgagcacggcatgccgccgctggcctacgacctgctggtgcgcgaaggcgcctggctgccctggctggatgccctgctcgcgggctacccggcgccggccaacgccgccgtcggcgcggcactcgaacaattgcgcgaagccgaggaaggccagcgcaaggcctgggccatcgccctgctcagcggtcagttcgacctcctgccggcggccctggtgccgttcctcggcgccgccctgcaagtagcctggagccattggctgctgggactggaggagggcgcggtggtcgagaccgagagccggaccttgtgccccgcctgcggctcgccgccgatggccgggatgatccgccagggcggcaaggaaaccggcctgcgctacctgagctgctcgctgtgcgcctgcgaatggcactacgtgcgaatcaagtgcagccactgcgaggaaagcaagcacctggcctacctgtccctggagcatgacgggcagccggcggaaaaagccgtgctgcgcgccgagacctgccccagttgccagggctacctgaagcagttctacctggagttcgaccgccacgccgatgcccttgccgacgacctggccagcctggcgctggacatgcgcctggccgaggacggctacctgcggcgttcgccgaacctgttgctggcccccggcggcgaatag

SEQ ID NO: 30551 - DNA, 2712 bp, Pseudomonas aeruginosa
atgagcgtagcgacccaacgcaatacccagctcgataccgagcgccgcaacgaccgactgtccatgcgcgccgcccgcgaagcgcagaacagcctggaaaccaccctcaccaatgtccgcggtcgccaggacggcctcgaccaggccgaggccgccgcccggctgcacgccgacggccccaacgaagtggcccacgaccgtccgccacacgtcctggtgcaactgctgcaggcgttcaacaaccccttcatctacgtgctgatgacgctctctgcgatcagcttcttcaccgacttctggctgcccctgcaggacggtgaggaaaccgatctcaccggcgtcatcatcgtcctctgcatggtcctggtcagcggcctgatgcgcttctggcaggaataccgttcgggcaaggccgccgaggcgctcaaggccatggtgcggaacaccgccaccgtgctgcgccgcgacgagcgcgggatgcgcggcgagctgcgggaaatccccatgggcgaactggtggtcggcgacatcgtgcgcctgtccgccggcgacatgatccccgccgacatccgcctgatcgaatcgcgcgacctgttcatcagccaggccgtactcaccggcgaggcgctgccggtggagaaatacgacaccctcggcgcggtccgcgagaagtccgccaagcggatcgccgccgaccagcaggacctgctcgaactgccgaacatctgcttcatgggcaccaacgtggtcagcggcacggccaccgcggtggtggttgccaccggtgcgcgcacctatttcggttcgctggcccgttccatcgtcggttcgcgggcgcagaccgccttcgaccgtggggtgaacagcgtcagttggctgctgatccgcttcatgctggtgatggtgccgatcgtgctgctgatcaacggtttcaccaagggcgactggaccgaggcgttcatgttcgctctcgccgtggcggtcggcctgaccccggaaatgctgccgatgatcgtcagcgccaacctggccaagggcgcggtggcgatgtcgcggcgcaaggtggtggtcaagcgcctcaacgcgatccagaacttcggcgccatggacgtgctctgcaccgacaagaccggcaccctgacccaggaccggatcatcctcgagcatcacgtcgacgttgccggccggcgctgcgaccgggtcctgcaaatggcctggctgaacagcttccaccagtccgggatgaagaacctgatggaccgcgcggtggtcgccttcgtcgaacagaacccgcgcatcacgccgtcggatgcctggcgcaaggtcgacgaactgcccttcgatttcgtccgtcggcgtctctcggtgatcctcgagggcaaggacggcgaacagctgctggtgtgcaagggcgcggtcgaggaaatgctcgagatcgccacccgcgtgcaccaggacggtgtcgacctgccgctcgacgaggaacgccgccgggccctgctggcgctggccgagcaatacaaccgcgacggcttccgcgtgctcctgctcggcacccgcagcctctcgcgcacggagtcccaggcccagtacggcgccagcgacgagcgcgacctggtgatcgccggcctgctgaccttcctcgatccaccgaaggaaaccgccggcccggccatcgccgcgttgcgcgagaacggcgtggcagtgaaggtgctcaccggcgacaacccggtggtcagcgcgaagatctgccgcgaggtcggcctggacgtcggcgagccgctgctcggtcgcgacatcgacctgatggacgatgccaccctgcaacgcctggccgaggagcgcacggtgttcgccaagctgacgccgctgcagaagtcgcgggtgctcaaggccctgcagggcaacggacacaccgttggcttcctcggcgacggcatcaacgacgcccccgcgctgcgagatgccgatgtcggcatctcggtggacagcggcaccgacatcgccaaggaatcggccgacatcatcctcctggaaaaaagcctgatggtcctggaggagggcgttatcaagggccgcgagaccttcggcaacatcatgaagtacctgaacatgactgccagctccaacttcggcaacgtgttctcggtactggtggccagcgccttcatccccttcctgccgatgctggcgatccacctgctgctgcagaacctgatgtacgacatctcccagctgtcgctgccgtgggacaagatggacaaggaattcctcgccaagccgcgcaagtgggactcgaagaacatcggccgcttcatggtctggatcggcccgacctcgtcgatcttcgacatcaccacctacgcgctgatgtggttcgtgttcgccgccaacagcccggaaatgcagtcgctgttccagtccggctggttcatcgagggcctgctctcgcagaccctggtggtgcacatgctgcgtacccagaagattcccttcatccagagcaccgcggcgctgccggtgatgctgatgaccgggctggtgatggcgctgggcatctacgtgccgttctcgccgctgggagcggtggtcggcctgcagccgctgccgtgggagtacttcccctggctggtgggcacgctgctctgctactgcgtcaccgcgcagaccatgaagaccctctacatccgccgcttcggccagtggttctga

SEQ ID NO: 30552 - DNA, 618 bp, Pseudomonas aeruginosa
atgtatcacggtgaaagactcaatgcctggacccacctgatcggtgcggtcgccgcctgtaccggcgccgtctggctgacggtccaggcgagcctcaacggcagtccgtggaagatcgtcggggtcggcgtctacggcgtcaccctgacgctgctctacagcatctcgaccgcctaccacagcgtgcgcgggcgagcgaaggtggtgatgcgcaagctcgaccacctgtccatctacctgctgatcgccggcagctacacgcctttctgcctggtcacgctgcgcggtccctggggctggacgctgttcggcatcgtctggggcctggcggtactcggcatgctccaggagatcaagccacgctccgaggcgcgagtgctgtcggtggtgatctacgcggtgatgggctggatcgtgctgatcgcggtgaaaccgctgctcgccgccctcggcagcgccggcttcacctggctggcggccggcggcgtgctctataccgtagggatcgtcttctatgcctatgaccaccgcttccgccactggcatggcatctggcacctgttcgtgatcgccggcagcctcctccacttcgtggcgatctggcgctacgtactctag

SEQ ID NO: 30553 - DNA, 1302 bp, Pseudomonas aeruginosa
atgaatgccgctgatgagagcctgggcaacgtcctgctggtcggtctgggcgcggtggcgatccaggtcgcgctggacctgcgccgccacggtgccggtcgcctcggcgcgctgaaccatcccggccggcgcagccagcggatcgccgaggccctggcgcgcggcgcctgcctgcagctggaagggcaggggcagcatcgctggctgtccggcaacgccgcgctggacgtcttccaccaggaccccgctgagcttcgcgacgattggcagaccctggtgctctgcgtgccggccgacagttacctggacgtggtccgcgggttgccctgggagcgactcggcggggtgcgcacgctgctgctggtgtccgccttcatcggcgccaacctgctggtgcgcagcgccctgccggcggggtgccaggcgaccgtgctgagcctgtccagctactacgcggcgaccaaggtgatcgacgagacacaaccgctgcgggccctgaccaaggcggtcaagcgcagggtctacctgggttccagccggccggactgcccggcgcgggagacctggcggcgagtcctggccggcagcggggtggaggtggtacccctggcgacgccggaagcggcggagggccgcaacgtcaccacctacgtgcacagtccgttctttctcggcgagttcgccctcgcccggatactttccgagcaggggccgcccggtttcatgtacaagctctacccggagggacctatcacccccggggccattggcgccatgcggcggctgtggtgcgagctgagcgaactgttgcggcggatgggcgccgagccgttgaacctgctgcggttcctcaacgacgacaactacccggtgcacgagacgatgctgccgcgcgcgtccatcgacggcttcgccgaggcgggcgccgagcgccaggaatacctgctgttcgtgcgctatgcggcgttgctggtcgatccgttctctccggccgacgagcagggtcgccacttcgacttttccgccgtgccgttccgccgcgtcagtcgcgacgaagacggactctggcggctcccgcgggtgccgctggaggactatcgcaagctggcgctgatcgtcgcgctggccgcccacttcgacctggccatgccgcaggcgcgcagcctgttggcgagctacgagaacgccgtgtcccgattcatcgattgccaaggagcgagccagtgccatccaagcctgtatccgatcgacagccgtccggcggcggacgccatctatcgccaatggtgctcgacctgctga

SEQ ID NO: 30554 - DNA, 792 bp, Pseudomonas aeruginosa
atgcaaggacgcacaccgctgctggaaaccctccgcgaactggaatgcgagattcgcctgctcaccgtctatgcccgcgagtgttgcggctgctacgagatcctcaggcgcaagctcgaccgtctgagcggactgatcggggaggattgcagccgggcgcagtggcaggccgattcggacgaccctgcgttgcaggcgctcggcctgcgcctgcgcgacgcggcggtgcaggccctctgcgaactggagaagcacctttgccagggcgtgctgcatgagcccggcgagatgggccgctacctgggtagcctgctggaatccatccgcggcgaactcgacagcgccgggatagatgccgatgcacgggtcctgttcgtcggctccggtgccctgccgacctcggccctggtgctggcgcgggaggtcggcgcacatttgtgctgcctggacatcgacgaggaggccctgggctgtgcccgcgagatcgcccgctgccaggggctggaggcgcgcatgcagttttcctcgctgccgccggcggaactggcgttttcccgcgatgccacgcatttcctgatcgcttcgctggtgcagcagaaaagcgcggtgctggcgcagatccgccaggtcatgcgcgccgacgccaaggtcctgctgcgtcacggcagcggcatcaagggactgttcaactatccggtggagccggccgaactggatggctggcgggtttgcgcggagcgggtcagccagccgctgtacgacaccctgatcctggagaaggccggtcgatga

SEQ ID NO: 30555 - DNA, 471 bp, Pseudomonas aeruginosa
atggacattcgtaaagtcaagaaactgatcgagctgctggaagagtccggtatcgacgagctggaaatccgcgaaggcgaagagtcggtacgcatcagccgccacagcaagaccgccgcccagccggtgtacgcacaggctccggccttcgccgctccggtcgccgcgccggcgccggcagccgccgctccggccgccgctgccgcggaaagcgccccggccgctccgaagctgaacggcaacgtggttcgctcgccgatggtcggcaccttctaccgcgccgcctcgccgacctcggccaacttcgtcgaagtcggccagagcgtgaagaaaggcgacatcctgtgcatcgtcgaagccatgaagatgatgaaccacatcgaagccgaagttagcggcaccatcgagtcgatcctggtggagaacggccagccggttgagttcgaccagccgctgttcaccatcgtctaa

SEQ ID NO: 30556 - DNA, 1350 bp, Pseudomonas aeruginosa
atgttggaaaaagtgctgatcgccaaccgcggcgaaatcgccttgcgcatccttcgcgcatgcaaggagctggggatcaagacggtggcggtacactccaccgccgaccgcgagttgatgcacctgtcgctcgccgacgaatcggtgtgcatcggtccggccccggccacccagtcgtacctgcagatcccggcgatcatcgccgcggccgaggtcaccggcgccaccgcgatccaccccggctacggcttcctcgccgagaacgccgacttcgccgagcagatcgaacgctccggcttcaccttcgtcggcccgaccgccgaggtgatccgcctgatgggcgacaaggtttcggccaaggacgccatgaagcgcgccggcgtccccaccgtgccgggctccgacggcccgctgccggaagatgaagagaccgccctggcgatcgcccgcgaggtcggctacccggtgatcatcaaggccgccggcggcggcggtgggcgcggcatgcgcgtggtctacgacgagtccgagctgatcaagtcggccaagctgacccgcaccgaggccggcgcggcgttcggcaacccgatggtctacctggagaagttcctgaccaacccgcgccacgtggaagtccaggtgctttccgacggccagggcaacgccatccacctcggcgaccgcgactgctccctgcagcgccgccaccagaaggtgatcgaagaggcgccggcccccggcatcgacgagaaggctcgccaggaagtcttcgcccgctgcgtccaggcctgcatcgagatcggctaccgcggcgccggcaccttcgagttcctctacgagaacggccgcttctacttcatcgagatgaacactcgcgtgcaggtggagcacccggtatctgagatggtcaccggtgtcgacatcgtcaaggagatgctgcgcatcgcctccggcgagaagctctcgatccgccaggaggacgtggtcatccgcggccatgcgctggaatgccggatcaacgccgaagacccgaagaccttcatgcccagcccgggcaaggtcaagcacttccacgcccccggcggcaacggcgtgcgcgtcgactcgcacctctacagcggctacagcgtgccgccgaactacgactcgctggtcggcaaggtcatcacctacggtgccgaccgcgacgaggcgctggcgcggatgcgcaatgccctggacgagttgatcgtcgacggtatcaagaccaataccgaactgcacaaggacctggtgcgcgacgccgccttctgcaagggcggggtgaacatccattacctggagaagaaactgggtatggacaagcactga

SEQ ID NO: 30557 - DNA, 999 bp, Pseudomonas aeruginosa
atgtcggtggtacgcatcggcccatatacactgcccaacagactgatcctcgcgccgatggccggggtgaccgatcgtccgttccgtcagctttgccgtcgccttggcgccgggatggtggtatcggagatggtgaccagcgacgtccgcctgtggaacagccgcaagtcgcgcctgcgcctgatccacgatggcgaggacgagccgcgctcggtgcagatcgccggcggcgatccggccatgctggccgaggccgcgcagcgcaatgtggaactcggtgcgcagatcatcgacatcaacatgggctgcccggcgaagaaggtatgcaacaaggcagcggggtccgccctgctgcgggacgaggcgctggtcgccgagatcctcgatgccgtggtcagggcggtcgacgtaccggtcaccctgaagatccggaccggctgggaccgggacaaccgtaacggcgtcaccgtcgcgaagctcgccgaacaggcggggatccaggctcttgcggtgcatggccggacccgcgccgacctgtacaccggggaggcggagtacgagaccatcgcggcgatcaagcaggccgtgtcgataccggtgttcgccaatggcgacatcgattcgccggaaaaggccaggaaagtcatcgagcagaccggggtggatgccctgctgatcggtcgggccgcccagggaagaccgtggattttccgcgagatcgaccattacctgcggaccggcgagcacctgccggcggcgccgcttcccgaagtgcagagcatcctgctcgaacacctcgcggagctgcaccttttttatggggaagaaatgggtgtgcggatcgcccgcaagcatgtggggtggtatctcgcgactctgccgggcgcaagggaattccgcgcccagttcaatcgtttgcaggacacggatgcgcagtgcgccagcgtcaggcagttcttcgccgagcgccagaacaacggaacaggggtggccgcatga

SEQ ID NO: 30558 - DNA, 303 bp, Pseudomonas aeruginosa
atggacttgtcccctcgcgagaaagacaagctgctgatcttcaccgccggcctgctcgccgagcgccggctggcacgcggtctcaagctgaactacccggaggcggtggcgctgatctccgccgccctgctggagggcgcgcgcgacggccgcagcgtcgccgagctgatgcactacggcaccaccctgctgaaccgcgagcaggtgatggagggcgtgccggagatgatcccggacatccaggtggaggccaccttccccgacggcaccaagctggtgaccgtccaccagcccatcgcctga

SEQ ID NO: 30559 - DNA, 1701 bp, Pseudomonas aeruginosa
atgaaaatcagcagacaagcctacgccgacatgttcggccccaccgtcggcgaccgcgtgcgcctggccgacaccgacctgtggatcgaggtggaacgggacttcaccgtctatggcgaggaagtgaagttcggcggcggcaaggtcatccgcgacggcatgggccagagccagctgggcgcggcgcaggtggtcgacacggtgatcaccaatgcgctgatcctcgaccactggggcgtggtcaaggccgacgtcggtctcaaggacgggcgcatccaggccatcggcaaggccggcaacccggacatccagcccggggtgaacatcgccatcggcgccggcaccgaggtgatcgccggcgagggcatgatcctcaccgccggcggcatcgacacgcacatccacttcatctgcccgcagcagatcgaagaggcgctgatgagcggggtcaccaccatgatcggcggcggcaccggccccgccgccgggaccaacgccaccacctgcacctccggtccctggcacatggcgcggatgctccaggccgccgacgccttcccgatgaacatcggcttcaccggcaagggcaacgccagcctgccgctgccgctggaggagcaggtgctcgccggcgccatcggcctgaagctgcacgaggactggggcagcaccccggcggcgatcgacaactgcctggaggtcgccgagcgccacgacatccaggtggcgatccacaccgacaccctcaacgaatccggcttcgtcgagaccaccctcggcgccttcaagggccgcaccatccacacctaccacaccgagggcgccggcggcggccacgcaccggacatcatcaaggcctgcggcttcgccaacgtgctgcccagctcgaccaacccgacacggccgttcacccgcaataccatcgacgagcacctggacatgctgatggtctgccaccacctcgacccggccatcgccgaggacgtggccttcgccgagtcgcgcatccgccgcgagaccatcgccgccgaggacatcctccacgacctcggcgcgttcagcatgatcagctccgacagccaggccatgggccgggtcggcgaagtgatcacgcgcacctggcagaccgccgacaagatgaagcgccagcgcggccgcctcgacggcgacggcgcgcgcaacgacaacttccgcgccaggcgctacatcgccaagtacaccatcaacccggcgatcacccacggcatcagccatgaagtgggctccgtcgaagccggcaagtgggccgacctggtgctctggcgcccggccttcttcggcgtcaagccgagcctgatcctcaagggcggggccatcgccgccagcctgatgggcgacatcaacggctcgatccccacgccgcagccggtgcactaccgaccgatgttcgccagctacgccggcagccgtcacgcgaccagcctgaccttcgtcagccaggccgccttcgccgccggcgtaccgcagcagctcggcctgcgcaaggccatcggcgtggtcagcggctgtcgcggtgtgcagaagaccgacctgatccacaacggctacctgccgaccatcgaggtcgacgcacagaactaccaggtacgcgccgacggccagttgctctggtgcgaaccggcggacgtgctgccgatggcgcagcgctatttcctgttctga

SEQ ID NO: 30560 - DNA, 1266 bp, Pseudomonas aeruginosa
atgaacccgagcaccgccgcccgcgccctgggcatcgattttggcacctccaactccaccgtcggctggtggcggccggaggtcgaaccgctgatcgagctggaggacggcaagatcaccctgccctcggtggtgttcttcaacgtcgaggagcgccgcccggtctacggccgccaggcgctcggcgagtacctggagggctacgagggccggctgatgcgctcgctgaagagcctgctgggctccaagctgctgaagagcgagaccaccgtgctcggcagcgccctgccgttcaaggacctgctcggcctgttcatcggccagctcaaggcgcgcggcgaggccgccgccgggcaagccttcgacgcggtggtgctgggtcgcccggtgttcttcgtcgacgacgacccggaggccgaccgcgaggcccaggacaccctggtgcaggtggccaacaagctcggcttcaaggaggtttccttccagtacgaaccgatcgccgcggccttcgactacgagcgctgcatccagcgcgaggaactggtcctgatcgtcgacatcggcggcggcacctcggacttctccctggtgcgcctggcgccggagcggcgcaacctggccgagcgccaggacgacatcctggccaccggcggcgtgcacatcggcggtaccgacttcgacaagcagctcagcctggaaggcgtgatgccgctgttcggctacggcagccggatgaagagcgatgccttcatgcccaccagctaccacctgaacctggccacctggcacaccatcaacgcggtgtacgcgcagaagtcgcaattggcgctgaagaacatgcgctacgacatcgtcgacagcaccggcatcgaccgcctcttcaggctcatcgaggaacgcgccgggcactggctggcgatgcaggtggaagacagcaagatccgcctgaccgaaaccgagcgcctgcacctctcgctggagcgcatcgaggccgggctcggcgtggagctgacccgtgggctgttcgagaacgccgtcgacggactgctggagcgcgtgcgcaacagcgtcgcgcaactgctggcctcggccggggtcgacccggaccgggtcgacacggtgttcttcaccggcggttcgagcggcattccggcgctgcgccggagcgtctcggcgatgctgcccaacgcccgtcatgtcgagggcaacctgttcggcagcatcggcagcggcctggccatcgaggcgaagaagcgctacggctga

SEQ ID NO: 30561 - DNA, 1392 bp, Pseudomonas aeruginosa
gtgcccgcccgccgctccctgaccctctacgcggcgctgctgttcgccgcggtggcggcgctggtggtcagcgcggtcggcttctacctgtaccgctcggtggaagaggcgatgctgcggcgcagcgacgtgatggtcgccggccgggtcgagcacttccgcaacctgctgcgcgacaacctcaccctggccgagctgaaggcgcgcccgcgtctgttcgagaacatgctcggcaacgagcaggacatcctgctcctcggtcagcccggcgaggcgccgatcgtcgcggtcaacccgcgccacgaacgcctgccgtcgctacgggtggtcgccgccggccaggcgttgaatccgtccgtcgtgcacgccgcgctgacccacgacggcatcccgatgcgcgtgctcgccgccgaggtcctggtcggcggccgcgagccgttgcagatcaccgccgcgcacctgctgctgggcgagacgcggatgctcgcccagtaccgcgaccgggtcatcgccgccgtgctgctggcgttcctcggcaccgccctgctcggctggctggtcctgcgccacggcctgcgcccgctgcgcacgctggcggcgaaggcggcggagatccatccgaccagcctggatacccgcctcgacgtcgccgccgcgcctgccgagttgcagcaggtggcacagtcgttcaacgccatgctcgaacgcctcgacgacggctaccagcgcctgcagcagttctccgccgacctcgcccatgagatccgcacgcccatcggttcgctgatgggccacggccaggtggccctgcgccagccgcgcagcaacgaggagtaccaggcgctgatcgcctccaaccaggaagagctggagcgcatcgcgcggatggtcgagagcatcctgttcctcgctcgcgccgacgacgtacgggcagcggtggagcgcagccgcctggacctgggcgaagagctgcggcgccaggcggagtatttcgaagggctggccgaggaacgagggctgagcctcgacgtccaggtcagcggccagctacgcgccgatccgcaactgttccgccgggcgctgagcaacctgctggccaacgccatccgctacgccagcgccgacagcctgatcgaagtgcgcggcctgcgccgatcgggggaattcctgctgagcgtggagaacgcctgcgacaggctgccggccgaaccgctgtcgcgcctgttcgaccgtttctaccgtggcgacgccgcgcgcagcgacgcccagtccagcggtctcggcctggccatcgtccaggcgatcatgcgcctgcacggcggccgcgccgaagcgagtgcaccggctccgggacgcatccgcttcgacctggcgttcccggctcaggactga

SEQ ID NO: 30562 - DNA, 672 bp, Pseudomonas aeruginosa
gtgaacagcatctgggcgcgcctgcgcctggccagctcgcagttgccgatcggcggatacagctattcccagggcctggaggcggccctcgacaatggctgggtgcgcgacgccgagagcgcgcggacctggctggtcgaccagctgcaactgaacctggcgcgcttcgaggcgccgctgctggccggcctgctgcgcgccgcgctgatcggcgactgggccgcctgcgatgcggccagcgaacgccatagggccagccgcgagacccgcgagctggcccaggagagccggcagatgggcttttccctgcaccaattgctggaagccctgcccgagctcgacgctcccggccgcgcctggctggcgcgccaggacccgcccaatctcgccgccgcctgggcgatggccgcgcgcgcctggcgcctggacgccgaggaggcgctgagtgcctggttctggagctggctggaaaaccagttggcggtgctgatgaaaaccctgccgctcggccaactggccgcgcagaaacttgcttccagcctactgccggaactcgaccgcgcctgcgccgaggcgctgcggcggcccgccgtcgagggcagcgccgcgttcggtctggcgctggccagcatgacccacgaaacccagtacagccgtctgttccgttcctag

SEQ ID NO: 30563 - DNA, 615 bp, Pseudomonas aeruginosa
atgacatcccaacccctgcgtgtcggcatcggcggtccggtgggctccggcaagaccgccctgaccctggccctgtgtcgcgaactgcgcgagcgctacaacctcgcggtggtcaccaacgacatctatacccaggaagacgcggagttcctggtgcgcaacgaggccctcgcccccgagcggatcatcggcgtggaaaccggcggctgcccgcacacggcgatccgcgaggacgcctcgatcaacctggaggcggtggaccagctcaaccggcgcttccccggcctcgaactgatcctggtggaatccggcggcgacaacctgtcggccaccttcagccccgagctgtccgacctgaccctctacgtgatcgacgtttccgccggcgacaagatcccgcgcaagggcggccccggcatctgcaagtcggacctgctggtgatcaacaagatcgacctggcgccgctggtcggcgcctccctcgatgtgatggaccgggacgcccggcgcatgcgcggcgacaagccgttcgtgttcagcaaccagaagaccggccaggggctggacgaaatcatcgccttcatcgagcgccagggcctgctgaccgccgcctga

SEQ ID NO: 30564 - DNA, 933 bp, Pseudomonas aeruginosa
atgcacagcctgcgctttttcagcaacgccgaggtcgccgagcgcctggcttatccacaactgatcgaggcgttgcgcatcggcctggccaagccttgcagcgcgccgctgcgcaactgccatgccttgccggcgcaggcctcgctgctacagatgccggtgtggcaagccggcgcggggatcggcgtgaaactggtgacggtgttccctggcaatggggcgcgtggcctgccggcggtggccgcggtgttcgctctgttcgacggcgaagacggtcgcccactggcgttgctggaggcttcggagctgaccgcccggcgtaccgcctgcagctcggcgctggccgccgactacctggcgcgggacgatgcgcggcgcctgctggtggtcggctgcggaaccctggctgcgcacatggtgcgggcccacgcctgcgtgcgcgactatcgccacatcgacatctggggccgcgatccggccaaggccgccgcgctggccgcccggctgcgcgaggagggctacccggcgcgagcggccgacgggttgcgcgcggcggtggaggcggccgactgcgtcagttgcgttaccacctcccgcgaagcgctggtgcgcggcgcatggctgaagccgggcgtccatctcgacctggtcggcgccttcctgccgtccatgcgcgagaccgacgtcctggcggtggcgcgcgcgcgggtcgtggtggatacccgcgcaggcgcgctggaagaggccggcgacctgttgcaggcgatcgccgaaggcgccatcgggcgcgaggcgatatccaccgaactgcgcgacttgctgagcggggcagggcggcgcggcgatcccggggaaatcaccctgttcaagtcggtgggttatgcgctggaggacctggtcgccgcgcgccgggttgtggataacgccgcctga

SEQ ID NO: 30565 - DNA, 1200 bp, Pseudomonas aeruginosa
atggccgaaagcgtctttgccgagcgcattgtgcagaacctgctcgataccgatttctacaagctgaccatgatgcaggcggtgctgcacaactaccccaacgccgaagtggagtgggaattccgctgccgcaacgccgaggacctgcgtccgtacctggcggagatccgctaccagatcgagcgcctcgccgaagtcgaggtaaccgccgaccagctcgccttcctcgaacgcatcccgttcatgaagccggacttcatccgcttcctcagcctgttccgcttcaacctgcgctacgtgcacaccggcatcgaggatggccaactggcaatccgcctgcgcggcccatggctgcacgtgatcctcttcgaggtgccgctgctggccatcgtcagcgaggtgcgcaaccgttatcgctaccgcgaggtggtcctggaacaggtcggcgagcagctctatcgcaagctcgactggctctccgcccaggccagcagcgaggaactcgcggaattccaggtcgccgacttcggcacccgccggcgcttctcctaccgcacccaggaggaagtggtgcatatcctcaagcgcgacttccccgggcgcttcgtcggcaccagcaacgtgcacctggcccgcgagtacgacctcaagccgatcggcaccatggcccacgaatggctgatggcccaccagcaactcggcccgcggctggtcgacagccagcaagcggcgctggactgctgggtccgcgagtaccgcggacagctcggcatagccctgaccgactgcattaccatggatgccttcctcgacgacttcgacctgtacttcgccaagctcttcgacggcctgcgccacgattcgggcgacccgctggcctgggcggagaaagccatcgcccactaccgccgcctgggtatcgacccgctgagcaagaccctggtgttctccgacgggctggacatgcccaaggcgttgcagctgttccgcgcgctacgtggcaagatcaacgtcagcttcggcatcggcaccaacctgacctgcgacatcccgggggtcgagccgatgaacatcgtcctgaagatgacggcctgcaacggccatccggtggcgaagatatccgacgccccgggcaagacccaatgccgcgacgagaacttcgtcgcctacctccgccacgtcttcaacgtgccggcctaa

SEQ ID NO: 30566 - DNA, 828 bp, Pseudomonas aeruginosa
atgcaacagatccaacgcgacatcgcccaagccctgcaggtccagccgccgttccagtcggaggccgacgtgcaggcgcagatcgcccggcgcatcgccttcatccagcagtgcctgaaggattccgggctgaagaccctggtgctggggatcagcggcggcgtcgactcgctcaccgccggcctgctggcccagcgcgccgtcgagcaactgcgcgagcagaccggcgaccaggcctaccgcttcatcgccgtgcgcctgccctaccaggtgcagcaggacgaggccgatgcccaggcctcgctggcgaccatccgcgccgacgaagagcagaccgtcaacatcggtccgtcggtgaaagccctggcggaacagctggaagccctggaaggactcgagccggcgaagagcgacttcgtcatcggcaatatcaaggcgcgcatccgcatggtcgcccagtacgccatcgccggcgcccgcggcggcctggtgatcggcaccgaccatgctgccgaggcggtcatggggttcttcaccaagttcggcgacggcgcctgcgacctggctccgctcagcggcctggccaagcatcaggtacgcgccctcgcccgcgccctcggcgctccggagaacctggtggagaagatccccaccgccgacctcgaggacctgcgccccggccatccggacgaggcttcccacggcgtcacctatgccgagatcgacgccttcctgcacggccagccgctgcgcgaggaagctgcgcgggtgatcgtcgacacctaccacaagacccagcacaagcgcgaactgccgaaggcgccctga

SEQ ID NO: 30567 - DNA, 588 bp, Pseudomonas aeruginosa
atgaccttgcgttccgtctgcgtattctgtggcgccagccccggcgcttccccggtctaccaggaagccgccgtggccctcggccggcacctggccgagcgcggcctgaccctggtctacggtggcggcgcggtcggtctgatgggcaccgtggcggacgccgcattggccgccggcggcgaagtgatcgggatcatcccgcagagcctgcaggaggccgagatcggccacaagggcctgacccgcctggaagtggtagacggcatgcacgcgcgcaaggcacgcatggccgaactggccgacgccttcatcgccctgcctggcgggctcggcaccctggaagagctgttcgaggtctggacctggggccaactgggctaccacgccaagccgctgggcctgctcgaagtgaacggtttctacgacccgctgctgactttcctcgaccacctggtcgacgaacgtttcgtccgcgccgaacaccgcggcatgctgcagcgcggcgccagcccggaggcgctgctcgatgccctcgccgcctggacgccgagcgtggcgccgaagtgggtcgaccgcaccccgcagtga

SEQ ID NO: 30568 - DNA, 2244 bp, Pseudomonas aeruginosa
atgcaagccgccaagccgctgttcgactatcccaagtactgggccgagtgtttcggtccggcgcccttcctgcctatgagtagagaagagatggatcagctcggctgggactcctgcgacatcatcatcgtcaccggcgatgcctacgtcgaccacccgtccttcggcatggccatcatcggccgcctgctggaggcccaggggttccgcgtcggcatcatcgcccagccggactggcagtcgaaggacgacttcatgaagctcggcgagccgaacctgttcttcggcgtggcggccggcaacatggactcgatgatcaaccgctacaccgcggacaagaaggtccgttccgacgacgcctacacccccggcggcctggccggcaagcgcccggaccgcgccagcctggtctacagccagcgctgcaaggaggcctacagccatgtgccggtgatcctcggcgggatcgaggcctcgttgcggcgcatcgcccattacgactactggcaggacaaggtccgccgctcgatcctgatggacgccacggccgacatcctgctctacggcaacgccgagcgtgcggtggtggaaatcgcccagcgcctggcccagggcgaactggtgagcgcgatcaccgacgtgcgcggcaccgccttcgtccgtcgcgacaccccggagggctggttcgagatcgattccacgcggatcgaccggccgggcaagatcgacaagatcatcaatccctacgtgaacacccaggacaccgccgcctgcgccatcgagcaggaaaagggcgcgcaggaggacccgcaggaagccaaggtcgtgcagttgctggcgaaccccaggctgacccgggagaagaccgtgatccgcctgccgtctttcgagaaggtgcgcaacgacccggtgctctatgcccacgccaaccgcgttctgcacctggagaccaacccgggcaacgcccgtgccctggtgcagaagcacggcgaagtggatgtctggttcaacccgccgcccattccgatgagcaccgaggaaatggactacgtgttcggcatgccctatgcccgcgtgccgcacccggcctacggcaaggcgaagattcccgcctacgagatgatccgcttctcggtgaacatcatgcgtggctgcttcggcggctgcaccttctgctcgatcaccgagcatgagggacggatcatccagaaccgctcgcacgactcgatcatccgcgagatcgaggagatgcgcgacaaggtgcccggcttcaccggcgtggtctccgaccttggcggaccgacggcgaacatgtaccgcatcgcctgcaagagcccggacatcgagcggcactgccgcaagccatcctgcgtgttccccggcatctgcgagaacctcgataccgaccacagctcgctgatcgagctgtaccgcaaggcccgggcgctgccgggggtgaagaagatcctgatcgcctccggcctgcgctacgacctcgccgtcgagtcgcccgagtacgtcaaggaactggtgacccaccacgtcggcggctacctgaagatcgccccggagcacaccgagcgcggtccgctggacaagatgatgaagccggggatcggcacctacgaccgcttcaagcagatgttcgagaagttctcgaaggaagccggcaaggagcagtacctgatcccgtacttcatcgccgcccatcccgggaccaccgacgaagacatgatgaacctggccctgtggctcaagcgcaacggcttccgcgccgaccaggtccaggcgttctatccttcgccgatggccactgccaccgctatgtatcactcgggcaagaacccgctgcgcaaggtcacctacaagagcgatggcgtgaccatcgtcaagagcgaccagcagcggcgcctgcacaaggccttcctgcgctaccacgacccgaaaggctggccgctgctgcgcgaggcgctggagcggatggggcgcgccgacctgatcggcaatggcaagcaccacctggtcccgacctaccagccggataccggcgaataccagagcgcccggcggaagaactcgacgccggccggcagcaagaaggccggcaagctgctgacccagcataccggcctgccgccacgcgccagcgacggcggcaagccgtggagcaagggccagcagaacaaggcgacggccttcgccaagggcaagaagaagtcgcgccagccgaacatcccgcgctga

SEQ ID NO: 30569 - DNA, 1077 bp, Pseudomonas aeruginosa
atgcgtcccctcgttgccaccgtcgacctttccgccattcgccacaactatgccctggccaagcgctgcgcgccgcagcgccaggcgttcgcggtggtcaaggcgaacgcctatggccacggtgcgcgcgaagtggttaccgcgttgcacgacgatgccgatggcttcgccgtggcctgcctggaggaggccgcggaagtccgcgccttgcacgccagcgcgcgcatcctgttgctggaaggctgcttcgaggcgagcgaatacgccctcgccgggcaattgcgcctggacctggtgatccagggcgcggaacagggcgaggcgttcctcgccgccggcctggatattccactcaacgtctggctcaagctcgactccggcatgcaccgcctgggcttcgatcctgccgcgctgcgcgcctggcatgcgcgcctgcgcagccatcccggtgtgcgcgagctgaacctgatcagccatttcgcctgcgccgacgaacgcaaccatccgctcaccgaacagcagctggagagtttcctcggcctgctcgacctggacttcgaccagcgcagcctggccaattcggcggcggtgctgactatcccggccgcccacatggactggctgcggccgggaatcatgctctacgggtcgaccccgctggccgacctcagtgctgccgaactgggcctgaagccggccatgagcctgggcgcgcagttgatttcactgcgcgaggtggccgtgggtgagagcgtcggctacggcgccacctggatcgccgagcggccggcgcggatcggcacggtcagttgcggctacgccgacggctatccgcgtaccgcgccagccgggactccggtactggtcgggggacgccgcgcgatcctggccgggcgggtctcgatggacatgctggcggtcgacctctccgacctgccggaggctcgcgttggcgacccggtggagttgtggggcgccgggttgtcggtggacgaggtcgcccgtgcctgcggcacccttggctacgagcttctgagcaaggtcacggctcgggttccgcgacgctacagccactga

SEQ ID NO: 30570 - DNA, 1395 bp, Pseudomonas aeruginosa
atgaacgagatcaccagccccgagcaatacgacctggaaaccacagccctgaaggtgccgccgcactcgatcgaggccgagcaggccgtgctgggtggcctgatgctggacaacaacgcctgggagcgtgtgtcggattcggtgtccgacggcgatttctaccgccatgaccatcgcctgatcttccgcgccatctacaagctggccgaggccaaccagccgatcgacgtggtgaccctctccgagcagttggagaaggaaggacaactggcccaggtcggcggcctggcctatctcggcgaactggcgaagaacattccctcggtcgccaacatcaaggcctacgcgcagatcatccgcgagcgcgccaccctgcgccaactgatcggcatcagcaacgagatcgccgacagcgccttccacccggaagggcgcggcgccaacgagatcctcgacgaggccgagcggaagatcttcgaggtcgccgaagcgcgaccgaagaccggcgggccggtagggatcagcgatatcctggtcaagaccatcgaccgcatcgactacctgttcaacaccaccgaggcgctgaccggggtgtccaccggtttcaccgacctcgacgagaagaccagcggcctgcagccggccgacctgatcatcgtcgccgggcgtccgtcgatgggtaagaccaccttcgccatgaacctggtcgagaacgcggtgatgcgcaccgacaaggccgtgttggtgtactccctggagatgccctccgactcgatcgtgatgcgtatgctctcgtcgctcgggcgtatcgaccagaccaaggtgcgttccggcaagctcgacgacgaggactggccgcgcctgacttcggcgatcaacctgctcaacgacaagaagctgttcatcgacgataccgctggcatcagtccctcggaaatgcgcgcgcggacccgtcgcctggtgcgcgagcacggcgacctggcgctgatcatgatcgactacctgcaactgatgcagatacccggctccagcggcgacaaccggaccaacgagatttccgagatttcccgctcgctgaaggccctggcgaaggaattcaactgcccggtgattgccctgtcgcagctcaaccgctccctggagcagcgacccaacaagcgcccggtgaactccgacttgcgcgaatccggggcgatcgagcaggacgccgacgtgatcatgttcgtctaccgcgacgaggtgtaccacccggagaccgagttcaagggcgtcgccgaaatcatcatcggcaagcagcgtaacggtccgatcggtacggtgcgcctggccttcatcggcaaatacacgcgcttcgagaaccttgccgccggcatgtacaacttcgaggacgaatga

SEQ ID NO: 30571 - DNA, 447 bp, Pseudomonas aeruginosa
atggaagtcatcctgctggaaaaagtcgccaacctgggcaacctgggcgacaaggtgaacatcaagggcggttacgcccgtaacttcctgctgccgcagggcaaggccaccgtcgccaccgccgagaacgtcgctgcgttcgaagcacgccgcgccgagctggaaaaggctgccgccgagaagaaggccgctgccgaagcccgtgctgcccagctctccgagctggtggtaaccctcggcgcccacgctggcgacgaaggcaagctgttcggttcgatcggcacccgcgacatcgccgaagccgtttccgctgccggttacccgctggaaaaagccgaagttcgcctgcccaacggcgcgctgcgcaacaccggtgagttcgacgtcgccgtgcacctgcacaccgacgtggaaaccactctgaagctgatcatcgtcgctgagtaa

SEQ ID NO: 30572 - DNA, 231 bp, Pseudomonas aeruginosa
atggcacgtttcttccgtcgtcgtaagttctgccgcttcaccgccgaaggcgtgaaagagatcgattacaaggatctcaacaccctgaaggcctacgtttccgaaaccggcaagatcgttccgagccgtatcaccggcaccaaggccaagtaccagcgtcagctggcgaccgctatcaagcgcgcccgctacctggccctgcttccttacaccgacagccacggccgttga

SEQ ID NO: 30573 - DNA, 420 bp, Pseudomonas aeruginosa
atgcgtcattacgaaatcgtgttcctggttcacccggaccagagcgaacaagtcggtggcatggtcgagcgttacaccaaggccatcgaagaagacggcggcaagatccaccgtctggaagactggggccgtcgtcagctggcctacgccatcaacaacgtgcacaaggcccactacgttctgatgaacgtcgagtgcagcgccaaggccctggctgagctggaagacaacttccgttacaacgatgccgtgatccgtaacctggtcatgcgtcgcgacgaagctgtcaccgagcagtccgagatgctcaaggctgaagaaagccgcaacgagcgtcgcgagcgtcgtgagcgtccgaacgataacgctgaaggcgccgatggcgacgacaacagcgatagcgataacgctgacgagtaa

SEQ ID NO: 30574 - DNA, 1293 bp, Pseudomonas aeruginosa
atgggtaagaatgtcgtagtcctgggcacccaatggggtgatgagggcaagggcaagatcgtcgacctgctcaccgagcaggcggctgccgtagttcgctaccagggtggtcacaacgctggccacaccctggtgatcgatggcgagaaaaccgtcctgcacctgattccatcgggcatcctgcgcgaaggcgtgcagtgcctgatcggcaatggcgtggtgctggcgccggatgcgctgctgcgcgaaatcaccaagctggaagagaagggcgtgccggtgcgcgagcgcctgcgcatcagtccttcctgtccgctgatcctgtcctatcacgtcgccctcgaccaggcgcgcgagaaggcccgcggcgaagccaagatcggcaccaccggtcgtggcatcggcccggcatacgaggacaaggtggcacgtcgcggcctgcgcgtcggcgacctgttccaccgcgagcgcttcgccgccaagctgggcgagctgctggactaccataacttcgtcctgcagcactactacaaggagccggccatcgacttccagaagaccctggacgaggcgatggagtatgccgagctgctcaagccgatgatggccgatgtcgctgcgaccctgcacgacctgcgcaagcacggcaaggacatcatgttcgaaggcgcccagggatcgctgctggacatcgaccatggcacctacccctacgtgaccagttccaacaccaccgctggcggtaccgccaccggttccggcttcggcccgctgtacctggactacgtactgggtatcaccaaggcctataccactcgcgtcggctccggtccgttcccgaccgagctgttcgacgacgtcggcgcctacctggccaagcgcggccacgagttcggtgccaccaccggtcgcgctcgtcgctgcggctggttcgatgccgtgatcctgcgccgcgccatcgagatcaacagcatctccggcctgtgcctgaccaagctcgacgtgctcgatggcctggatgtggtgcgcctgtgcgtcggctacaagaatgccgatggcgatgtgctggaagcgccgaccgatgccgacagctacatcggcctgcagccggtctacgaggaaatgcccggctggagcgagtcgaccgtgggtgcgaagaccctggaagagttgccggccaacgcccgcgcctacatcaagcgcgtggaagagctggtgggtgcgccgatcgatatcatctccaccggtccggaccgcaacgagaccatcatcctgcgccatccattcgcctga

SEQ ID NO: 30575 - DNA, 1902 bp, Pseudomonas aeruginosa
atgagtgaagcaccgcgtatccagctgctgagtccgcggctggcgaaccagatcgccgccggtgaggtggtcgagcgtcccgcctcggtggccaaggaactcctggaaaacagccttgacgccggttcccggcgcattgatgtggaggtcgagcagggcggcatcaagttgctgcgagtgcgcgacgacggtcgcggcatccccgccgacgacctgccgctggccctggctcgccacgccaccagcaagatccgcgagctggaagacctggagcgggtgatgagcctcggattccgtggcgaggcgctggcctcgatcagctcggtagcgcgcctgaccatgacctcgcgtaccgccgacgccggcgaagcctggcaggtggaaaccgagggccgcgacatgcagccgcgggtacagccggcggcgcacccggtggggaccagcgtcgaggttcgcgacctgttcttcaacaccccggcgcggcgcaagttcctgcgtgccgagaagaccgagttcgaccatctgcaggaggtcatcaagcgcctggcgctggcccgcttcgacgtggctttccacctgcgccacaacggcaagaccatcttcgccctgcacgaggcgcgagacgagctggcccgcgcgcgccgggtcggcgcggtgtgcggccaggcattcctcgagcaggcgctgccgatcgaggtcgagcgcaacggcctgcacctgtggggctgggtcggcttgccgaccttctcccgcagccagccggacctgcagtacttctatgtgaacgggcgcatggtgcgcgacaagctggtcgcccacgcggtgcgccaggcttatcgcgacgtgctgtacaacggccggcatccgaccttcgtgctgttcttcgaagtcgatccggcggtggtggacgtcaacgtgcacccgaccaagcacgaagttcgcttccgtgacagccggatggtccatgacttcctctatggcaccctgcatcgtgcgctgggcgaggtccgtcccgacgaccagctcgcgccgcccggggcgaccagcctgaccgagccgcgtccgaccggcgctgccgccggcgagttcggcccgcagggcgagatgcgcctggccgagagcgtgctggagagtccggcggcacgggtgggctggagtggcggctcatcggcctccggcggctcctccggctattccgcctatacccggccggaggcgccgccctctctggccgaggccggtggcgcctacaaggcctacttcgcgccgttacccgcgggcgaggcgccagccgcgttgcccgagagtgcccaggacatcccgccgctgggttacgccctggcgcagctcaagggcatctacattctcgccgagaacgcccacggcctggtgctggtggacatgcacgcggcccacgagcggatcacctacgagcgcctcaaggtggcgatggccagcgaaggcttgcgtgggcagccgttgctggtgccggagtcgatcgcggtcagcgagcgcgaggcggattgcgcggaagagcattccagctggttccagcgcctgggcttcgagctgcagcgcctggggccggaaagcctggcgatccggcagatccctgcgctgctcaagcaggcggaggcgacccagttggtgcgcgatgtcatcgccgacctgctggaatacggcaccagtgaccgtatccaggcgcacctgaacgagctgctcggcaccatggcctgccatggcgcggtgcgcgccaaccggcgcctgaccttgccggaaatgaacgccctgttgcgcgacatggaaatcaccgaacgcagcggccagtgcaaccatgggcgtccgacctggacccagttgggcctggacgagctggacaagctcttcctgcgcggacgctga

SEQ ID NO: 30576 - DNA, 1428 bp, Pseudomonas aeruginosa
atgggttggggcttgcgtctgcggacgttgttgactggggtgatgattctgctggcctgccaggtcggcgaggttctggccgccgcgcaaatcaagagcgtgcggatctggcgcgctccggacaacacccgtctggtcttcgatctctccggtccggtgcagcacagcctgttcaccctggccgctcccaaccgtatcgtcatcgacgtcagcggcgcccaactggcgacccagctcaacggtctcaagctcggcaacactccgatcaccgcggtgcgctccgcccagcgcacgcccaacgacctgcgcatggtcctcgacctgtcggcgcaggtcaccccgaaaagcttcgtcctgccgcccaaccagcaatacggcaaccgcctggtggtcgatctctacgaccagggcgccgacctgaccccggacgtgcccgcgacgccgaccccgagcgtgccggtcaccccggtgacgccgacccagccggtggccaagctgccgctgccaaccaagggcggcacccgcgatatcgtcatcgccatcgacgccggccacggcggtgaagaccctggcgcccttggcccgggcgggttgcacgagaagaacatcaccctgtcgatcgctcgcgagctgcaacgccagatcaaccaggtgcgcggttaccgggccgagctgacccgtaccggcgactatttcatcccgctgcgcaagcgcaccgagatcgcccgcaagaagggcgccgacctgttcgtctcgatccatgccgacgccgcgccgagccgcagcgccttcggtgcctcggtgttcgccctgtccgaccgcggcgccacttcggaaaccgcgcgctggctggccgacagcgagaaccgttccgacctgatcggcggcgatggcagcgtcagcctcggcgacaaggaccagatgctcgccggcgtgctgctcgacctgtcgatgaccgccaccctctcgtcgagcctggatgtcggccacaaggtactgaccaatgtcggccgcatcacttcgctgcacaagcgtcgtgtcgagcaggccgggttcatggtgctgaagtcgccggacatcccatcgatcctggtggaaaccggcttcatctcgaacgtcaacgagtcgcgcaagctggctagcgccagccatcagcaggctttggcgcgttcgatcaccagcggcatccgccagtatttccagcagagcccgccgcccggcacctacatcgcctctttgcgcgcccagggcaagctctccatggggccgcgcgagcacgtggtgcggcccggagagaccctggcgatgatcgcccagcgctatgaagtgagcatggccgcgctgcgtagcagcaacagcctgtccagcgacaacctgaaagtcggccaggccctgtccatcccgagcaccgccctggcggcccagtga

SEQ ID NO: 30577 - DNA, 1290 bp, Pseudomonas aeruginosa
atgcccggctctgcgtctctcgggtgtgcgggaaagcgggtagaatggcgtcttttacctggcggagcttacgccttgcgcgaaattgtcctgatcaacatcaccggggaagaccgccccggtctcaccgctgccatcaccggcgtactggcccagggcggggtgaacatcctcgacatcggccaggcggtgatccacgacaccctgtcgttcggcatcctggtggaaatcccggataccgaggccggttcctcggtcctcaaggacgtgctgttcaccgcctacaagctggaccagcaggtgcgcttcaccccggtctcggaagaggactaccggcaatgggtcgacggccagggcaaggcgcggcacatcgtgaccctgctcacccgccgggtgactgccgagcaactgcagagggtcagctcgatcaccgccaagtacgcgctgaacatcgaccacatcgaccgtctctccgggcgtatgccgctggacatgcccgccgaccagggcaagggctgcatcgagttctcggtacgcggcgaaccggccgatccggcggcgctgcgtgcggaattcctcagcgtcgcccaggaattgaacgtcgacatcgctttccagcaggacagcgtgttccgccgcaaccgccggctggcggtgttcgacatggattcgacgctgatcgaggcggaagtcatcgacgaactggccaaagccgccggcgtcggcgagaaggtcgccgcgatcaccgagcgggcgatgcgcggtgaactggacttccgcgccagcttcaaggagcgcctggcgctgctgcaggggctgtcggaagacgtgctggaggagatcggcgcctcgctgcgtctgaccgagggtgcggaaaccctgttcgccgaactcaagcgcctgggttacaagaccgccatcctgtccggcggcttcacctatttcgcccgtcaattgcaggcgaagctggggatcgactacgtgttcgccaacgagttgcagatcgtcgacggcaaggtcaccggggtggcggtcgagccgatcgtcgatgcccagcgcaaggccgacctgctgcgcgaactggcggcgaaggaaggcctgagcctggagcagaccatcgccgtcggcgacggcgccaacgacctgccgatgctcggcctggccggcctgggcgtggcgttccgcgccaagccgctggtcaagcagtcggccaagcaggcgatctcgaccctgggcctggacggcatcctctacctgctcggctaccgcgaccgcgaaggacgagcctga

SEQ ID NO: 30578 - DNA, 2265 bp, Pseudomonas aeruginosa
atgagcgaatccctcgatctgagcctggaaggggtcgaacgccggtcgttggccgagttcaccgagcaggcctatctgaactattccatgtacgtgatcatggaccgcgccctgccgcatatcggcgacggcctgaaaccggtgcagcgacgcatcgtctacgccatgagcgaactggggctggatgccgattccaagcacaagaagtcggcgcgcaccgtcggcgacgtgctcggcaagttccacccgcacggcgactcggcctgctacgaggccatggtgctgatggcgcagccgttctcctatcgctatccgctggtggacggccagggcaactggggggctccggacgatcccaagtccttcgccgccatgcgttataccgaggcgcgcctgtcgcgctattccgaggtgctgctcagcgaactgggccagggtaccgtggactgggtaccgaacttcgacggcaccctcgacgagccggccgtgctgccggcccgcctgcccaacctgctgctcaacggcaccaccggcatcgcggtgggcatggccaccgacgtgccgccgcacaacctgcgggaagtcgcgtcggcctgcgtgcgcctgctcgaccagccgggcgcgacggtcgccgaattgtgcgaacacgtgccgggcccggacttccccaccgaagccgagatcatcaccccgcgcgccgacctgcagaaggtctacgagaccggccgcggttcggtgcgcatgcgcgcggtgtaccgcgtcgaggacggcgatatcgtcatccacgccctgccgcaccaggtgtccggttccaaggtgctggaacagatcgccgggcagatgcaggccaagaagctgccgatggtggccgacctgcgcgacgagtcggaccacgagaacccgacccgcatcgtcatcatcccgcgttcgaaccgggtcgatgtcgaagagctgatgacccatctgttcgccaccaccgacctggagaccagctaccgggtcaacctgaacatcatcggcctcgacggcaagccgcaggtcaaggacctgcgccagttgctctcggagtggctgcagttccgcatcggcaccgtgcgtcgacgcctgcagttccgcctggacaaggtcgagcgccgcctgcatctgctggatggcttgctgatcgccttcctcaacctcgacgaggtgatccacatcatccgcaccgaggaccagcccaaggcggtgctgatggagcgcttcgaactcagcgaggtgcaggccgactacatcctcgacacccgcctgcgccagttggcacgcctggaagagatgaagatccgcggcgagcaggaagagttgctgaaggagcagaagcgcctgcagaccctgctcggcagcgaggccaagctgaagaagctggtgcgcgaggagctgatcaaggacgccgagacctacggcgacgaccgccgttcgccgatcgtcgcccgcgccgaggcccgcgcgctgtcggaaaccgagctgatgcccaccgaaccggtgaccgtggtgctctcggaaaaaggctgggtgcgttgcgccaagggccacgacatcgacgccgccggcctctcctacaaggccggcgacggcttcaaggccgccgcgccgggacgctcgaaccagtatgcggtgttcatcgactccaccgggcgcagctactcgctgccggcccacagcctgccgtccgcgcgaggccagggcgagccactcagcggccggctgacgccgccgccgggggccagcttcgaatgcgtgctgctgccggacgacgatgcgctgttcgtgatcgcttccgacgccggctatggtttcgtggtcaagggcgaggacctgcaggccaagaacaaggccggcaaggccctgctcagcctgcccaacggctccgccgtggtggcgccgcgcccggtgcgcgatgtggagcaggattggctggcggccgtgacgaccgagggccgtctgctattgttcaaggtctccgacctgccgcagctcggcaagggcaagggcaacaagatcatcggcatccccggcgaacgcgtggccagccgcgaggaatacctcaccgacctggctgttctgccagccggggcgacgttggtcctgcaggccggaaagcgtaccctgtcgctcaagggcgacgacctggaacactacaagggggagcgaggccggcgaggcaacaagctgccgcgcggtttccagcgcgtcgacagcctgctggtggatattccgccacaggattga

SEQ ID NO: 30579 - DNA, 1890 bp, Pseudomonas aeruginosa
atggctacttacaacgcagacgccatcgaagtcctttccggcctcgacccggtgcgcaagcgcccggggatgtacaccgacaccacccgccccaaccatctggcccaggaagtcatcgacaacagcgtcgacgaagccctggccggccatgcgaagagcgtgcaggtgatcctgcaccaggacaactcgctggaagtcatcgacgatggccgcggcatgccggtggacatccacccggaagagggcgtgccgggcgtcgagctgatccttaccaagctgcatgccggcggcaagttctcgaacaagaactaccagttctccggcggcttgcacggggtcggcatctcggtggtgaacgcgctctcgacccgggtcgaggtacgcgtcaagcgcgacgccaacgagtaccggatgaccttcgccgacggcttcaaggacagcgatctggaagtcatcggcacggtcggcaagcgcaataccggtaccagcgtgcatttctggccggatccgaagtatttcgattcggcgaagttctcggtcagccgcctcaagcatgtgctcaaggccaaggcggtgctgtgcccgggcctgagcgtggtgttcgaggacaagaacaccggcgagcgcgtcgagtggcacttcgaggacggcctgcgctcctacctgaccgacgcggtcgccgagctgccgcgcctgcccgatgaacccttctgcggcaacctcgaaggttccaaggaagcggtgagctgggccctgctgtggctgcccgagggcggtgagtcggtgcaggaaagctacgtcaacctgattcccacggcccagggcggcacccatgtgaacggcctgcgccagggcctgctcgacgccatgcgcgagttctgcgagttccgcaacctgttgccgcgcggcgtcaagctggcgcccgaggacgtctgggagcggatcgccttcgtcctctcgatgaagatgcaggagccgcagttctccgggcagaccaaggagcgcctgtcgtcccgcgaggcggcggcgttcgtctcgggcgtggtgaaggacgccttcagcctgtggctcaacgagcacgccgaaatcggcctgcaactggcggaactggcgatcagcaacgccgggcgtcgcctcaaggcgggcaagaaggtcgagcgcaagaagatcacccaggggccggcgctgcccggcaaactggccgactgcgccggacaggaaccgatgcgcgcggaactgttcctggtcgagggcgactccgccggcggctcggcgaagcaggcgcgggacaaggaattccaggcgatcatgccgctgcgcggaaagatcctgaacacctgggaagtggacggcggcgaggtgctcgccagccaggaggtccacgacatcgcggtggccatcggcgtcgatccgggtgccagtgacctggcccagctgcgctacggcaagatctgtatcctcgcggatgccgactccgacgggctgcacatcgccacgctgctctgcgcgctgttcgtccgccatttccgcccgctggtggaagccggccacgtctacgtggcgatgccgccgctgtaccgcatcgacctcggcaaggacatctactacgccctcgacgaagccgagcgcgacggcatcctcgagcgcctggccgcagagaagaagcgcggcaagccgcaggtcacccgcttcaagggccttggcgaaatgaatccgttgcaactgcgcgagaccaccatggatccgaatacccggcggctggtccagctcaccctggaggacgccaccggtaccctggagatcatggacatgctgctggccaagaagcgcgccggtgaccgcaagtcctggctggaaagcaagggcaacctggccgaggtgctggtctga

SEQ ID NO: 30580 - DNA, 819 bp, Pseudomonas aeruginosa
ttgtcacgccattcgaacactcccgccaccgacgcctccgtactgctggtgcagctctcggacagccacctgttcgccgaggatggcgcgcgcctgcttggcatggataccgcccatagcctggagaaggtggtcgagcgggtcgcccgggagcagccgcggatcgacctgattctcgccaccggcgacgtctcccaggacggcagcctcgattcctacacacgcttccgcaggttgagcgcccccctggacgcgccgttgcgctggttcgccggtaaccacgacgaacgcgagccgatgcaacgggcgaccgagggcagcgacctgttggagcaggtcgtcgacgtcggcaactggcgcgtggtgttgctcgactcgagcattcccggcgcggtgccgggctatctcgaggaggatcagctggagctgctgcggcgcgccatcgacagcgccggcgaacgcttcctgctggtttccttccatcaccacccggtgccgatcggcagcgactggatggatcccatcggcctgcgcaacccgcaggcgctgttcgacctgctggcgccctatccgcaggtacgctgcctgctgtgggggcacattcaccaggagttcgaccgccagcgcggcccgctgcgcctgctggcttcgccgtccacctgcgtacagttcgctcccggcagcagcgacttcaccctcgaccgcctggcgccgggctaccgctggttgcgcctgcacgacgacgggcgcctggaaacggggatctcgcgggtcgacgacgtcgtcttcgaagtggactacgacaccgccggatactga

SEQ ID NO: 30581 - DNA, 459 bp, Pseudomonas aeruginosa
atgggcctgaacctgctgcgcgagcgctaccgggtcgacctggccagcctgcaggcgacctgcgaagcgaactacgcgcggctcatgcgcctgctcccggacatgcgcgaggcgcaggcctcgcgccgggtcgcgctgagcgaaggggagcggctgctcggcgtacttgcgctggaagtgaccgaggcctgcccctacaccaccacccttcaggtgcgccaggaactgggcctgccctggttgccggcgccgcggctggaagtgcgggtctaccacgatgcgcggatggccgaggtgatcggcgccgaacaggcgcggcggctgatggcgatctatccctacccgaaccaggcgatgcaccagcccgacgagaagaaccagctcaacctgttcctcggcgagtggctcgcccattgcctggcctgcggccacgaaatggagccggtggcccagcgctga

SEQ ID NO: 30582 - DNA, 792 bp, Pseudomonas aeruginosa
atgactgacctttccccattgcagacgcgggtcgaagccgggatcgcctggctcgtcctgaaccgtccgcaacagcgcaatgcactggatatccccaccctggaggccctgcacgtccgactcgatgcctgcgagcgcgacccggcagtgcgcgctgtggtgctcggcggcagcggacgcagcttctgcgccggggccgatctcgccgaatgggcggcggctgaagcccgtggcgagctggaaagctatggctggaccgaggccgcccacgccctgatggggcgcctgcacgccctcgacaaacccacagtcgccgccgtcaacggcagcgccgtgggcgctggcatggacctggcgctgtgctgcgatttccgcatcgccgccgcctcggcgcgcttcaaggccggctacaccggcatggcctactgcccggacgccggcgccagttggcatctgccacggctgctcggcagcgaggcggccaagcgcctgctgttcctcgacgaagcctggagcgcggagcgagccctgggcgccggactggtcggcgaggtggtcgccgacgagcacctggttgaggcggtcggcgccttcgctgcgcgtctcgccagcggtccgacctttgccttcgcccagaccaagcgcctgctgcgcgacggcgccgggcgctcgctggccgagcagttgcgggccgagcaggccgccgggctgctctgcgggcgcagcgaggatgccgccgaggcgctgcgcgccgtggccgagaaacgttcccctcaattcagcgggcgctag

SEQ ID NO: 30583 - DNA, 1413 bp, Pseudomonas aeruginosa
atggctgacggcaaggaaaggctgcaactcacccgggccctggcgagccgccacatcttcatgctgtccctcggcggggtgatcggcaccgggctgttcatgggctccggcgtgaccatcaaccagggcggcccggccggcgcggtgctggcctacctggtggccggggtgctgatgtacctggtgatggtctgcctcggcgagctgtcggtgcagatgccggtctccggttcgttccaggcccacgcgacgcgtttcatcggcccggcgactggcttcatgatcggctgggtctactggatgagctgggcctccacggtaggcctggaattcaccgcggccgggatgctcatgacccgctggttcccggaggtgcccgtgtggctatggtcgggtttcttcgtggtcgtgctgttctccctcaatgccctggcgacccgcgctttcggcgaggccgagtactggttcgccgggatcaaggtggcggcgatcctggtgttcatcgtggtcggggggctggtgatcttcggcggtatcgaactgaagagcggtgcgccggcgccgatgttctccaacctggtcggcgagcggctgttccccaacggcctgtcggcggtgttcgcggtgatgatgacggtggtctatgccttccagggttgcgagatcatgggcgtcgccgccggcgagaccgagcgaccggagaagagcatcccgcgggcggtgcgcaacgtggtgttccgcgtactgatcttctacgtgctggccatcgtcgtgctttccgccatcattccctggcaacaggccgggctgatggaaagcccgttcgtgcaggtgttcgacatggtcgggattccctacgcggcggacctgatgaacttcgtcatcctcaccgccatcctctcggtaggcaactcgggcctgtacgcctcgacgcggatcctctgggcgatgtccaggtccggcatggccccgcgcggcctgtcgaagctcagcgcgcgcggcgtgccgctctacgcgttgctgatcaccctgtgcttcgccctgctctcgttgctgaccagcgtggtcgccgccgacaccctgttcatggtgctgatggcggtgagcgggatgtccggcaccgtcacctggatcgtcatcgcctacgcccaataccgcttccgccgcgagcacatggccagcggcggcacggtcgccgagctgaaatatgccgcgccgctgttcccgctggtgccgctggcctgcatcgccgtgtgctgctcgctgttcgtcttcctcgccctcgatcccacccagcggccgtccttgtactggggcttcggcttcatcgccgcctgctacctggcctattacgtggttcgtcgccggcagccgcagggactgggcgaccccgccctgggacgggccggctga

SEQ ID NO: 30584 - DNA, 2997 bp, Pseudomonas aeruginosa
atggctgctgggcggcctggcacaggctgcggagaccatccgctattgcgactatccggtatacccgccgatttcctggagcgacggccagcaggtccgggggctggcgccggagctggtgaagcggctgttcggcgcgctgggctaccgggtcgaggtggtggtgctgggcaactggcggcgctgcctgctcgacgccgccgccggacgggtcgacctgatactggcctaccgcacgcccgcgcgcgatcgcgacctggcgttttccgccgagccggtgctgcgcgaggaggtggcgatcttctacaaccgccagcggccggtgcgcatccaatccctcggcgacctcgccggctatcgcggcgggctgttgttcggcgaaagctacggggcggacttcgaccgcttcgtcggccgccacggcaacgtcgaatgggtttccgacagccgacagaacttcggcaagctggtgcgccagcgcatcgactacatcgcccacgaacgacgcaccggcacgctgttcgccgagcgcctggccggcggcgagaacatccgtgcgctgcccgaaccgctgacggtggactacctgcgggtggcggtctcgcggcactcgccgctggcggcgaagatggacgagatcgaccgggccctgcgtggctatcgcgacgacggcagcatccagcgttggctggacgacagcgtgcgcgactatcggcgcctcgccggcaaccgcgcggacgcctggtgagcggccacggcggagtgttggcgcggcgcctgctgtggcgggtgctgctgttcagcctgtgtttcaccgtcctcgccggcgccgtgcagctgttcttcgaataccgccgcgaaatgcgcgagatcgaggcgcgcctggaactgatccgcagcggctacctggccagcttcgagcgcagcctgtgggatctcaaccaggagcagttgaacgtgcagttgcgcggcctcggggatttccccgacatcgcccgtgtcagcctgcaaagcgccgacttcaacctgttgcagggcgaccagcgtccacgcggcatgctgcgggtcgagcgctttcccttgagctaccagccgccggggggcgagcgtcggcaactgggcgagctggagatcgccatcgacctggcggcggtctatcgccggctggtttccggcggcctggccagcctcttgtggatgggcagtttcctttgcggcctggcggtggccctcagttggctgttccacagcctggtcactcgccatctgtggcgcatgtccgagttcgccgggcatatcgccgaaggcgacctgcaacagccgctgcgactggacaaggtggaccgcgagcgcgatgagatcgacgccgtcgccgccgccctggaagacatgcgccaggccctgcgcaccgaccgccgccggcgcgatgccgatcgcgacgagttgcgtcggcaggtcgagcggcgcaccgccagcctgcgccgggcgaaggaccaggcggaagccgccgaccgcgccaagagccgttttctcgcgaccatgagccatgagatccgtaccccgctgaacggcatcctgggcatggccgagctgctgcgcgaggcatcgctcggcgagcgtgaccgccagcgcctgcgggcactggcgacagcgggggagggactgctggcgatcctcaacgaggtcctccacttcgcccggctggaggaagcgccggatgtgccggaagcggtggacttttccttgcggagcctgctcgaggacgtcctcaccctgctcgaaccacgggcgcgggagaacgccacacggctggacctgtggctggacccacaggttcatgacggccatcgcggcgccgagcagttcctgcgccaggtgttgaccaacctgctgggcaacgcggtgaagttcaccgaggccggcgaggtgcgcgttcgcgtcgagcggctggcgcgcagcgcaggaagcgagcgcctgcggctgagcgtcgcggacgatggaatcggcattcccgaggaaatgcgcgaacgcatcttcgaacgcttcacccagggcggcgacgccgtgacccgccgttacggcggaaccggcctgggcctggcgatcagcaagcggctggtggaagcgctgggcgggcggatcggcgtggaaagccgggtcggccagggcagcacgttctggttcgagatcgagctggcgctggcgagcttgtccggcgcgacgccgccggcggcatcggtgtctgcgctggaggtgctgctggtggaggacgtggcgctcaaccgcgaggtggcccagggcctgctcgagcgggacggccaccgggtgatgctggccgaggacgcggggccggccctggcgttgtgccggcagcggcgcttcgacctgatcctgctggacatgcacctgccggggatggctggcctcgagctttgcgccgggattcgccggcagctcgacggcctgaaccgcgccacgccgatcttcgccttcaccgccagcatccagccggacatggtgcgtcggtacttcgccgcgggcatgcagggggtgctcggcaagcccctgcggatggacgagctgcgccgcgcgctgggcgaggtcggcaccagcgtgcctgcgcttgcggtggacgccgcgctggaccggcaaatgctcgagacccaccgccgcctgctggggcggcacaagctcgccggactgctgggcaacctgctgggaagcctggacgagcagttgccgctgctggccgaagccctggaccaggcggacctggccgaggcggcgaacatcgcccatcgcctgtccggaagctgccactccatgggcctggtggcgctcggcgccggcctgggcgagctggagcgcgaggccctgggcgcggccggggtcgacccgcgggcctggggcgcacgcctgggtagcctgcgccgcgacggcgccgaagccctgcgccgcgccggcttcctcggcgaagccgactcagcggccggttga

SEQ ID NO: 30585 - DNA, 1425 bp, Pseudomonas aeruginosa
atgaagttgtccatgccccgtttcgaccaggccccggtgttggtggtcggtgatgtgatgctcgaccgctactggcatggcgcgacttcgcgcatttcgccggaggccccggtgccggtggtccgcgtcgaacagcacgaggaccgccccggcggcgccgccaacgtcgcgctgaacatcgccgcgctgggcgcgcaggccttgctggtcggcgtcaccggccgcgacgaggccgccgacagcctggccaacagcctcaaggccgctggagtggacgcgcgcttccagcgcatcgatagccagccgaccatcgtcaagctgcgggtcatgagtcgccaccagcaactgctgcgggtcgacttcgaggaaccgttccgcaccgacgcggcggccctggccgtggacgtcgagtcgctgctggccaaggtcaaggtgctggtgctgtccgactacggcaagggcgcgctacagaaccaccaggtgctgatccaggcggcgcgggcgcgcaacattccggtactggccgatcccaagggcaaggacttcgccatctatcgcggcgccagcctgatcaccccgaacctgtccgaattcgagaccatcgtcggccgttgcgccgacgaagccgaactggtcgccaagggccaggcgctgatgagcgaactcgacctcggtgccttgctggtgacccgcggcgagcatggcatgaccctgctccgccatggccagccggccctgcacctgccggcgcgggcgcgggaagtgttcgacgtcaccggtgccggcgatacggtcatctccaccctggccgcggcgcttgccgccggcgaggagctgccttccgcggtgggtctggccaacctggccgccggcatcgtggtcggcaagctgggtaccgcggcgatcagcgcgcccgaactgcgtcgcgcggtgcagcgcgagcagggttccgagcgtggcgtgctgggcctggagcaattgctgctggcaatcgaagacgcccgcgcccacggcgagaagatcgtcttcaccaatggctgcttcgacatccttcacgccggccacgtgacctacctcgaacaggcgcgcgcccagggcgaccgcctgatcgtcggggtcaacgacgacgcctcggtcactcgcctgaagggcgttggccggccgatcaactcggtggaccggcgcatggcggtactcgccgggctcggcgcggtggactgggtggtgagcttcgccgaagacactcctgagcgcctgctcgagcaggtgcgtccggacgtgctggtcaagggcggcgattacggcgtcgagcaggtggtcggcgcgcagatcgtcaaggcctacggcggcgaggtacgggtgctcggcctggtggagaacagctccaccaccgccatcgtcgagaagatccgccagaaaggctga

SEQ ID NO: 30586 - DNA, 1068 bp, Pseudomonas aeruginosa
atgagggtgctgctggtcaagacctcgtccctcggcgacgtgatccacaccctgccggcgcttaccgacgccgcccgggcgattcccggcatccagttcgactgggtggtggaggaaggtttcgccgagattcccgcctggcatccggcggtggcgcgggtgatcccggtggcgatccggcgctggcgcaagaacctctggcagaccctgcgcaacggcgaatggcggcgcttcaagcagcgcctgaaggaagtcgactatgacctggtgatcgacgcccaggggctgctgaagagtgcctggctgacccgctacgtgggcaagacgccggtcgccggtctcgatcgcgactcggcgcgcgagccgctcgccagccgcttctatcgccgtgcctatccggtcgcctggggacagcatgcggtggagcgcacgcgccagttgttcgcccaggcgctggactacccgttgcccgagtcggtcggtgactatggcctggaccgcgagcagttggccgacgccgaccctggcgcgccgtacctggtgttcctgcacggtactacctgggtcaccaagcattggccggaagcctactggcgcgaactggccgagcgcatgtgcgagcgcggctggtcggtgcgcctgccctggggcagcgccgccgagcgggagcgggccgggcgcctggcggcggggttggaaaatgccgcggtactccccagattatccctggccggcatggccaaggtgcttgccggcgcgcgcgcctgcgtggcggtggataccggcctcggtcacctggcggcggcgctggacgtgccgacgctgtcgctgttcggcccgaccaatcctggcttcaccggcgcctacgggcgttcccaggtccacctgggcagcgacttcccctgtgcgccgtgcctgaagaagacttgtacctaccagccgaccgaagaggatcgcaaactgttcgatctcaagcgtgagcagccgctgtgcttcacccggctgaatccccagcgcgtggccacccagctggaggccatgctgctggccccggagaccctccgatga

SEQ ID NO: 30587 - DNA, 924 bp, Pseudomonas aeruginosa
atgtcgatggccgatcgtgatggcgtgatctggtatgacggtgaactggtgcagtggcgcgacgcgaccacgcacgtgctgacccataccctgcactatggaatgggcgtgttcgagggcgtgcgcgcctacgacaccccgcagggcacggcgatcttccgcctgcaggcgcataccgaccggctgttcgactccgcgcacatcatgaacatgcagatcccgtacagccgcgacgagatcaacgaggcgacccgcgccgccgtgcgcgagaacaacctggaaagcgcctatatccgcccgatggtgttctacggaagcgaaggcatgggcctgcgcgccagcggcctgaaggtccatgtgatcatcgccgcctggagctggggcgcctacatgggcgaggaagccctgcagcaaggcatcaaggtgcgcaccagttccttcacccgccaccacgtcaacatctcgatgacccgcgccaagtccaacggcgcctacatcaactcgatgctggccctccaggaagcgatctccggcggcgccgacgaggccatgatgctcgatccggaaggctacgtggccgaaggctccggcgagaacatcttcatcatcaaggatggcgtgatctacaccccggaagtcaccgcctgcctgaacggcatcactcgtaacactatcctgaccctggccgccgaacacggttttaaactggtcgagaagcgcatcacccgcgacgaggtgtacatcgccgacgaggccttcttcactggcactgccgcggaagtcacgccgatccgcgaagtggacggtcgcaagatcggcgccggccgccgtggcccggtcaccgaaaagctgcagaaagcctatttcgacctggtcagcggcaagaccgaggcccacgccgagtggcgtaccctggtcaagtaa

SEQ ID NO: 30588 - DNA, 1644 bp, Pseudomonas aeruginosa
gtgagcgaactcattcgcgtacccgacatcggcaacggtgagggtgaagtcatcgagctgctggtcaagcccggcgacaaggtcgaggccgatcagagcctgctgaccctggaatccgacaaggccagcatggaaatccccagtcccaaggccggggtagtgaaaagcatcaaggcgaaggtcggcgacaccttgaaagaaggtgacgaaatcctcgagctggaagtggaaggcggcgaacagcctgccgaagccaaggccgaggcagcgcccgcccaaccggaagcgccgaaagccgaagcgcctgctcccgccccgagcgagagcaagccggccgcccccgccgcggccagcgtccaggacatcaaggtcccggacatcggctcggccggcaaggccaacgtcatcgaagtgatggtcaaggccggcgacacggtcgaggccgaccagtcgctgatcaccctggaatccgacaaggccagcatggagatcccctcgccggcctccggggtggtggaaagcgtctcgatcaaggtcggtgacgaagtcggcaccggcgacctgatcctcaagctgaaggtggaaggcgccgctccggcagccgaagagcaaccggcagccgctccggcccaggccgcggcgcccgccgccgagcagaagcccgccgcggcggcccctgcgccagccaaggccgataccccggctccggtcggcgcacccagccgcgacggcgccaaggtccacgccggcccggcggtgcgcatgctggcgcgcgagttcggcgtcgagctgagcgaagtgaaagccagcggtcccaagggtcgcatcctcaaggaagacgtccaggtcttcgtcaaggagcaactgcagcgcgccaagtccggcggtgccggcgccaccggcggagccggcatcccgccgatcccggaagtcgacttcagcaagttcggcgaagtggaagaagtggcgatgacccgcctgatgcaggtcggcgccgccaacctgcatcgcagctggctgaacgtgccgcacgtgacccagttcgaccagtcggacatcaccgacatggaagccttccgcgttgcccagaaggccgcggcggagaaggccggggtcaagctgaccgtactgccgatcctgctcaaggcctgcgcccacctgctcaaggaactgccggacttcaacagttcgctggcccccagcggcaaggcgctgatccgcaagaagtacgtacacatcggcttcgccgtggacactccggacggcctgctggtcccggtgatccgcgatgtcgaccggaagagcctcctgcaactggccgccgaggccgccgacctggccgacaaggcccgcaacaagaagctctcggccgatgccatgcagggcgcctgcttcaccatctccagtctcggccacatcggcggcaccggcttcacgccgatcgtcaacgcgccggaagtggcgatcctcggtgtgtccaaggcgaccatgcagccggtatgggacggcaaggccttccagccgcgcctgatgctgccgctgtcgctgtcctacgaccatcgcgtgatcaacggtgccgccgcggcgcgcttcaccaagcgcctgggcgagctgctggcggacatccgcaccctgctcctgtaa

SEQ ID NO: 30589 - DNA, 837 bp, Pseudomonas aeruginosa
atgaactatcgtcacgcttaccacgccggcaaccatgccgatgtcttcaagcacctggtgctggcgcggatcttcgccctgctggggcgcaaggacacgccgtacgcctacctggacagccattccggggtcggcctctacgacctgcagggtgacgaggccagccgcaccggcgagtgggagcagggcatcgcccgcctgtgggagcgcgaaggcctgcccgagcaactggacgattacctggacgtgatccgtcacctgaacccggacggctccctgcgctactacccgggctcgccggaactggcgcggcgcctgacccgcgcccaggaccgcgtgctgctcaacgaactgcatcccgaggacggccgcctgctcaaggccaacatggcgggcgaacggcgggtcgccgtgcaccagggcgacggttggctgctgccgcgggcgttcctgccggcgccggaaaagcgcgcggtgctgctgatcgatccgccgttcgagcaggccgacgaattgcagcgttgtgtcgctgcgctcgacgaggcgatcgggcggatgcgccagacggtggtggtgatctggtatccgatcaaggaccagcgccagctcaagcgtttctaccaggccctggaacgtagcgtcgcgccgaagctgctgcgtgccgagctgcacgtgcatccgatcgacgacgccgagcgtttcaacggctccgggctggccatcgtcaatccgccgtggccgctggaagacgaactgcgcgacctgctgccctggctggccgaggtcatggcccagagccagggcggctggcgtctcgactggctggtggcggaatag

SEQ ID NO: 30590 - DNA, 3357 bp, Pseudomonas aeruginosa
atgcctgcccttcgctccctgatcgctattcttttcctcggcctctgccttgccagtccgccgctcctcgcccagtccgagccgccctcggccgaggccgtccagcaaagcctcgacaagctggccgagcgcaagctcgccgaagccgaccagaaggtcgccaaggccagcctcgaacagaccctcaagttcctcgccgcgcgcgacgaagcgctgcagagcctggaggacctgaaaaagcgcctgagcgacgcgccccggcagatcgaggaaaaccagcgcgaactggagcgcctgaagaagaccaaagaacgtccggtcagcgaacgctacagcggcgagagcgcggcccgcctggaaatgctgctcaacgaccgcaccacccagcaggccgagtggcagaaagccctgggcgaggccaacagcctgtcgatcaccgccgagacccgtccggaacgagcccaggccggcatcagcagcatgcaggcacggatcctggaaatcggctcgctgctcaaggccggcaaggaaagcggcaagacgatcaacgccgaccgtcgcggcgagctgctcgccgagcaggccgcattgaccgtgcagagccagctgttgcgccaggagctggccggcaacaacctgctgcaggacctcggcaagagccagcacgatctgctcaccgagaagatctcgcgcctggaaaaggaaaccctcgacctgcaggcgctgatcagcgagaagcgccgcgagcagtcggaaaagaccgtcgccgagctgtccaaggaaggcgcccagggggccggcaccgacagcctgctgagccaggagaacgccaagaacctgcgtctctccgactacctgctgcgcgccaccgaccgcctcaacgtgctcacccggcgcaacctcgagaccaagcagcaactggacaacctgacccagtccaaccaggccctcgaggaacagatcaacgtcctgcgcggcagcctgctgctgtcgcgcatcctctacaagcagaaacaggcgctgcccaagatcaaggccgaccagagcctggccgacgagatcgccgacctgcgcctcggccagttcgaactgaaccaggaacgcgacaagctggcgaccccgcagcaatacctggacgacctgctcgcccagcagcccagcgagcaggtcacgccggaactgcgcaaggatctcgacaccctgttggcaacccgttccgagttgctcgaacggctcaaccacgaactcaacgcgctgctcaacgaagcgatcaccttgcagttgaaccagaaacagttgctttccaccagcgagagcctgcgcaccaccctcgacgagcagatgttctggattcccagcaaccagccgctcgacctgtcctggttcaagatgaccccgaccctgctgaagaaccagctcaccgagatcccctggggctccggggtgcgtgaactgggcgaaggcctggtcgatcggccgctgctgttcctgccgctgttcctgctgatcgccgcgctgctgtggaaacgccgctacctgtacgacaagctggcggagctgaacgacgacatcggccacttcaagcgcgacagccagttgcataccccgctggcgatcctgatcaccatcctcctcgccctgcccggcaccctgaccttcgccgtcgccgggctggccctgctgctggacgcccgcggccagaacgccaccctcggcagcgccctgctggaaatggcccaggtctggctgctgttctacaccgcccatcgcatcctcaccccgggcggcatcgccgagcggcatttccactggagccgcgaacaggtcggcttcctcgaccggcacctggtccgcctcggcgttgtggtcctggcgctggtcggcgtggtgacggtggccgagcaccagccggcgagtctggccgacgacgtgatcggcatcgccgtggtcctgctcggctacgcggccatggcctggctgctcagccgcctgctgttcagcagccccggcgacgaacgtccgtcgctgatcaagatgatcgtcggcatcctcttcaccgcgctgccgctggtgctcttcgtcgcggtctgcttcggctactactacacctcgctgaagctcaccgaccgtctcatcgataccctttacctgctgctgctctggttcgtcatcgaagccgccttcgtccgcggcctgggcgtggcggcccggcgcctggcctacgcccgggccctggcgaaacggcagaacgcggcgaaggaaggcgtcgacggcgagaccaacgtcgaggagccgaccctcggcatcgagcagatcaaccagcaatcgctgcggctgatccgcctggctctgctgatcggcttcatcgtctgcctgtactgggtctgggccgacctgatcagcgtgatctcctacctcgacaacgtcaccctgtaccagtacaccgccggcaccggcgaagcggccaccagcgtgccgatcagcctgcgcgacttcctcgcggcgctggccatcgcggtggtcaccgtggccctggcgcgcaacctgcccggcctgctggaagtcctggtactgcagcgcctgaccctggcccagggcagcgcctacgccaccaccaccctgctttcctacgccatcagcggcatcggcatcgtcagcgccctgtccaccctcggggtcagctgggacaagctgcaatggctggtggcggcgctctcggtaggcctcggtttcggcctgcaggcgatcttctccaacttcgtctccggcctgatcatcctcttcgagcgtccggtacgaatcggcgacgtggtgaccatcggcaacctgtccggcacggtcagccggatccgcatccgcgccaccaccatcaccgatttcgaccgcaaggagatcatcgtcccgaaccagaccttcatcaccgggcaactggtgaactggtcgctgagcgataccgtgacccgggtcaccatcaagatcggcctggcctacgagaccgacctgccgctggcgcgcaagctgatgatgcaggcggtcaaggaaaacccgcgggtactgcgcgacccggagccgctgctgtacttcctgaccatcagcgccagtaccttcgactacgagctgcgcttccacgtccgcgaactgggcgaccgcaacccctctaccgacgagatcctgacgaagatcgccaccagcttccgcgaacacaagatcgacatggctttcaaccaggtcgatgtgttcgtcaagaacctccagggccagcaggtccagctgttcgtcggcgagccgcagcacagcggcgtcggcaatccgcccgcgctcaagggccaggacggtcccgccgaaccgacccgctga

SEQ ID NO: 30591 - DNA, 1434 bp, Pseudomonas aeruginosa
atgtctgaacgtctgaattccgaccgcctgaacaacgacttccagttcatcgaagtcgggcgcaaggacccgaagaagaagctgctgcgccagcgcaagcgcgagttcgtggagatccacgacctgttcaagccgcagcaggccgccgaccaggcccaccgctgcctgggctgcggcaacccgtactgcgagtggaaatgcccggtgcacaacttcatccctaactggctgaagctggtttccgaaggcaacatcctggccgccgccgaactgtcgcaccagaccaacaccctgccggaagtctgcggccgggtctgcccgcaggatcgcctctgcgagggcgcctgcaccctcaacgacggttttggcgcggtgaccatcggctcggtggagaagtacatcaccgatacggccttcgccatgggctggcgtccggacctgtccaaggtcaagccgaccggcaggcgcgtcgcggtgatcggcgccggcccggccggcctcggctgcgccgacgtgctggtgcgcaacggcgtgaccccggtggtgttcgaccgcaacccggagatcggcggcctgctgaccttcggcattcccgagttcaagctggagaagcacgtcctcagccgtcgccgcgaggtgttcaccggcatgggcatcgagtttcgcctgaacaccgagatcggcaaggacgtgaccatggagcagttgctcgatgagtacgatgccgtgttcatggggatgggcacctacacctacatgaagggcggtttccccggcgaggacctgccgggcgtacacgacgccctggacttcctgatcgccaacgtgaaccgcaacctcggcttcgagaagtcggccgaggacttcgtcgacatgaagggcaagcgcgtggtggtcctgggcggcggcgacaccgcgatggactgcaaccgcacttcgatccgccagggcgccaagtcggtgacctgtgcctatcgccgtgacgaagaaaacatgccgggctcgcgcaaggaagtgaagaacgccaaggaagagggcgtgaagttcctcttcaaccgccagcccatcgccatcgtcggcgaggaccgggtggaaggcgtgaaggtggtcgagacccgtctcggcgagccggacgcccgcggccgccgcagccccgaaccgatccccggttccgaggagatcatcccggcggaagccgtgctgatcgccttcggcttccggccgagtccggcgccgtggttcgagcgcttcgagatcgccaccgacagccagggccgcgtggtggctccggcgcaggcgcagttcaagcaccagaccagcaacccgaagatcttcgccggtggcgacatggtccgtggttccgacctggtggtgacggcgatcttcgaaggacgtaccgcggccgaaggcatcctcgactaccttggcgtctga

SEQ ID NO: 30592 - DNA, 2469 bp, Pseudomonas aeruginosa
atgcgcctgctgaagttcctgtggtggacttgcgtcaccctgatttgtggagtgctgctcagtttcagcggcgcctatctctatctgagtcccagcctgccctcggtggaagctctgcgtaacgtccagctgcagatccccctcaaggtctacagcgaggacggcaagctgatctccgagttcggcgagatgcgccggacgccgatccgcttcgccgacatcccgcaggacttcatccatgccctgctgtccgccgaggacgacaatttcgccaaccattatggcgtcgatgtgaaaagcctaatgcgcgccgccgcgcaattattgaaaagcggtcacatccagactggcggcagcaccatcaccatgcaggtagcgaagaactacttccttaccaatgaaagaagcttctcgcgaaagatcaatgaaatcctcctggccctgcagatcgagcgacagctgaccaaggacgagatcctcgagctctacgtcaacaagatctacctgggcaaccgtgcctatggcatcgaggctgccgcacaggtctattacggcaagccgatcaaagacttgagcctggccgagatggcgatgatcgccggcctgccgaaagcgccctcgcgctacaacccgctggtcaacccgacccgcagtacggagcggcgcaactggatcctcgagcgcatgctcaagctcggcttcatcgaccagcaacgctaccaggccgccgtcgaggagccgatcaacgcctcctaccacgtgcagacccccgaactgaatgcgccctacatcgccgagatggcccgtgccgagatggtcggccgctacggcagcgaggcctataccgagggctacaaggtcatcaccacggtccgcagcgacctgcagaacgccgccagccaatcggtccgcgacggcctcatcgactatgaccagcgccacggctaccgcggcccggagacccgcctgccgggccagacccgcgacgcctggctcaagcacctgggccagcagcgcagcatcggcggcctggagccggcgatcgtcacccaggtggaaaagagcgggatcatggtgatgacccgcgacggcaaggaagaagccgtgacctgggacagcatgaaatgggcacgccccttcctcagcaacaacagcatgggcccgatgccgcgccagcccgccgacgtggcccaggccggcgaccagatccgcgtgcagcgccaggaagacggcaccctgcgcttcgtacagattcccgccgcacagagcgcgctgatctcccttgacccgaaggacggggcgatccgctcgctggtcggcggcttctccttcgagcagagcaactacaaccgcgcgatccaggccaagcgccagccgggctccagtttcaagccgttcatctacagcgcggccctggacaacggcttcaccgccgccagcctggtcaacgatgcgccgatcgtgttcgtcgacgagtacctggacaaggtctggcgaccgaagaacgacaccaataccttcctcggcccgatcccgctgcgcgaagccctgtacaagtcccgcaacatggtctcgatccgcgtcctgcagggcctgggcatcgagcgggcgatcagctacatcaccaagttcggcttccagcgcgacgaactgccgcgcaacttctccctggccctgggtaccgcgacagtcacaccgatggaaatcgccggcgcctggagcgtattcgccaacggcggctacaaggtcaatccgtacgtcatcgaacgcatcgagagccgcgacggacaggtgctgtaccaggccaatccgccccgcgtgccggtggaagaacaggtcgctgcggatgcggaagacgccgggaatcctggtgaccccgagcatccggagagcgccgaaggcgaaggttcgatcgaagcccagcaagtcgccgccaaggcccagaccaccttcgagccgaccccggccgagcggatcatcgatgcccgtaccgcctatatcatgaccagcatgctgcaggacgtgatcaagcgcggtaccgggcgtcgcgccctggcgctgaagcgcaccgacctggccggcaagaccggcaccaccaacgattccaaggatggctggttctccggctacaactccgactacgtgaccagcgtctgggtcggcttcgaccagccggagaccctgggtcgccgcgagtacggcggtaccgtcgcgctgccgatctggatcaggtacatgggcttcgccctcaaggacaagccgatgcacaccatggccgagccgccaggcatcgtcagcctgcgcatcgacccggtgaccggccgttcggccgcgccgggcactcccggcgcctatttcgagatgttcaagaacgaggataccccgccctcggtcaatgaactgccgccaggcagcttccctggcagcccgctgccggatgacgaaggcgcgccgatcgacctgttctga

SEQ ID NO: 30593 - DNA, 1764 bp, Pseudomonas aeruginosa
atgaaagacacgattcgccagctgatccagcaagccctcgaccaactgaccgcggacggcaccctgcccgccggcctgaccccggacatccaggtggagaacaccaaggaccgtagccacggcgatttcgccagcaacatcgccatgatgctggccaagccggccgggatgaagccgcgcgacctggccgccaggctggtcgaggcaatccccgcccacgagcaactggccaaggtggagatcgccggtcccggcttcctcaacttcttccaggatcacgtctggctcgccgccagcctcgaccgcgccctcgccgacgaacgtctcggcgtgcgcaaggcaggcccggcgcagcgcgtggtgatcgacctgtcctcgccgaacctggccaaggaaatgcacgtcggccacctgcgctcgaccatcatcggcgacgccgtcgcgcgcgtcctcgagttcctcggcgacacggtgatccggcagaaccatgtcggcgactggggcacccagttcggcatgctgctcgcctacctggaagagcaaccggtcgacgccgaggccgagctgcacgacctggaggtcttctaccgcgcggcgaagaaacgcttcgacgagtctcccgaattcgccgaccgcgcccgcgaactggtagtcaagctgcaggccggcgaccccgactgcctgcgcctgtggacccgcttcaacgagatttccctgtcgcactgccagaaggtctacgaccgtctcggcgtgaagctgagcatggccgacgtcatgggcgagagcgcctacaacgacgacctcgcccaggtggtcgccgacctgaccgccaagggcctgctcaccgaagacaacggcgcgttgtgcgtcttcctcgaagagttcaagaacgccgagggcaatccgctcccggtgatcgtgcagaaggccggcggcggctacctctacgccaccaccgacctcgccgccatgcgttatcggcacaacgtgctgcacgccgaccgcgtgctgtacttcgtcgaccagcgccaggccctgcacttccagcaggtcttcgaagtggcgcggcgcgccggtttcgttccggccggcatggagctggagcacatgggcttcggcaccatgaacggcgccgacggccgtccgttcaagacccgcgacggcggtacggtgaagctgatcgacctgctggaagaggccgagagccgcgcctatgcgctggtcaaggaacgcaacgagcagcgcgccgagcgtggcgaggagccgttcgacgaggtccagctgcgcgagatcggccgggtggtggggatcgactcggtgaagtacgccgacctgtccaagcaccgcaccagcgactacagcttcaacttcgaactgatgctgagcttcgaaggcaacaccgcaccctacctgctctacgcctgcacccgcgtggccagcgtcttccgcaagctcggccagggccgcgagcaactgggcgggaagatcgtcctcgagcagccccaggagctggccctggccgcacagctggcgcagttcggcgacctgatcaacaacgtcgcgctcaagggcgtgccgcacctgctctgcgcctacctgtacgagttggccgggctgttctccagcttctacgagcattgcccgatcctcaccgccgaggacccggcgcagaaggacagccgcctgcgtctcgccgcgctgaccggccgtaccctggaacagggcctggagctgctcggtctgaagactctggaacgcatgtaa

SEQ ID NO: 30594 - DNA, 534 bp, Pseudomonas aeruginosa
ttgaccaccatcgtatctgtccgccgcaacggcaaagtcgtcatgggcggcgacggccaggtttccctgggcaacaccgtgatgaaaggcaacgccaagaaggtccggcgcctgtatcacggtcaggtactggccggtttcgccggcgccaccgccgatgccttcaccctgttcgagcgcttcgagcagcaattggagaaacaccaggggcacctggtccgcgccgccgtcgaactggccaaggactggcgcaccgaccgctccctgagccgcctcgaagccatgctcgcggtcgccaacaaggatgcctcgctgatcatcaccggcaacggcgacgtggtcgaacccgaacacggcctgatcgccatgggctccggcggcggcttcgcccaggccgcggccctggccctgctgcagcacaacgccgagctgagcgctcgggaagtcgccgagaccgcgctgaacatcgccggctcgatctgcgtcttcaccaaccagaacctgaccatcgaggagctggacagcgccgtctga

SEQ ID NO: 30595 - DNA, 771 bp, Pseudomonas aeruginosa
atgaacgatccccgcaaaggcgccgacgccgaacccaccacccacttcggctaccagaacgttccggaaagccagaaggcgaagaaggtcgccgaggtatttcactcggtggcagccaagtacgacctgatgaacgacctgatgtccggtggcatccatcgcctgtggaagcgcttcaccatcgagctgtccggcgtgcgcagcgggaaccgcgtgctcgacatcgccggcggcaccggcgacctgacccggcagttctcgcgcctggtcggcccgaccggcgaggtggtgctggccgacatcaacgcctcgatgctcaaggtcggccgcgacaagctgctcgacaagggcgtctccggcaacgtcagcttcgtccaggcggacgccgagaagctgcccttcccggacaaccacttcgactgcgtgaccatcgccttcggcctgcgcaacgtcacccacaaggacgaagcgatccgctccatgctgcgcgtgctcaagcccggtggccgcctgctggtgctggagttctccaagccgagcagcaacctgctgtccaaggcctacgacgcctattcgttcagcctgctgccgctgatgggcaagctggtcaccaacgactccgagagctatcgctacctggccgagtcgatccgcatgcaccccgaccaggaaaccctgaaggcgatgatggtggaagccggcttcgaccgcgtgacctaccacaacatgaccggcggcatcgtcgccctgcaccgcggtatcaagccttaa

SEQ ID NO: 30596 - DNA, 963 bp, Pseudomonas aeruginosa
gtgaccaagaagaaacgttccgtctggccctggcacctgctgaccgggctgatcctgctggtcctggcctgggcgctgtggttctccacctcgctgatttcctatgaatggcgctggaaccgcgttccgcagtacttcgcctaccaggccgaggagccgttacgggccaacgagatcggccgggtcgaggctatcgaggaacagggcagggacgcgcgcgtcacgctgcttggcgagagcggcgagaagcaggtcgtgaccgttgcccaggacagcctgcaattctccgaaggcgacgacgtggccgagggcgacgcggtcggggtgacccgccactgggccgccggcccactgctctggggcctgtggaccaccctctggctatcgctggtgtccggtgccatcggtctggctatcggcctggtcgccggcctctgccggctgtcgaagaacccgaccctgcacgacctgtcgacgatctacgtcgagctggtgcgcggcacgccgttgctggtgcagatcttcatcttctacttcttcatcggcaccgtgctcaacctgtcccgcgagttcgccggggttgcggcgctggcgctgttcaccggcgcctacgtggccgagatcatccgggccggcgtgcagtccatcgcccgcggacagaacgaggccgcccgctccctgggcctgaacgccggccagtcgatgcgctacgtgatcctgccgcaggccttcaagcgcgtgctgccgccgctggccgggcagttcatcagcctggtcaaggacacctcgctggtctcggtgatcgccatcaccgaactgaccaagagcggccgcgaggcgatcaccacctcgttctccaccttcgagatctggttctgcgtcgccgcgttgtacctgctgttgaacctgcccctttcgcacatggcatcccgactggagcggaggctcggacaaagtgattga

SEQ ID NO: 30597 - DNA, 642 bp, Pseudomonas aeruginosa
atgcacaacttggcgaatctttatcgtacagggtggcccggaggagtagaaaaagatacgcagaaggcattggatctctatcaaaagatgatagatctggatgtgcctcaggggttctatgatatgggagcaatgattggaaatcgcgccggggttaaaaaccctgcaactgacggacttactttccttgataaggctgctagcctaggaaatccgccggcactaactgagctaggtaagttttatatatatgtggccaaaaaaaaggatttggggttggcgtatactcactgtgctgctagtcagggttatgcgccggctagttatgagctgggggcgtattacaagatagtagagcacaatttcccaaaggcactggtttattatcaggtgtcagtctctcaggggggcaagagtgcggcttttttcctatcacgagtcttcggaagtgagactccccctgcaagtgcaatgtggtacgcccccgacgaaaagttgcgagaagcgtattattcaatctacaaaaagcttgaagctgaccccgacttacgtttccccaatctgatagaggactatcctctgcctcctcatcccacccagggctacgacgcggaccgcccagactggaagccggagcggtaa

SEQ ID NO: 30598 - DNA, 870 bp, Pseudomonas aeruginosa
atggctattggactttgggccgtgctctgtcttgcaggcgtccccgtgatggccaacagcaaaccatttgtctgcgctaatgaaaaagaccatctgccgccgttggatccgcaagccgatgcttggtaccgcgaagcagcagccttggccaagcccgatactctgcggccctggggccgtatcgtcgagatttacagcaaggcagtggagcgcggtcattggaaggccatgcataatttggcgaatctttatcgtacagggtggcccggaggagtagaaaaagatccgcagaaggcattggatctctatcaaaagatgatagatctggatgtgcctcaggggttctatgatatgggggcaatgattggtaatcgtgccggtgttaagaaccctgctaccgatggtctgaccttcttggataaagccgctagtttggggaacccgccagcactgaccgagttgggtaaactctatatttatgtggccaaggaaaaggaattggggctggcgtatgccagttgtgcttccagtcaaggttatgctccggcgagctatgagcttggaagctactatgagttggttgaaaataattatccaaaggcacttagctactatcaagtctccgtctctcaaggcggcaggagtgcagccttttttctctcgcgcgtcttcggaaagaggacgcctccttcaagtgcaatgtggtatacgccggatgaaaagcttgagaaattctactactccctctatctgcaaattgatgccgaccccgatcttcgttttcccaatttggtaaaatataaccccttgccaccccaccccgtccagggctacgacgcagctcgacccgactggaagccgggtcagtga

SEQ ID NO: 30599 - DNA, 1404 bp, Pseudomonas aeruginosa
atgacgcacgacacggggcttcggcgcggactgaacgcccgtcatattcgtttcatggcactggggtcggcgatcggcaccggcctgttctacggttccgcatcggccatccagatggccgggccggcggtgctgctggcctacctggtcgccggtgcggcggtgtacatggtgatgcgcgcgctcggcgagatggcagtgcacgagccggtgtccggctcgttcggccattacgccagcagctatctcggccccctggccgggttcgtcaccggctggacctacgctttcgagatgatcatcgtctgcctcgccgatgtcaccgcgttcggcatctacatggggttctggtttcccgacgtgccgcgctggatctgggtactgtccatcgtgctgttcatcggcgggctgaacctctgtcatgtcaaggtcttcggcgagctggagttctggctgtcgctggtcaaggtcggcgccatcgtcgcgatgatcctcgccgggctcggcatcatgttcttcggcttcagcctgggcggcgcggcgacgtccgccaccggcgtgcacaacctgtggcagcacggcggcttcctgcccaacggctgggccgggctggtcgcctcgctgtcggtggtggtattcgccttcggcggcatcgagatcatcggcatcaccgccggcgaggcgcaggacccgcagcgggtgatcccgcgggcgatcaatgcggtgccgctgcgcatcctgctgttctacgtgctgaccctgttcgtgctgatggcgatcttcccctggcagcagatcggcagcaacggcagtcccttcgtgcagatcttcgacggcctggggatcgagtcggccgcggcgatcctcaatgtcgtggtgatcaccgcggcgatttcggcgatcaacagcgacatcttcggcgccggtcgcatgctctacggcatggcccgccagggccaggcgccggtcggcttctcgcgggtgtcgcggcacggcgtgccgtggatgaccgtgctgctgatggcggtggccctgctgctcggcgtggcgctgaactacctgatcccgcagagcgtattcctgttgatcgcttccatcgccaccttcgccaccgtgtgggtctggctgatgatcctcctggcccaggtcggcatgcgccggcgcatggggccgcgccaggtcgccgcgctgaagttcccggtgccgctgtggccattcgcgccggcggcggcgatcgtcttcatgctgttcatcttcgtggtgctcggctatttcccggacacccgcccggccctgtgggtcggggctatctggatcgccttgctggtgatcgcctaccggcgctgggtcaggccgaagggcgatgccgcgcatggcgtgcttcaggcccagggagggctgtga

SEQ ID NO: 30600 - DNA, 1530 bp, Pseudomonas aeruginosa
atgagcctgcatctgaaacccggccagttgaccctggccgacctgcgccaagcctacctggcccccgtgcgcctgagcctggatcccagcgccgacgcgccgatcgccgccagcgtcgcctgtgtcgagaacatcatcgccgagggccgcaccgcctacggcatcaacaccggcttcggcctgctggcctcgacgcggatttccccggcagacctggagaagctccagcgttccatcgtcctgtcccatgccgccggcgtcggcgaggcgctggacgacgccatggtgcggctggtcatgctgctcaaggtgaacagcctggcgcgcgggttctccggcatccgccgcaaggtgatcgacgcgctgatcgcgctgatcaacgccgaggtctatccgcacatcccgctgaaaggctcggtgggtgcgtccggcgacctggcgccgctggcgcacatgtcgctggtgctgatcggcgaaagccgggcgcgccatcgcggtgagtggctgccggccgccgaagcgctggcggtggccgggctggagccgctgaccctggcggcgaaggaaggcctggccctgctcaatggcacccaggtgtccaccgcctacgcgctgcgcgggttgttcgaggccgaggacctgttcgccgccgccaccgtctgcggcgggctcagcgtcgaggccatgctcggttcgcgggcgccgttcgatgcgcgcatccatgccgcgcgcggccagcgcgggcagatcgacgtggccgcggcctatcgcgacctgctcaccgccagcagcgaggtggcgcgctcccatgagaagtgcgacaaggtccaggacccctattcgctgcgttgccagccgcaggtgatgggcgcctgcctgacccagatgcgccaggccgccgaggtgctggagatcgaagccaacgcggtgtccgacaacccgctggtattcgccgccgagggcgacgtgatctccggcggcaacttccacgccgaaccggtggcgatggccgccgacaacctggccctggcgttggccgagatcggttcgctgtcggaacggcgcatctcgctgatgatggacatgcacatgtcgcagttgccgccgttcctggtggccaacggcggggtcaactccggcttcatgatcgcccaggtcaccgccgccgcgctggccagcgacaacaaggccctggcccatccggccagcgtcgacagcctgccgacctcggccaaccaggaagaccatgtgtcgatggcgccgaacgccggcaaacggctctgggcgatggccgagaacgtccgcgggattctcgccgtggagtggctgggcgcctgccagggcctggacttccgcgagggcctgaagagttcgccgaagctggagcaggctcgccgcctgctgcgcgacaaggtgccgtactaccaggaggatcgcttcttcgcccctgatatcgaggccgccagccagttgctcgccagcggttgcctgaacgcgctgctgccggcccggctgttgccgagtctttga

SEQ ID NO: 30601 - DNA, 1680 bp, Pseudomonas aeruginosa
gtgaccaccccgagcaaattccgcgatattgaaatccgcgccccgcgcggcactacgctgaccgccaagagctggctgaccgaagcgccgctgcgcatgctgatgaacaacctcgacccggaggtcgcggagaaccccagggaactggtggtttacggcggcatcggccgtgccgcgcgcaactgggagtgctacgacaggatcgtcgagaccctcaagcaactgaacgacgacgagaccctgctggtacagtccggcaagccggtcggcgtgttcaagacccacgccaacgcgccgcgggtgctgatcgccaactccaacctggtgccgcactgggcgacctgggaacacttcaacgaactggacgccaagggcctggcgatgtacggccagatgaccgccggttcgtggatctacatcggcagccagggcatcgtccagggcacctacgaaaccttcgtcgaggctggccgccagcattacgacggcaatctcaagggccgctgggtgcttaccgccggccttggcggcatgggcggcgcccagccgctggcggcgaccctggccggcgcctgttcgctgaacatcgagtgccagcagagccgcatcgacttccgcctgcgcagtcgctacgtcgacgagcaggccaaggacctggacgacgccctggcgcggatccagcgctacaccgccgaaggcaaggccatctccatcgccctgctgggcaatgccgccgagatccttccggaactggttcgccgcggcgtacgcccggacatggtcaccgaccagaccagcgcccacgatccactcaacggctacctgccggccggctggagctgggaagagtaccgcgaccgcgcgcagaccgacccggccgccgtggtcaaggccgccaagcagtccatggcggtacacgtgcgggccatgctggcgttccagcagcagggcgtgccgaccttcgactatggcaacaacatccgccagatggccaaggaagagggggtggccaatgccttcgatttccccggcttcgtcccggcctacatccgcccgctgttctgtcgcggcatcggtccgttccgctgggccgcgctgtcgggcgacccgcaggacatctacaagaccgacgccaaggtcaagcaactgatccccgacgatgcccacctgcaccgttggctggacatggcccgcgagcgcatcagcttccagggcctgccggcgcgcatctgctgggttggcctggggctgcgcgccaagctcggcctggccttcaacgagatggtgcgcacgggcgagctgtccgcgccgatcgtcatcggccgcgaccacctcgactccggctcggtggccagccccaaccgcgagaccgaggccatgcaggacggctccgacgcggtgtccgactggccgctgctgaatgccctgctgaataccgccagcggcgccacctgggtctcgctgcaccacggcggcggcgtaggcatgggcttctcccagcactccgggatggtgatcgtctgcgacggtagcgacgaggccgccgaacgcatcgcccgcgtactgaccaacgacccggggaccggggtgatgcggcacgccgacgccggctaccaggtcgccatcgattgcgcgaaggagcagggcctgaacctgccgatgatcaccgcccagcgctga

SEQ ID NO: 30602 - DNA, 1818 bp, Pseudomonas aeruginosa
gtgatcgaaaatctgcgcaacatcgccatcatcgcccacgtcgaccatggcaagaccaccctggtggacaagctgctgaagctgtccggcaccctcgaccgcaaagaagcggaaagcgagcgggtgatggactccaacgaccaggaaaaagagcgtggcatcaccatcctggcgaagaacaccgcgatcaagtggaacggctacaacatcaacatcgtcgacacccccggtcacgccgacttcggcggcgaggtggagcgcgtgatgtcgatggtcgactccgtgctgctggtggtcgacgcccaggacggccccatgccgcagacccgcttcgtgacccagaaggccttcaaggccggcctgcgtccgatcgtggtggtgaacaagatcgaccgcccgggcgcgcgtccggactgggtcatcgaccagatcttcgacctgttcgacaacctcggcgccaccgacgagcaactcgacttcccgatcgtctacgccagcgccctgaacggcatcgccggcctcgaccacgagaagatggacgacaacatggacgcgctgttccaggcgatcatcgaccacgtcccggccccggtggtggacaccgagggtccgttccagatgcagatctcgcagctggactacaacagcttcctcggcgtgatcggtatcggccgcatcacccgcggcaaggtcaagtccaacaccccggtggtggccatcagcgacgacggcagcaagcgcaacggccgcatcctgaagatcatgggccaccacggcctgcagcgcgtcgaggtggccgaggcggaagccggcgacatcgtctgcgtcagcggcatggaggagctgttcatctccgataccctgtgcgacccgcagaacgtcgaggcgctgccgccgctgaccgtcgaccagccgaccgtgagcatgaccttccaggtcaacgattcgccgttcgccggccgcgaaggcaagttcgtcaccagccgcaacatcaaggagcgcctggagaaggaactgctgcataacgtggcgctgcgcgtcgagccgggcgacagcccggagaagttcaaggtttccggccgtggcgaactgcacctgtcggtactgatcgagaccatgcgccgcgaaggcttcgagctggccgtgggccgcccggaagtggtgatcatcgagaaggacggcgagaagcaggagccctacgagaacgtcaccatcgacatcgaggagcagcaccagggctcggtgatggagcagatgggcctgcgcaagggcgacctgagcaacatgattcccgacggcaagggccgcgtgcgcctggagtacaccattccggcgcgcggcctgatcggcttccgcaacaacttcctgaccctgacctcgggcaccggcatcctgacctcgaccttcagccactacggtccgatcaaggccggcgaagtcagcaaccgccagaacggcgtactggtctccatggccaccggcaccgcgctgacctactcgctggagaccctgcagagccgcggcaagctgttcctcggcccgggcgacgaaatctacgaaggccagttggccggcatcaacagccgtgacaacgacctggtgatcaacccgaccaagggcaagaagctcgacaacatgcgcgcttccggcaaggacgaagtcatcgccctggttccgccgatccgcttcaccctcgagcaggcgctggagttcatcgccgacgacgagctggtggaagtgacgccgaagtcgatccgcctgcgcaagaagatgctcaacgagaacgaccgcaagcgctacgagcgcagcaaggtctaa

SEQ ID NO: 30603 - DNA, 1410 bp, Pseudomonas aeruginosa
atgtcgtacaagtcgcaccaactgatcaaagaccatgacgtgaagtgggtagacctgcgcttcaccgataccaagggcaagcagcaacacgtcaccatgccggctcgcgacgcgctggacgatgagttcttcgaagccggcaagatgttcgacggctcctccatcgccggctggaaaggcatcgaagcctccgacatgatcctgatgccggacgacagcaccgccgtcctcgatccgttcaccgaagagccgaccctgatcctggtctgcgacatcatcgagccgagcaccatgcaaggctacgagcgcgacccgcgcaacatcgccaagcgcgccgaggagtacctgaagtccaccggcatcggcgacaccgtgttcgtcggcccggagccggagttcttcatcttcgacgaagtgaagttcaagtccgacatctccggctcgatgttcaagatcttctccgagcaggcttcctggaacaccgacgccgacatcgagtccggcaacaagggccatcgcccgggcgtgaagggcggctacttcccggtaccgccggtcgaccacgaccatgaaatccgcaccgccatgtgcaacgccctggaagaaatgggcctggtggtcgaagtccaccaccacgaagtggcaaccgccggccagaacgagatcggcgtgaagttcaacaccctggtcgccaaggccgacgaagtgcagaccctgaagtactgcgtgcacaacgtcgccgacgcctacggcaagaccgtgaccttcatgccgaagccgctgtacggcgacaacggttcgggcatgcacgtgcacatgtcgatctccaaggacggcaagaacaccttcgccggcgaaggctatgccggcctgtccgagaccgccctgtacttcatcggcggcatcatcaagcacggcaaggccctgaacggcttcaccaacccctcgaccaactcctacaagcgcctggtcccgggcttcgaagctccggtgatgctggcctactcggcgcgcaaccgttccgcctcgatccgtatcccctacgtatccagcccgaaggcccgccgtatcgaagcgcgcttcccggacccggcagccaacccctacctggccttcgccgcgctgctgatggccggcctggacggcatccagaacaagatccaccccggcgatgccgccgacaagaacctgtacgacctgccgccggaagaggcgaaggaaatcccgcaggtttgcggcagcctgaaagaggcgctggaagaactcgacaagggccgcgcgttcctgaccaagggcggcgtgttcaccgacgagttcatcgatgcctacatcgagctgaagagcgaagaagagatcaaggtgcgcaccttcgtgcacccgctggaatacgacctgtactacagcgtctga

SEQ ID NO: 30604 - DNA, 2208 bp, Pseudomonas aeruginosa
gtgccgatcatcgcccgcttcacccttcgctcccgcgtcctggcggccctgctgctgtgcctctgcgccgccctgttctactcgccgccgggcgccgcggcgctgccgaacccgttggcggggagttcctccggtggcgagaaggtcagcgatgcgcagttggaacaatcgctgaaccaggtcatccagaccctggagaacgacaggcagcgcgccgacctgctgaaaaagctgaaacagctgcgggacgtgaccaagaaaggcaaggaaagcgagggtggggtgctggggctgatcggcgataccctgaccagcctggaaaagcagttccagggcgcgaacagcccggtcgcgttatggggcaaccagttccagctggcgcgtgccgaactcgaggagcgctttcccagctggcgcgacctgccggcgatggtcttcgatttttcggtggtgatcctcctctgggcctgcctggccagcgcgctgctctggctcagccggcgcatgcgcgagcgcttcggcctgtcggcggagttgccgcagcatccgaagacccgcgacctgctgctgttttccctgcgcaagctgggcccctggctggtggccttcctcatcaccctgtacctgtcggtggtgctgccggactccctgagcaagaccctggcgatggtcatggcctatgtgctggtctgcggcacgctgttctccgcgctgtgcgtgatttccctctcgctgctcagcggcccgcaccgccagcgcgccctggatatcctgcggcgccaggcgttccgcccgttgtggctgatcggcagcctcgccgcgctgggcgaggtcgcccacgatccgcggctgatcgccggcctcggcgagcacacctcgatctgcctgagtaccctggccaacgccagcgccgcgctgttcaccgcgctgttcgtgatgcgtttccgccggccgatcgcccacctgatccgcaaccagccgctggagcgccgcctcaagcgccgtagcctgcacgacctggtgcaactggtcggctcgctgtggttcgtgccggtgctggtgctggtggggatttccctattcgccaccttcgtttccgccggcgacagcagttcggcgttgcgccgggcgctggtctgcgcggtgctggcggtggtggcgatgaccgtgatcgggctgatccgccgccgttccagtcgggtcggcgccggcccgcgccgcagcgcgccgtacatcgagcagttgcaaagcttcggctacaccctgctgcacatcttcgtggtgctgttcttcatcgaggtcgccttgcgcgtctggggcatgtcgctgattcgctatgcggaaggcgagggcgagcagatcagcatgaaggtagtcagcttcggcaccaccctgctggtcgcctggctgatctggatcctcaccgataccgcgatccagcacagcctcggcctgggcggcaagagccggccgaacacccgcgcgctgaccatgctgccgctgatccgcaacgtactgttcgccaccatcgcggtgatcgccctgatcgtcgccctggccaacatgggcatgaacgtcaccccgctgctggccggtgccggcgtgatcggcctggccatcggcttcggtgcgcagtcgctggtggcggacctgatcaccggcctgttcatcatcatcgaggactcgctgtcgatcgacgactacgtcgacgtcggcggccaccttggcacggtcgagggcctgactatccgtaccgtgcgcctgcgcgacctggacggcgtggtgcataccatcccgttcagcgagatcaagagcatcaagaactactcgcgccagttcggctacgcgatgttccgctggccggtgccggcgagcatgccgatcgacgacgcggtggcgctggtgcgcgaggtcgcgatggagctgcgcagcgacccggcggtctaccgcaacctgtggtcgccgatggaattgcagggcgtggagagtttcgacaacggccaggcgatcctgcgcttccgcttcaagaccgcgccgatcaagcagtgggaggtccagcgggcgttcaacctgcgcctgcgtcggcgcctcgaccaggccggcctcgaactgtccatgccgcgtctcaacgtacagttgagccgggcgcccaaggcgaaatccgcggaaccggacgagcagggcacgccggcggacggcggcatctag

SEQ ID NO: 30605 - DNA, 1077 bp, Pseudomonas aeruginosa
atgccgaccgataccctgcaccgactgttgctcgacaacctgaccaccgcggtgatcctgctcaacggcgaactgcgcctggagtacatgaacccggcggcggagatgctcctggccgtgagcggccagcgcagccacgggcaattcatcagcgagctgttcaccgaatcgccggaagccttgaactcgctgcgccaggcggtggaacaggcacatccgttcaccaagcgcgaagcgaccctgacctcgatcaccggcgtcagcatcacggtcgactatgcggtgacgcccatcctcaaccgcaacgagacgctgctgctgctcgaggtccatccgcgcgaccggctgatgcggatcacccgcgaagaagcgcagttgtccaagcaggagaccaccaagctgctggtgcgcgggctcgcccacgagatcaagaacccgctcggcggcatccgcggcgcagcgcaactgctgtctcgcgagttgccggaagagtcgctgaaggactacaccaacgtcatcatcgaagaagccgaccggttgcggaacctggtggaccgcatgctcggctcgaacaaactgccgaacctggcgccgaccaacatccatgaagtgctggagcgggtcagcagcctggtggaagcggagagccagggcagcatcaccctggtccgcgactacgacccgagcatccccgacctgctgctcgaccgcgagcaaatgatccaggccgtgctcaacatggtacgcaacgccatgcaggcgatcgcagggcagaacgacctgcgcctcggtcgcatcaccctgcgcagccgtaccctgcgccagttcaccatcggccacacgcgtcaccgcctggtgtgcaaggtggagatcatcgacaacggcccgggcattccggccgagctccaggaaaccatcttctaccccatggtcagcggccgtccggacggtaccggactcggcctggccatcgcccagaacatcatcagccagcaccaggggctgattgaatgcgagagccaccccggccataccgtattcagtctgttcctgcccctggaacaaggagtgcattga

SEQ ID NO: 30606 - DNA, 462 bp, Pseudomonas aeruginosa
atgttccacgtcatcctgtttcaaccggagatacctccgaataccggcaacattatcaggctctgcgccaacgccggatgcagtctgcacctgatcgagccgctcggtttcgaactggacgacaagcgcttgcgccgtgccggcctcgactaccacgaatacgccagcgtacgccgctacccgtatctgcagagctgcctcgaggccctcggccagccacgcctgttcgccttcaccaccaaggggtcgcgggccttccacgaagtggcctaccagcgcggcgatgccttcctcttcggcccggaaagccgcggactgccggaggacgtgcgcaacgccctgccaaccgatcggcgcctgcgcctgccgatgcgcgaaggctgccgtagcctgaacctgtccaacacggtggcggtgaccgtctacgaagcctggcgccagctcggcttcgccatggactga

SEQ ID NO: 30607 - DNA, 255 bp, Pseudomonas aeruginosa
atgccgcccgtcgtgatctacaccaccgcctggtgtccgtactgcatccgcgccaagcagttgctgcaacgcaagggcgtggacttccaggagatcgcctgcgacggcaagcccgaactgcgcgccgagctggcacgcaaggcgggatcgaccaccgtgccgcagatctggatcggcgagacccatgtcggcggctgcgacgaccttcatgcactggagcgcgccggcaagctggacgcgctgctgtctgcctga

SEQ ID NO: 30608 - DNA, 420 bp, Pseudomonas aeruginosa
atgcaattcgtttcccgtctgatcgagttcgccaccaaccactacctgctggtcgcggcgctgctggtcctgctggtcctgctgttgctgcacgagctgcgcaagggcggcaagagcctgtcgacccgcgagctgaccgcgctggtcaatgccgaccaggcggtggtcctggatatccgtccggccaaggagttcgccagcgggcacatcgtcgacgcgctgaacatcccggccgacaagctgaacagccgcatgaccgaactggaaaagtacaagggcaagaccatcatcctggtcgacgccatgggccagcactccggtacctggggcggcgtcctgaagaaggccggcttcaacgccgccaagctgtccggcgggatcggcagctggcgcggcgacaacctgccgctggtgaagtga

SEQ ID NO: 30609 - DNA, 774 bp, Pseudomonas aeruginosa
atgtcggcgttccgcgttgccctgctgggcctgtgcctgctgttcaaccaggcccaggcccgccaggaccccgtcccctaccagcgcccgccgctgctgaccgtggtcatcgatgacctcgggcagaacctggcgcgcgaccgccgggtcctcgacctgccccccggcgtaaccctggcgatcatcccggaaaccccgcatgccgccgaactggcccgcgaggcgcaccagcgcgggcgcacggtgatcctgcacatgccgatggacccagccggcggtccctacgcctggcggccggagctgacccaggaagagcgtgcgcggcggctggacgcggcgctggccaaggtgccgttcgtgcagggcctgaacaaccacgagggcagccgcatgaccgcggtgcgcccggcgatggcctggctcgccgaggaactccagcgtcgcggcctgtacctggtcgacagccgcaccagcgccgccaccgtggccgccagcgaggcgcagcggatcggcctggcgagcgtctcgcgcgatgtgttcctcgacaacgaagccacaccggaagcggtctccgcacaactgcaggccggcgtcgccctggcccgcaagcagggttcggcgttgctcatcggccacccgcacaaggccaccctcgacgtgctggcgcgggagctgccgaagctgcgcgcccagggcatcgagctggtaccgccgcagatgctcatcggcgagcgcggcaaccgcaacgtcaacccacgccaggcgccgcactga

SEQ ID NO: 30610 - DNA, 2253 bp, Pseudomonas aeruginosa
atgaaagcattcggcaaggtcctggggctgttcttcctgggactcttactgctcgtcgtggccctgggcttcgccctgacccacctgttcgatcccaatgactacaaggacgaaatccgccagatcgcccgcgacaaggccaacctggagctggacctgaagggcgacatcggctggagcctgttcccctggctgggcctggagctgcacgacaccagcatcgccagcgccgccacgccgaccaagccgttcgccgacttgcagatgctcggcctgtcggtgcgggtcctgccgctgctgcgcaaggacgtgcagatgagcgcgatccgcgtcgaaggcctgagcctggacctggtccgcgacaagcagggcaagggcaactgggaaaacatcggcaagccggcccagccccaggccccggccgctccttccgagaccccgccggcagcggacggcaagggcgcccaggcgcaggcaccggagcaggcgccgcagaacgacagcccgcgcaccccgatcaagctcgacatcgacagcctcaatgtcaacaacgcccgcgtcacctacaccgacgaagccagcggcaagcagtacaacgtcgagggcatcgagctgagcaccggcgccattcgcgaaggcagcagcattccgctgaagctcaacgcctacctcggcaccaaccagccggtggtacgggtcaagaccgagctgaccggcaacctgcgcttcgacaccgcgctcaggcgctaccaactggaagacgccaggctctccggcgaagcctcgggcgagccgctgcaaggcaagaccgccaccttctccgcccagggccagttgctgctcgaccagtcggcgcagatcgccgagtggaacggcctgaagctgagcgtcaaccagttgcgcgccctcggcgaactgaaggcccgcgagctggacaaggacaccaagttcagcggcggcctgtcgatcgcgccgatgaacctgcgcgagttcctcgccggcatcggtgtgaccctgccggccatggccgatgccaacaccctcggcaagttcgagctgaacacccgcctggccggcagccgcaacagcctgaatctcgaagacctcaagctgggtctggacgacaccgccttcagcggccgcttcggcatcgccgatttcgccaggcaatcgctgcgcgcccagctcaagggcgacaagctcgacctcgaccgctacctgccggccaaggccaagcaagcccaggatgccgccagcgccacgcgcaaggcggaagtcgacgccaccgtggccagtgccgcccagggcaacacgccgctaccggaaaaaccgaccaggcaggcctggagcgacgcgccgctgctgcccatcgcgaccctgcgcaagctcgacctggacgtggcgctgaacttcggccggctgaccgtcgagaagctgccgatcgacgacgccagcctgaagctgcgcggccagggcggcgtgatcagcctcgacgacatgcgcggcgggctgtacaacggccgcttcaacgccaaggccaacctcgatgtacgccaggacagcgccgtgctgaccgccaccaagcacatcgccaacgtaccggtggagcgcctgctcgaagcccagggcaagaaaccgccggtgaaggggctgctcgacctcgatgccgacatccgcaccagcggcaacagcgagaaatcctggatcgaccatctcaacggcaacgcacgcttcagcctgatcaacggcgtgctgcccgacgccaacctggagcaacagctctgccagggcatcgctaccctcaaccgcaaggcccttgccggtactcacggcggcaaggacacgcctttccgcgagctcaagggcagcctgaacttcaccaacggcgtggccagcaaccctgacctgaaagtggccattcccggcctggcggtcagcggccacggcgatatcgacctgcgcgtgctgggcatggactatcgcatcggcgtggagatccagggcgacaagagcgacatgccggacccggcctgccaggtcaaccagcgctacgccggcatcgaatggccgctgctctgccgcggcccgctggaactcggcgccaaggcctgccgcctggacaaggaaggcatgggcaaggtcgccgcgaaactggccggcaatcgcctcaacgaaaaactcgaagagaagctcggcgacaaggtcagtccggagctgaaagacgcactcaaagggctgttcaaccgcaaatga

SEQ ID NO: 30611 - DNA, 1083 bp, Pseudomonas aeruginosa
atgaccccatccctctctggcctgcctccgatccgcaccgcgttgatcggctacggcttcgccggcaagaccttccacgccccgctgatccgcgcggtaccggcgttgtgcctggagcacgtggtctcccgcgaccctgggcgggtgcacgccgacctgcccgaagcccgggtcagcgccgatccggatgaggccatcgaggccgccgacatcgacctggtggtcatcgcctcgcccaatgccacccacgccagcctcgccgaacgggccttgcgcgccggcaagcacgtggtggtggacaagccgttcaccgtcaccctggccgaagcccggcgcctcgccgacctcgcccgtgaacggcctgggcaggtcctctcggtgttccagaaccggcgcttcgacagcgacttcctcgccgtggaggccgccctgcaggccggcagcatcggcccggtgcgctacttcgagtcggccatcgagcgcttccgtccgcaggtccgcgaccgctggcgcgaacacgacctgcccggctccgggctgtggttcgacctcggcccgcacctgctcgaccaggcactgtgcctgttcggcgtaccgcagcgtgtgcacggacacctgcgccggctgcgcgagggcgcgctgaccgacgactggttcgaggtcctgctcgattatccgcactgccaggtagcgctgcgcgccagcatgctcgccgccaatccggcgccacgcttcaatgtgcacggcgaccacggcagcctgctcaaggccggcgccgacatccaggaagcgcaactgctccagggactgcaccccggttccgccggctggggccgcgatcccgacctgctgcagcacatcgatggccagggcctgcgccagtcgctggtcaccccggccggcgaccagagccgctactaccaggcgctggccgccgccatccgcggccagtcgcgcaacccggtgtcggcgcaacaggcctgcgcgctgatggccctgctggagttggcacgacgctccgccgaggaaggccggagcctgccggtggagctgcgcgacgaggaacgccaggcctggaactga

SEQ ID NO: 30612 - DNA, 753 bp, Pseudomonas aeruginosa
atgaagaactataagaagatcctgctggccgccgctgcaaccctggccttcgccctcgacgccagcgccgccgacaagctgcgcatcggcaccgaaggcgcctacccgcccttcaacggcatcgatgccagcggccaggcggtcggcttcgacctcgacatcggcaaggcgctgtgcgccaagatgaagaccgagtgcgaggtggtgacctccgactgggacggcatcatcccggcgttgaacgccaagaagttcgacttcatcgtcgcgtccatgtcgatcaccgacgagcgcaagcaggcagtcgacttcaccgatccctactacaccaacaagctgcagttcgtcgcgccgaagagcgtcgacttcaagaccgacaaggactccctgaagggcaaggtgatcggcgcccagcgcgccaccatcgccggcacctggctggaagacaacatggccgacgtggtcaccatcaagctctacgacacccaggagaacgcctacctcgacctctcctcggggcgcctggacggcgtgctggccgacaagttcgtgcagtacgactggctgaagagcgacgccggcaaggagttcgagttcaagggcgaaccggtgttcgacaacgacaagatcggtatcgccgtgcgcaagggcgacccgctgcgcgagaagctcaacgccgcgctgaaggaaatcgtcgccgacggtacctacaagaagatcaacgacaagtacttccccttcagcatctattga

SEQ ID NO: 30613 - DNA, 996 bp, Pseudomonas aeruginosa
atgctcaagcacaccgcgaaggcgctcgtctgcgcactttccctgaccgtcgccggaatcgtccaggcagccgacccgatcgtcatcaagttctcccacgtcgtcgccgagcacacgcccaagggccagggcgcgctgctgttcaagaaactggtggaggaacgcctgccgggcaaggtcaaggtggaggtctacccgaactcgtcgctgttcggcgacggcaaggagatggaagccctgctgctgggcgacgtgcagatcatcgcgccgtcgctggccaagttcgagcagtacaccaagaaattgcagatcttcgacctgccgttcctgttcgacaacatccaggcggtcgaccgcttccagcagagcccgcagggcaaggagctgctgacctcgatgcaggacaagggcatcactggcctcggctactggcacaacgggatgaagcagttgtccgccaacaagcccctgcgcgagccgaaggacgcccgcggcctgaagttccgcgtgcaggcctccaaggtgctcgaggaacagttcaaggcggtgcgcgccaacccgcgcaagatgagcttcgccgaggtctatcagggcctgcagaccggcgtggtcaacggtaccgagaacccctggtcgaacatctactcgcagaagatgcacgaagtgcagaagtacatcaccgagtccgaccacggcgtgctggactacatggtgatcaccaacaccaagttctggaacggcctgccggaagacgtgcgcggcgtgctggccaagaccatggacgaggtcaccgtggaggtgaacaagcaggccgaggcgctcaaccagggcgacaagcagcgcatcgtcgaggccaagaccagcgagatcatcgaactcactcccgaacagcgggccgaatggcgcaaggccatgcagccggtgtggaagaagttcgaaggcgagatcggcgccgacctgatcaaggccgccgaagccgccaaccaggcccaataa

SEQ ID NO: 30614 - DNA, 1011 bp, Pseudomonas aeruginosa
atggctttcaacatgcacaaccgtaacctgctcagcctgatgcaccacagcacccgcgagctgcgttacctgctcgacctgtcccgcgacctcaagcgcgccaagtacaccggcaccgagcagcagcacctgaagcgcaagaacattgccctgatcttcgagaaaacctccactcgcacccgctgcgccttcgaggtggccgcctacgaccagggcgccaacgtcacctacatcgacccgaactcctcgcagatcggccacaaggagagcatgaaggacaccgcgcgggttctcggccggatgtacgacgccatcgagtaccgcggcttcaagcaggaaatcgtcgaggaactcgcgaagttcgccggcgttccggtgttcaacggcctgaccgacgaataccacccgacccagatgctcgccgacgtgctgaccatgcgcgagcacagcgacaagccgctgcacgacatcagctacgcctacctgggcgacgcgcgcaacaacatgggcaactccctgctgctgatcggcgccaagctcggcatggacgtacgcatcgccgcaccgaaggcgctctggccgcacgacgagttcgtcgcccagtgcaagaagttcgccgaggaaagcggcgccaagctgaccctcaccgaggatccgaaggaagccgtgaagggcgtggacttcgtccacaccgacgtctgggtgtcgatgggcgagccggtggaagcctggggcgagcggatcaaggaactgctgccctaccaggtcaacatggagatcatgaaggccaccggcaacccgcgggccaagttcatgcactgcctgccggcgttccacaacagcgagaccaaggtcggcaagcagatcgccgagcagtatccgaacctggccaacggcatcgaggtgaccgaggacgtcttcgagtcgccctacaacatcgccttcgagcaggccgagaaccgcatgcataccatcaaggcgatcctcgtctcgaccctcgccgacatctga

SEQ ID NO: 30615 - DNA, 933 bp, Pseudomonas aeruginosa
atgcgtatcgtcgtcgcattgggcggtaatgccctgctacgccgtggcgaacccatgaccgcggacaaccagcgggaaaacgtgcggatcgccgccgaacagatcgccaaggtggcgcccggcaacgagctggtgatcgcccacggcaacggcccccaggtcggcctgctggccctccagggtgccgcctacgacaaggtctcgccctacccgctggacgtcctcggcgcggaaaccgagggcatgatcggctacatgatcgaacaggaaatgggcaacctgctgccgttcgaagtgccgttcgccaccatcctcacccaggtcgaggtggacggtaaggatccggcgttccagaacccgaccaagccgatcggcccggtctactccagggaagaagccgagcgcctggccgccgagaagggctggagcatcgccccggacggcgacaagttccgccgcgtggtgcccagcccgcggccgaagcggatcttcgagatccgcccggtgaagtggctgctggagaaaggcaccatcgtcatctgcgctggcggcggcggtatcccgaccatgtacgacgaggccgggaagaagctcagcggcgtcgaggcggtgatcgacaaggacctctgctcctcgctgctggcccaggagctggtggccgacatcctgatcatcgccaccgacgtcgacgcggcctacgtcgactggggcaagccgacccagaaggccatcgcccaggcccacccggacgaactggagcgcctcggcttcgccgccggctccatgggtccgaaggtccaggccgccatcgagttcgcccgcgccaccggcaaggacgcggtgatcggttcgctcgcggacatcgtcgcaatcaccgagggcaaggcgggaacacgggtcagcacgcgcaaggcgggcatcgagtaccgctga

SEQ ID NO: 30616 - DNA, 438 bp, Pseudomonas aeruginosa
atgggtattttcgcgttcgtgaaggaagccggtgaaaagctgtgggatacgctgacggggcatgaggcacaggcggccgagtcgctgaaggagcacgtcgccaaggtcggcctgggcaacccgaacatccaggtttcggtggaaggcgacaaggtcatcgcctcgggcgaggtggccagccaggaggagaaagagaagatcctgctggcgctgggcaacgtcgccggcgtctcctcggtggaagacaagatcaccgtggcccaggccgctccggaggcgcgcttcgtcaccgtgaagaaaggcgacaccctgagcgccatcgccaaggccgaatacggcaatgccaacgcctacatgaagatcttcgaggccaacaagccgatgctcagccatccggacaagatctaccccggccaggtcctgcgcattcccgagtga

SEQ ID NO: 30617 - DNA, 408 bp, Pseudomonas aeruginosa
atgcgtaaatctctcctggtaatcgcgttcggcctgctgagcgcacaagccgcgctcgccggcgactccaccaagaccgcggtgggcggcggcgtaggcggtgccctgggcaacgtcgtgggcggcgccatcggcggtagcaccggtgccgccataggcgccggcctgggtggcgcggccggcggcgcgatgaccgccaaggacgggcgcaagaccgaagccgccctgggtggcgggctaggcgcggccggcggttcggtgatcggcaacaagctgggcggcagcaccggcgcgaccataggtgcaggcctcggcggcgcagcgggtggcgcggtcggtaacaacctgggcaaggacaacgacagcggtcaccgcggcaagaaacaccgcaagcacaagcatcgttga

SEQ ID NO: 30618 - DNA, 1542 bp, Pseudomonas aeruginosa
atgacgcaagccaacaacgccgtgtacaccgatatcagcgccgcccaactggtagaagaagccattcgccgcggtgagggcgaactggccgccaacggctcgctggtcgtacgtaccggccatcgcaccggccgttcgccggtcgaccgtttcatcgtcgaagagccgagcaccaaggacgcgatcgcctggggcaacatcaaccgtccgttcccggccgacaagttcgatgcgctgtgggcccgcgtggaagcgttcaacaacgcccaggaccatttcgtttcccatgttcatgtaggttccgccgaggcttactacctgccggtgaagatgaccaccgctaccgcctggcagaatctgttcggccgttgcctgttcatcgagccggagcagtacaacccggccggcaaggacgagtggcaggtcctcaatgtcgccaacttcgaatgcgtgcccgagcgcgacggcaccaactccgacggttgcgtgatcctcaatttcgcccagaagaaagtgctgatcgcaggcatgcgctatgccggcgagatgaagaaagccatgttctccgtgcagaacttcctgctgcccgagcgcgacgtgctgccgatgcactgcgctgccaacatcggcgaagcgggcgatgtgaccctgttcttcggcctgtccggcaccggcaagaccaccctgtccgccgatgaaagccgttacctgatcggtgacgacgagcacggctggggcgagggcgtggtgttcaacgtcgaaggcggttgctatgccaagtgcatcgacctgtccgagaagaacgagccggtcatctggaaagccatcaagttcggcgccgtgctggagaacgtggttctcgacgaagagcgcgtgcccaactacgccgatgacagcctgacccagaacagccgcgccgcctacccgctggagcacgtcgagaagcgttcggagaagaacctcggcggcgagcccaacgcggtgatcttcctgacctgcgacctgaccggcgtactgccgccggtatcgatcctgaacaatgagcaggcggcctaccacttcctgtccggctacaccgcgctggtcggctccaccgagatgggttccggcggcggtatcaagtcgaccttctccacctgcttcggtgctcctttcttcccgcgtccggccggcgtctatgccgagctgctgatcaagcgcatcaaggccttcggctccaaggtctacctggtcaacactggctggaccggcggtggctacggcgtcggcaagcgcttcaacatcccgaccacccgtggcgtgatcgcggcgatccagagcggcgcgctgatcggcgcggaaaccgagcacctggagatcatcaacctggacgtgccgaaggccgttccgggcgtcgagaccaatctgctcaacccgcgcaacacctgggctgacaaggctgcctacgacgaggcggcgaagggcctggccaagcagttcatcgaaaacttcaagaaattcgaggtttccgatgcgatcaaggccgccggcccgcagctgtaa

SEQ ID NO: 30619 - DNA, 396 bp, Pseudomonas aeruginosa
gtgagcgagaaagacgacgacaaggtgcgcctggacaagtggctctgggcggcgcgcttcttcaagacccgggcgctggccaaggccgcgatagagggcggcaaggtgcattgccggggcgagcggtgcaagccgagcaaggaacccagggtaggggaggagttgaccattcgtacgggcttcgacgagcgaaccgtgaccattcgcgcgcttgccgtagtccgtcgtggcgcgcaggaggcccaggctctctacgaggaaaccgcggacagcgtggaaagccgcgagcgcgcggcggccatgcgcaaggccggggcgctgggcgtacagaccgaggggcggccgagcaagaagcagcggcggcagatccaccagttgcgcggcggccaggactga

SEQ ID NO: 30620 - DNA, 2340 bp, Pseudomonas aeruginosa
atggacagcatcaacacccgtatcgccgaagagctctccgcactgccctccggccgcgttcaaccgcagcaagtcgccgctgccgtcgccctgctcgacgaaggctccaccgttcccttcatcgcccgttaccgcaaagaggtcaccggcagcctcgacgatacccagttgcgcatgctggaagagcgcctgcgctacctgcgcgaactggaagaacgccgcggcgcgatcctcgccagcatcgaggaacagggcaagctgacccccgaactggcccgcgacatcaagctcgccgacaccaagacccgtctcgaagacctctacctgccttataagcagaagcgccgcaccaagggccagatcgccctggaagccggcctcggcgcgctggccgacgcactgttcgacgacccgaccctggtcccggaaagcgaggccgcgcgtttcgtcgacgccgagaaaggcttcgccgacgtcaaggcggtgctggaaggcgccaagtacatcctcatggagcgcttcgccgaagacgccacgctgctcgacaagctgcgcgtgttcatgaagaacgaagcgaccctgaccgcccgcgtggtccccggcaaggaacaggaaggcgccaagttcagcgactacttcgaacacgatgagccgctgaaaagcgccccgtcgcaccgcgccctggcgatcttccgcggacgcaacgaaggcgtcctcagcgcctcgctgaaggtcggcgaggaagcgccgggcaccctgcacccatgcgaagtcatgatcgccgagcgcttcggcctgtccaaccagggccgcgccgccgacaagtggctggccgaggtggtgcggtggacctggaaggtcaagctctatacccacctggaaaccgacctgttcggcgagctccgcgacggcgccgaggacgaggcgatcagcgtgttcgcgcgcaacctgcacgacctgctgctggccgccccggccggcccgcgtgccaccctcggcctcgacccgggcctgcgcaccggggtcaaggtcgcggtggtcgacgccaccggcaagctgctggacaccgccaccgtctacccacatgcgccgaagaaccagtgggaccagaccctcgccgtgctcgccgcgctgtgcgccaagcaccaggtcgagctgatcgccatcggcaacggcaccgccagccgcgagaccgacaagctggccggcgaactgatcaagaagtatccgggcatgaagctgaccaagatcatggtcagcgaagccggcgcatcggtgtattccgcctccgaactggcggcgaaggagttccccgagctggacgtgtccctgcgcggcgccgtatccatcgcccgtcgcctgcaggacccgctggcggagctggtgaagatcgagcccaagtcgatcggcgtcggccagtaccagcacgacgtgtcccagctgaagctggcgcgtagcctggacgcggtggtcgaggattgcgtgaacgccgtcggcgtcgacgtcaacaccgcctccgccgccctgctggcacgcatctccggcctcaactcgacgctggcgcagaacatcgtcgcgcaccgcgacgccaacggagcgttccgcacccgcgacgagctgaagaaagtcagccgcctgggcgaaaagaccttcgagcaagccgccggcttcctccgcgtgatgaacggcgacaacccgctggacgcctcggcggtgcacccggagacctatccgctggtgcagcgcatcgccgccgacaccgagcgcgacatccgctcgctgatcggcgactcggcgttcctcaagcgcctcgacccgaagaagttcaccgacgagaccttcggcctgccgaccgtcaccgacatcctcaaggaactcgacaagcccggccgcgacccgcgtccggagttcaagaccgcagaattccaggaaggcgtcgagagcctcaaggacctcaagccgggcatggtcctggagggcgtggtgaccaacgtcaccaacttcggcgcgttcgtcgacatcggcgtccaccaggacggcctggtgcacatctcggcgctgtccgagaagttcgtcaaggatccgtacgaagtggtcaaggccggcgacatcgtcaaggtcaaggtcatggaagtggacatcccgcgcaaccgtgtcggcctgtccatgcgcatgagcgacacccccggcgagaaggtcgaaggccagcgcggcgggcgtcccaccggcagcggccagccgcgccaggagcgtggcgccccgcgcggacagagcgcgccgccggcgaacaacgccatggccgcgctgttcgccaacgccaagcaactgaagaagaagtga

SEQ ID NO: 30621 - DNA, 702 bp, Pseudomonas aeruginosa
atgagcgaatacttccatcacgtcctgatcggactgctcgccgtgcttccggtggccaacccgctgaccagcgtctcgctactgctcggcctcggcggcagcctgccgccggcggagcgcaaccggcagatattcaaggccagcctctacgtggcgctgatcatgctggtcagcttctacggcggcagcctggtgatgcaggtgttcggcatctccattcccggcctgcgcatcgccggcgggctgatcgtcgcctatatcggtttcaccatgctgttccccgccaccacgccggacgagaccgaagtccagcacgacctgctgtcggacgaggaaaagatcaccccgcacttccgcgacctgtccttcgttccgctggccctgccgggtaccgcggggccggggaccatcgccctggtggtcagctcggcgtcgacgctgcaatccacctacggaagcattccgctgttcatccacctcgcggcgatcaccgtcaccctgctcaccgcgctgatcttctggatcgccctgcaaagctccgggcgcatcatgaagttcctcggcgaatccgggatcgacgccatctcgcgagtggtcggcttcctgctggtggcgatgggcgtgcagttcgtcatcaacggcggcttcgagctggtcgccggccacgccgcgcttcagtcggcggcgggcgtcaggcagtaa

SEQ ID NO: 30622 - DNA, 2877 bp, Pseudomonas aeruginosa
atgtcgcagacgccgtccctcgcccagctccagcccgccgatgccttcctgcgccgccatctcggccccgatcctgcggaacagcaggccatgctggccttcctcggagtttccactcgcgccgaactgatcgtgcagacggtgccgccggcgatccgcctcaaccggccgctggaactgcccgccgcgctcgacgaacaggccgccctggcgcgcctgcgcggctacgccgggctcaaccagcgctggaccagcctgatcggcatgggctactacggcaccgtgacgccgtcggtgatcctccgcaacgtgctggagaatcccggctggtacaccgcctatacgccctaccagccggaaatcgcccagggccgcctggaagcgctgctgaatttccagcaactgaccatcgacctcaccggactcgacctggccagcgcctcgctgctcgacgaagccaccgccgccgccgaggccatggccctggccaggcgggtggcaaaggccaggagcaaccggttcttcgtcgatgcgcattgccatccgcagaccgtttcggtgttgcgtacccgcgccgaggcgttcggtttcgagctggtcgtcgacgagccggacaatcttgccgcccacgcggtgttcggcgccttgctgcaatacccggacagtcgcggcgagatccgcgacctgcgcccgcttatcgaggcgttgcacggccaacaggcgctggcttgcgtcgccagcgacctgctcgccctgttgttgctgaccccgccgggggaactcggtgccgacgtggtgctcggcagcgcccagcgctttggcgtaccgatgggctacggcgggccgcacgcggcgttcttcgccacccgcgaagggtacaagcgggcaatgccggggcggatcatcggcgtttcccgcgacgcccgcggcaacccggcgttgcgcatggccctgcaaacccgcgagcagcacatccgtcgggaaaaggccaactcgaacatctgcaccgcccaggtgctgctggccaacattgcttcgctgtatgccgtctaccatgggccacaggagctgaaacgcatcgcccaacgcgtccagcgcctgaccgcgctgctggcggcgggcctgaaaagcaagggactgcggcggctcaaccggcacttcttcgacaccctgacctacgaggtcggcgagcgtcaggcggcgatcctcgaacgggcgcgggcggcacgggtcaacctgcgcgtggtcgacgaccggcggctggccctgagcctcgacgaaacctgtgacgcggcgaccctggcgaccctgttcgagatcttcctcggcgccggccacgggctggatgtcgcgcacctggatggcggggcggtggccgacggcatcccggcggtcctgcaacgcacttcggcctacctgcagcatccggtgttcaacgcccaccacagcgagaccgagatgcttcgctacctgcgccagctggaaggcaaggacctggcgctgaaccaggcgatgatcccgctcggctcctgcaccatgaagctcaacgccagcagcgaaatgatccccatcacctggccggaattcgccgaactgcatccgttcgtgccgcgcgagcaggccgagggctatcgccggatgatcgacgaactggaagcctggctgcgggcgatcaccggcttcgacgccatctgcatgcagccgaactcgggagcacagggcgaatatgccgggttgctggcgatccgccgctaccaccagagccgcggcgatagccagcgcgacatctgcctgatccccgcatcggcgcatggcaccaacccggcctcggcgatcatggccagcatgcgggtggtgatcgtcgagtgcgatccccgcggcaacgtcgacctcgacgacctgcgcctcaaggcggccgaggcgggcgaccggctgtcctgcctgatgatcacctatccctcgacccacggcgtctacgaagaggggataggcgagatctgcgaagtggtccaccgccacggcggccaggtctacatggacggcgccaacctcaacgcccaggtcggcctggcgcgaccggcggacatcggcgcggacgtctcgcacatgaacctgcacaagaccttctgcatcccccatggtggtggcgggccgggcatggggccgatcggggtcaagcggcacctggcgccgttcgtcgccaaccatccggtgatccgcgtcgaagggccgaacccgctgaacgacgcggtcagcgcgacgccctggggcagcgccagcatcctgccgatcagttggatgtacatcgccatgatgggcccgcagctggccgacgccagcgaggtggcgatcctctccgccaactacctggcgaaccgcctggacggggcgttcccggtgctctaccgcgggcgcaacgagcgcgtcgcccacgaatgcatcctcgacctgcgaccgctcaaggcgcagaccgggataaccgaggaagacgtggccaagcgcctgatggactacggcttccacgccccgaccatgtccttcccggtgccgggcacgctgatggtggagccgaccgagagcgagtcgaaggcggagctggatcgcttcgtcgaggcgatgctgagcatcagggccgagatcggcaaggtggagagcggcgcctggccggcggaggacaacccgctgaaacgggcgccgcataccctggccgacgtcaccgggatctggcagagaccctacgagatcgccgaggcagtgaccccgagcgaacatgcgcgggcgttcaagtactggccggcggttaaccgggtggacaacgtctacggcgaccgcaacctgttctgcgcctgcgtgccgctggacgactaccgcgagtga

SEQ ID NO: 30623 - DNA, 1083 bp, Pseudomonas aeruginosa
atgggattgcgcaccccgctttacgagctgcacgtcgcgctcggcgccaagatggtcgatttcggcggttgggacatgccgctgcactacggttcgcaggtcgaggagcaccatcaggttcggcgtgactgcggcgtcttcgacgtgtcccacatgaccgtggtcgacgtcgccggcgagcaggccacggcctatctgcagcatctcctggcgaacgacgtggcgcgtctcggcgaaaccggcaaggcgctctacagcgcgatgctcaacgaagagggcggggtggtcgacgacctgatcgtctacctgaccgagcacggctaccgggtggtggtcaatgcttccacccgcgacaaggacatcgcctggatgcaggcgcaggccgccggcttcaaggtcgacctgcaggaacgcggcgacctggcgatgctcgccatccagggccccaacgcccgcgtgcacagctccgaactggtgtccccggcacgcgccgcgctgatacgcgaactcaagccgttccagggccgtgccgagggcgactggttcatcgcccgcaccggctacaccggcgaggacggcctggaaatcatgctgccggccgccgaggcgccgggtttcctcaatgagctggttggcgccgggatctccccggcgggcctgggtgcgcgcgatacgctgcgcctggaggccgggctcaatctctacggccaggacatggacgaaagcgtttccccgcttgccgccaacatgggctggaccgtagcctgggagccggttgcgcgggacttcgtcggccgccgcgcgctggaagcgcagaaggccgccggcgaccagccgaagctggtcggcctggtactggaggagcgcggcgtgctgcgcgcccaccaggtggtgcgggtagctggcattggtgagggggagatcaccagcggcagcttttcgcctaccctgaacaagtccatcgcgctggcccgcgtgccggccgccaccggcgaccgcgccgaggtggaaatccgcggcaagtggtacccggtacgggtggtccagcccagtttcgtgcgtcacggcaagcccctgatctaa

SEQ ID NO: 30624 - DNA, 1218 bp, Pseudomonas aeruginosa
atgcacgcggatctggtcatcgtcggcgccggcatggtcggtagcgccctggccctggccctggagggcagcggcctggaggtgctgctggtggacggcggctcgctcgacgtggcgccgttcaagccggaggcgccctacgagccgcgggtcagcgcgctgtccgaagccagccggcggattctccagcgcctgcatgcctgggacggcatcgtcgcgcgccgcgccgagccctatcgcgagatgcaggtgtgggatggctccggcaccgggcggatcggcttcagcgccgccagcgtgcacgccgaggtactcggccatatcgtcgagaaccgggtggtgcaggacgccctgctggaacgcctgcacgattccaccaccggcctgctggccaatgcgcgcctggaacagatgcgccactccggcgacgactggctgctgaccctggccgacggtcgccagctgcgtgcgccgctggtggtcgccgccgacggcgccaactcggcggtacgccgcctggccggctgcgccacccgcgaatgggattacctgcaccacgccatcgtcaccagcgtgcgctgcgagaacgcgcaccgcgcaaccgcctggcagcgcttcaccgacgacggtccgctggccttcctgcccctgccggaccgcggcgacgagcactggtgctcgatcgtctggtcgaccaccccggaacaggcagaacgcctgatggcgttggacgaggatggcttccgcgccgccctcggcgaagccttcgaacagcgcctgggcgccatcctgcatgccgaccggcgcctgtgcatcccgctgcgccagcggcacgccaagcgttacgtcgagccgggcctggcgctggtcggcgatgctgcgcacaccatccacccgctggccggacagggcgtgaacctgggcttcctcgatgcggcggtgctgtccgaggtcctgttgcacgccctggagcgcggcgaacggcttgccgacgaacgcgtgctgagtcgcttcgagcggcggcggatgccgcacaacctgggcatgatgacggcgatggaaggcttcgagcgcctgttccaggccgaccggttgccgctgcgctggctgcgcaacgccggcctgcgcctggtcgacggccatcacgaggcgaaggcgctgttcgtccgccaggcgcttggcctcagcggcgacctgccgatgctggcacgagtctga

SEQ ID NO: 30625 - DNA, 612 bp, Pseudomonas aeruginosa
atgatcgaatcgcaagacctcagccgcccggccctgcgccgcaagctccgccaggcgcgccgcgcgctctcccccctgcagcaacgcctcgccgcccgcgccctctatcgacaactggcgcagcatccccttttccgccgtgcccgccatatcgccctgtacctgcccaacgacggcgagatcgacccgcgtccgctgctgcgtgcggcgcagaagcgcggcaaggccacctacctgccggtgctggcgccctggccgcggacgcgcatggtattccagcgggtcggcagcggcgaacgctggacccgcaaccgcttccgcatcagcgaaccgctggccgacgccggccgccagcgcaaggcctgggcgctggacctggtactgctgccgctggtggggttcgacgaacagggcgggcgcctgggcatgggcggcggcttctacgaccgcagcctggcctacctggcgaggcgcaaaaatggtcacaaaccgacgctgatcggcctggcccatgaatgtcagaaggtggatcgactggcgctggccagctgggacattcccctggcgggaacggtgaccgatgcgggctggtacgtggcagggaaacgctag

SEQ ID NO: 30626 - DNA, 1125 bp, Pseudomonas aeruginosa
atgcgcagcctggccaacatcttcaacctgggcatcaaggagttccgcagtctcggccgcgactacgcgatgctggcactgatcgtctgggccttcaccctgggcgtctacagttccgccaccggtattccggaaaccttgcatcacgcgccgatcgcggtggtcgacgaggaccgctcgcagctctcgtcgcgtatcgtcaatgccttccagcccccatacttccggccgccggaaatgatcggacatgccgagatggatcgcggcatggacgtcggcctgtataccttcaccctcgatatcccgccggacttccagcgcgacgtgctcgccgggcgcaagccctcgatccaggtcaacgtcgacgcgacccagaccgggcaggccttctctggcgcgggctacatccagaacatcgtcgccaccgaggtgcgcgaattcgtcagccgctaccgcgcggagccgagcatgccggcgcagatcgaggtgcgcatggaattcaacccgaacctgacccaggcctggttcggtggggtgatggaagtgatcaaccagatcaccatgctgtcgatcatcctcaccggcgccgcgctgatccgcgagcgcgagcacggcaccgtcgagcacctgctggtgatgccgctgtcggccttcgagatcatgatggccaaggtctggtcgatggggctggtggtgctggtggcggcggggctctcgttgcagtgggtggtgcgtggctggctggacgtgccgatcagcggctcggtgggactgttcctgctcggcgccggattgcatctgttcgccaccacctccatgggcatattcctcggcacggtggcgcgttcgatgccgcagctcggactgttgaccatcctcgtgctgctgccgctgaacattctttcgggcggcaccacgccacgggaaagcatgccggaactggtgcagaacatcatgctggcggcgccgaccacgcatttcgtcagcctggcccaggcgatcctgttccgcggcgccggtttcgacatcgtctggccgcagttcgccggtatcgtggtgatcggttcggcgttcttcttcggcgcgctctggcgtttccgccggaccatctcgcagatggcctga

SEQ ID NO: 30627 - DNA, 969 bp, Pseudomonas aeruginosa
atgcgtatcgtcctgcaaccgtccggcgcctgcctcgagctgctgccgggggaacgcatcctcgatggcgcccggcggcttggctacgactgtccgcagagctgccgcaacggcaactgccatatctgcgcggcgctgctggtggaggggcgggtacgccagaacggcgaggtacgcgatcatggcgaactcttcacctgcctcgctgagccgctggaagactgcgtgctgcattgggacggggtgctggcgccgggtgaactgcctctgcgcaagctgacctgccagttgagcttctgcgaagaggtcggcggcgacgtctaccgggtcggcctgcgcgcgccggccggcaagccgccacgctatcacgccgggcagtacctgttgctggagcgtgacggcggcgacagcgcggcgttttccctggcctccgcgccgcatgcgggacgcgaccttgagttgcacatcctggccaaggaagacagtgccgtcgcgctgatcgcgcaattgcagcgcgagcgcctggcacggatccagctgccgttcggcgacgcgcatctggcggaactgcccgacggtccgctggtgctgatcgctgcgggaaccggcatgtcgcagatgcacagcctgatcgagcactgccgcgccgccggcttcgcccatcctgtacatctctactggggcgttcggcgtccggaggatttctaccgactgccgcactggacggagtgggaaggcctgccgaacctgttcctgcaccgggtggtcagcgacctctgtggctgggaggggcgctgcggcttgctgcacgaggcggtgcgcgaggatttcgccgacctgtcgagcctgcatgtgtatgccagcggctcgccggcgatggtctacgcgaccctggatgccctggtcgaagcagggatggacgcgcaccagatgcgcgccgacgtgttcgcctacgcgccgcgggactga

SEQ ID NO: 30628 - DNA, 1260 bp, Pseudomonas aeruginosa
atgaatctgaccgaactcaagcaaaagccgattgccgaactgctggaaatgtccgatgccatgggcctggaaaacatggcccgttcgcgcaagcaggacatcatcttcgccctgctgaagaagcacgcgaaaagtggtgaagagatctccggcgatggcgtgctggagattcttcaggacggcttcggcttcctgcgctccgccgactcttcctacctggccggccccgacgacatctatgtctcgccgagccagatccggcgcttcaacctgcgcacgggcgacaccatcatcggcaagatccggccgccgaaagagggcgagcgttacttcgccctgctcaaggtcgactcgatcaacttcgatcgtccggagaatgcgaagaacaagattctcttcgagaacctgacgccgctgttccccaacgagcggatgaagatggaagccggcaacggctccaccgaagacctgaccggccgcgtcatcgatctctgcgcgccgatcggcaagggccagcgcggcctgatcgtggcgccgccgaaggcgggcaagaccatcatgctgcagaacatcgccagcaacatcacccgcaacaaccccgaatgccacctgatcgtactgctgatcgacgagcgccctgaggaagtgaccgaaatgcagcgcaccgtgcgcggcgaagtggtcgcctcgacctttgacgaaccgccgacccgtcacgtacaggtcgccgagatggtgatcgagaaggccaagcgcctggtcgagcacaagaaggacgtggtcatcctgctcgactccatcacccgtctggcgcgggcctacaacaccgtgatccccagctccggcaaggtgctcaccggcggtgtcgacgcccatgccctggagaagccgaagcgcttcttcggcgccgcgcggaacatcgaagagggcggttctcttacgattctcgccacggcgttggtggaaaccggctcgaagatggacgaggtgatctacgaggaattcaagggtaccggcaacatggaactcccattggatcgcaagatcgccgagaagcgcgtgttcccggccatcaacatcaaccgttcgggtacccgccgcgaagagctgctgaccagcgaggacgagctccagcgcatgtggatcctgcgcaagatcctgcacccgatggacgagatctccgcgatcgaattcctcatcgacaagctcaagcagaccaagaccaacgatgagttcttcgattcgatgaaacggaagtag

SEQ ID NO: 30629 - DNA, 1014 bp, Pseudomonas aeruginosa
gtgagcttcactcccgccaatcgcgcctatccctacacccgcctgcggcgcaatcgccgcgatgacttctcccgccgcctggtccgcgagaatgtcctcaccgtcgacgacctgatcctgccggtgttcgtcctcgatggggtcaaccagcgtgaaagcattccgtcgatgcccggcgtcgagcgcctgtccatcgaccagttgctgatcgaggcggaagagtgggtggccctgggcattccggcgctggcgctgttccctgtgaccccggtggagaagaagtccctggacgccgccgaggcatacaacccggaaggcatcgcccagcgcgccacccgtgccctgcgcgagcgctttccggagctgggcatcatcaccgacgtggcgctcgacccgttcaccacccatggccaggacggcatcctggatgacgatggctacgtcctcaacgacgtcagcatcgacgtgctggtacggcaggcgctgtcccacgccgaggccggcgcccaggtggtagcgccctcggacatgatggacggtcgcatcggtgcgatccgcgaggccctggagtctgccggccacaccaatgtgcggatcatggcctactcggccaagtacgccagcgcctactacggtccgttccgcgatgcggtcggctcggcttcgaacctcggcaagggcaacaaggccacctaccagatggatccggcgaacagcgacgaggcacttcacgaagtggccgccgacctggccgaaggcgccgacatggtgatggtcaagccgggcatgccctacctcgacatcgtgcgtcgggtgaaggatgaattccgcgccccgacctttgtctaccaggtcagcggcgagtatgcgatgcacatgggcgccatccagaacggctggctggccgaatcggtgatcctcgaatcccttaccgccttcaaacgtgccggcgccgatggcattctgacctacttcgccaagcaggccgcagaacaattaagacgggggcgttga

SEQ ID NO: 30630 - DNA, 630 bp, Pseudomonas aeruginosa
atgctcgtcagtacctggttcgccttcttcctcgcctgctgggccatcagcctgtcgccgggcgccggagccatcgcctcgatgtcctgcgggttgcagtacggctttgcgcgaggctactggaacgcgctgggcctgcagatcggcctggccctgcagatcgccattgtcgccgccggcgtcggtgcgttgctggcgacctcggcactggctttcagcctgatcaagtggttcggcgtggcctacctggtgtacctggcggtgcgccagtggcaggcgccgccacaggccttgagcaccgatggcgaacggcctctggggcgaccgttgaccctggtgctgcgtggtttcctggtcaacgccagcaatcccaaggcggtgatcttcatgctcgcggtgctgccgcagttcatcgacccgcaccagccgctgctggcgcaatacctgatcatgggcggcaccatgatcgtcgtcgacctgatcgtcatggccggctacaccgggctggctgcgcgcgtgctacgcgtactgcgttcgccgcgccagcagaagctggtgaaccgtaccttcgccagcctgttcgtcggtgccgcggggctgctggcgacggtacgccgagcgccgctctga

SEQ ID NO: 30631 - DNA, 1059 bp, Pseudomonas aeruginosa
atgtcggccaacaagaagcccgtcaccacccccttgcacctgttgcagcaactttcccacagccttgtcgagcacctggaaggtgcgtgcaaacaagcgctggtcgattcggaaaagctcctggccaaacttgaaaagcaacgtggcaaagcccaggaaaagctgcacaaggctcgcaccaagctgcaggatgctgccaaggccggcaagaccaaggcacaggccaaggcgcgcgagaccatcagcgacctggaagaggcgttggataccctgaaggcccggcaggcggacacccgtacctacatcgtcggcctcaagcgtgacgtacaggaaagcctcaagctggcgcagggtgtcggcaaggtgaaggaagctgctggcaaggctctggagagccgcaaggcgaaacccgcgaccaaacctgctgcgaaggcggcagccaagcctgcggtgaaaaccgtagcggcgaagcctgcggccaagccggctgcgaagcctgctgcgaaaccggcggccaagcctgcggcgaaaaccgcggcagcgaagcccgcagccaagccgacggcgaagcctgctgcgaaaccggcggccaagcccgcggcgaaaaccgcagccgcgaagcccgcagccaagccggcggcgaagcctgtggcgaaaccggcggccaagcctgcggcgaaaaccgcagccgcgaagcccgccgccaagccggcagcgaagcctgtcgcgaaaccgacggccaagcccgcggcgaaaaccgcagccgcgaagcccgcagccaagccagctgcgaagcctgcggcgaaaccggcggccaagcctgtggcgaaatccgcggccgcgaagcctgcagccaagccggctgcgaagcctgcggcgaaaccggcggccaagcctgcggcgaaacccgtagccgcgaaacctgccgcaaccaagcccgccaccgctcctgctgcgaagcctgcggcgactcccagcgccccggcagccgcctccagcgctgcttcggcaacgcctgccgcgggcagcaacggcgccgccccgaccagcgcctcctaa

SEQ ID NO: 30632 - DNA, 942 bp, Pseudomonas aeruginosa
atgtcgtcccgcgaaatccgcatcgccactcgccagagcgccctcgccttgtggcaggccgaatacgtcaaggcgcgcctggaacaggcgcatcccggcttgaccgtcaccctgctgccgatgaccagtcgcggcgacaagctgctcgacgcaccgctggcgaagatcggcggcaagggcctgttcgtcaaggaactggaaaccgccctgctcgaaggcgccgccgacatcgcggtgcattcgatgaaggacgtgccgatggactttcccgaggggctcggcctctacaccatctgcgagcgcgaagacccgcgtgacgctttcgtctcgaacacctacgccagcctcgagcaactgccagccgggagcgtggtcggcacctccagcctgcgccgccaggcgcagctgctggcgcgccggccggacctgcagatccgtttcctgcggggcaacgtcaatacccgcctggccaagctggatgccggcgaatacgacgcgatcatcctcgccgccgccggcctgatccgcctcggcttcgagtcgcgcatccgctcctcgatcagtgtcgacgacagcctgcccgccggcggacaaggcgccgtcggcatcgaatgccgtacggccgacagcgacctgcatgccttgctggaacccttgcaccataccgacacggctctgcgggtcactgccgagcgcgcgctgaacaagcggctcaacggcggttgccaggtgccgatcgcctgctacgccatccgcgagggcgaccagctgtggctgcgcggcctggtcggccagcctgatggcacccagttgctgcgcgccgaggggcgggcgccactggcggaagccgaggcgctgggcgtgcgggtggccgaggacctgctggagcagggcgccgaagcgattctcgaagccgtctacggcgaggccggacatccgtga

SEQ ID NO: 30633 - DNA, 747 bp, Pseudomonas aeruginosa
atgaatgtcctgattgtcgatgacgaacctctggcgcgagagcgcctggcccgattggtagggcaactggacggctatcgcgtcctcgagccctcggccagcaatggcgaagaagcgctgacgctgatcgacagcctcaagcccgatatcgtcctgctggatatccgcatgcccggtctggacggcctccaggtcgcggccagactctgcgagcgggaagcgccgccggctgtgatcttctgcacggcccatgacgaattcgccctggaagccttccaggtcagcgccgtgggctacctggtcaagccggtgcgcagcgaagacctggccgaggcgttgaagaaagcctcgcgaccgaaccgcgtgcaactggccgcgctgaccaagcccccggcctccggcggcagcggtccgcgcagccacatcagtgcacggacccgcaaggggatcgagctgatcccgctggaagaggtgatcttcttcattgccgaccacaagtacgtgaccttgcgccatgcgcagggcgaggtgctgctggacgagccgttgaaggcgctggaagacgagttcggcgagcgcttcgtgcgcatccaccgcaacgcgctggtcgcccgcgaacggatcgaacgcctgcagcgtacgccgctggggcatttccagctctacctgaaaggcctcgacggcgatgcgctgaccgtcagccggcggcacgtggccggagtcaggcgtctgatgcatcagctctga

SEQ ID NO: 30634 - DNA, 1077 bp, Pseudomonas aeruginosa
atgcctatccgattcaagcccggccgctcgacccggccggccgtccaagacgacttcttcattcccgagctctgcgaagccgaagccctgttcaccctggtgctgctggcggagctgctggtgctcgtgctggtgctggcggagccgatgacgccgagcttcaactgggtgcgcctggccctggcgtcgctgttcgtgcagtggatcgtactgctctcggcggcgctgttctgccgcctgcggccattgctcgcacgcctgccggtggcgctggcggggagtgcctgctgcctgttggtggtggccctcaccctgggctgcacggcggtcgccgagcactatcagctgggcggagaactgacgcgtgccggcgaggtcaatctgtatctgcggcacgcgctgatcgcgctgatcatgtccgccctggtgctgcgctacttttacctgcagagccagtggcgccggcagcagcaggccgagttgcaggcgcgcctggaatcgctgcaggcgcggattcgcccgcacttcctgttcaacagcctgaacagcatcgccagcctgatcgagctggacccgctgaaggccgagcatgcggtgctggacctgtccgacctgttccgggccagcctggcgaagcccggcactttagtttcctgggaggaggaactggcgctggcaaggcgctatctttccattgagcagtatcgtcttggcgatcgcctgcaactggactggcaggtgcacggggtgccggccaacctgccgatcccccaactgaccttgcagccgctgctggaaaatgcgcttatctatggcatccagccgcgggtcgaaggcggcctggtgcaggtcgaggcggtttatcgtgaaggagtgttccagctatgtgtgagcaacccctacgacgaggcgctcgagtcgcccccgtcgaaaggcacgcgacaggcgttacacaatatcgatgcacgacttggggcacttttcgggcctaaagcgagtctcagcgtcgagcgccgtgacggacggcactacacctgtctacgctatccatgtgcgcgactcatgcaggaagcctga

SEQ ID NO: 30635 - DNA, 1395 bp, Pseudomonas aeruginosa
atgagcgtagagaagaccaaccagtcctggggcggccgcttcagcgagcccgtcgacgccttcgtcgcccgtttcaccgcctccgtcgacttcgacaagcgtctctaccgccacgacatcatgggttccatcgcccacgccacgatgctggccaaggtcggcgtgctgagcgacgccgagcgcgatgcgatcgtcgacggcctgcaacagatccaggcggaaatcgaagccggcagcttcgactggcgcgtcgacctggaagacgtgcacatgaacatcgaggcgcgcctgaccgaccgcatcggcgtcaccggcaagaagctccacaccggccgctcgcgcaacgaccaggtggccaccgacatccgcctctggctacgcgacgagatcgacaccatcctcgccgagatcacccgcctgcaggagggcctgctgggcctggccgaagcggaagccgacaccatcatgcccggtttcacccacctgcagaccgcccagccggtgaccttcggccaccacctgctggcctggttcgagatgctcggccgcgactacgagcgcctggtcgactgccgcaagcgggtcaaccgcatgccgctcggctcggcggccctggccggcaccacctacccgatccagcgcgagatcacctgccagttgctgggcttcgacgcggttggcggcaactccctggacggcgtctccgaccgcgacttcgccatcgaattctgcgccgccgccagcctggcgatgatgcacctgtcgcgcttctcggaagagctggtgctatggaccagcgcgcagttccagttcatcgacctgcccgaccgcttctgcaccggctcctcgatcatgccgcagaagaagaaccccgacgtgccggagctggtacgcggcaagtccggccgggtgttcggcgccctcaccggcttgctgaccctgatgaagggccagccgctggcctacaacaaggacaaccaggaagacaaggaaccgctgttcgacgccgccgacaccctgcgcgatagcctgcgcgccttcgccgacatggtcccggcgatccggccccggcgcgagatcatgcgcgaggcggcacgccgcggtttctccaccgccaccgacctggcggactacctggtgcgcaagggcctgccgttccgcgactgccacgagatcgtcggccacgcagtgaagtacggcgtagacagcggcaaggacctcgccgagatgagcctcgacgaactgcgccgcttcagcgagcagatcgacgccgacgtcttcgacgtgctgaccctggaaggctcggtcaacgcccgcgaccatatcggcggcaccgcgccgaaccaggtccgtgccgccgtcgcccgcggcagaaaactgctggcacagcgctga

SEQ ID NO: 30636 - DNA, 912 bp, Pseudomonas aeruginosa
atgcgcgccgacctggatgccttcctcgaacatctgcgcagcgagcgccaggtctccgcgcacaccctcgacggctaccgccgcgacctgctgaagatcctcgccctcgccgaaaaggccgggctctccgactggaacgccctcgacacccgcagcctgcgcaccttcgtcgcccgcctgcaccagcagggccagtccagccgcagcctggcacggctgctctcggcgacgcgcggcctctaccagtacctgctacgcgaagggcgctgccggcacgaccctgccaacggcctgagcgcgccgaagagtccgcgcaagctgcccaggaccctcgacgccgaccgcgccctgcaattgctcgacggtgccgtggaggatgacttcatcgcccgccgcgaccaggccctgctggagctgttctattcctccgggctgcgcctctcggaactggtcggcctcgatctcgaatggctggacctcaaggaaggcctggtgcgagtgcgcggcaagggcaacaaggtccgcgagctgccggtcggcaaggccgcgcgccaggcgctcgaagcctggctgccgctgcgcacccaggccgctccggaagacggtgcggtgttcatcggccgcagcggcaagcgcctgacgccacgggcgatccagctgcgggtgcgccaggccggcgtccgcgagctgggccagcacctgcacccgcacatgctgcggcactccttcgccagccatctgctggagtcgtccggcgacctgcgcgccgtgcaggaactgctcggccacgccgacatcgccacgacccagatctatacccacctggacttccagcacctggcctcggtctacgaccgcgcccatccccgcgccaagcgcaagggcaacgccgatggaggcaacgacccatga

SEQ ID NO: 30637 - DNA, 699 bp, Pseudomonas aeruginosa
atgagcagcctgcgactggtcaccttcgacctcgacgacaccctgtgggacgtcgccccggtgatgaacaacgccgaggccctgctccgcgaatggctggcgagcaacgccgcgcgcctgggtccggtacccatcgagcacctgtgggcgatccgcacccgcctgctggatcgcgagccgatgctgcgccaccgtctcagcgagctgcgccggcgcatcctgttccatgctctgctcgacgctggttatccacaggcggaggcggaaagcctggccgaggccggtttccaggtattcctcgaagcgcgccaccgggtcaccctgtttcccgaggtccacccgaccctggagatcctcgccgaccgcttcaccctcggcgtgctcaccaacggtaacgccgacgtgcgccgcctgggcctggccgactacttccggttcgccctctgcgccgaagaactgggcgtcggcaagcccgacccgacgccattccgcgaagccctgaagcgcgccggcgtcgaggcctcggcagcgatacacatcggcgaccaccccagcgacgacatcgccggagcgcgccgcgccggcatgcgtgccatctggttcaacccaagcggcaagccctgggccggggaggaagagccgagcgcggagatccgcagcctcgccgagctgccggccctgctcgcccgcctgcaatga

SEQ ID NO: 30638 - DNA, 2010 bp, Pseudomonas aeruginosa
atgtcccgactcaatccccggcagcaagaagccgtgaactacgtcggcggtcccctgctggtcctggctggcgccggctccggcaagaccagcgtgatcacccgcaagatcgcctatctcgtccagcagtgcggtatccgcgcccagtacatcgtcgccgtgaccttcaccaacaaggccgcgcgggagatgaaggagcgcgtcggcaccctgctgcgcggcggcgagggcaagggcctgaccgtctcgaccttccacaacctcggcctgaacatcatccgcaaggaacacgaacggctcggctacaagcccggtttctcgatcttcgacgagtcggacatcaaggcgctgctgaccgacatcatgcagaaggagtattccggggacgacggcgtcgacgagatcaagaactacatcggcgcctggaagaacgacctgatccttccggaggaggcgctggaaaaggcccgcaaccccaaggagcagaccgccgcgatcgtctacctgcattaccagcgcaccctgcgcgcctacaacgcggtggacttcgacgacctgatcctgcaaccggtgaagctgttccaggaacatccggacgtcctccagaagtggcagaacaaggtgcgctacatgctggtggacgagtaccaggacaccaacgccagccagtacctgctggtcaagctgctggtgaaggaccgcgcccagttcaccgtggtcggcgacgacgatcagtcgatctacgcctggcgcggcgcgcgtccggaaaacctgatgcagctgaaggaagacttcccttcgctgaaggtggtgatgctggagcagaactaccgctccaccagccgcatcctcaagtgcgcgaacgtcctcatcgccaacaacccgcacgtattcgagaagcagttgtggagcgagatgggccacggcgatccgatccgggtgatccgctgccgcaacgaggacgccgaggccgagcgcatcgccatggagatcctcaccctgcacctgcgcaccgagcggccgtacagcgagttcgccatcctctaccgtggcaaccaccaggccaagctgatggagctgaagctccagcaccaccagattccctatcggctctctggcggcaccagcttcttcgggcgccaggaagtgaaggacctgatgtcctacttccgcctgctggtgaaccccgacgacgacaacgccttcctcagggtgatcaacgtgccgcgccgggaaatcggttcggcgaccctggagaagctcggcaactacgccacccagcgcaagatctcgatgtacgccgcctgcgacgagatgggcctggccgagcacctcgacagccgtttccacgaacgcctgcaacgcttcaagcgctggatggacggtatccgccgacagtgcgcggagaacgagccgatcgccgtgctgcgcagcatggtgatggacatcgactacgagaactggctgcggcagaacgcctccagcgacaaggtcgccgaattccgcatgagcaacgtctggttcctcatcgaggcactgaagaacaccctcgagcgcgacgaggaaggcgacatgaccatcgagcaggccatcgccaagctggtcctgcgcgacatgctggagcgccagcaggaagaagaggaaggcgccgaaggcgtgcagatgatgaccctgcacgcgtcgaaggggctggagttcccctacgtgttcatcatgggcatggaggaagagatcctgccccaccgttccagcatcgaggccgacacggtggaagaggagcgccgcctggcctacgtcggcatcacccgcgcgcggcagaacctggcgatgaccttcgccgccaagcgcaagcaatacggcgagatcatcgactgctcgccgagccgcttcctcgacgaactgccccccgaagacctcgaatgggaaggcatggaagacgccccgcaagaggtcaaggcggccaagggcaacgccgccctcgccgacatccgcgccatgctcaagcgctga

SEQ ID NO: 30639 - DNA, 1719 bp, Pseudomonas aeruginosa
atgtcgagcaagaaagtcgccgagatcgtcgtggaaaccctggaagccgccggcgtccgccattgctatggcatcgtcggcgacaccctcaaccatgtcaccgacgccatccatcgcagccagatccagtgggtccacgtgcgccacgaagaagcggcggccttcgccgcgggcgccgagtcctacatcagcggacgcctgaccgcctgcgccggctcctgcggaccgggcagcctgcacttcatcaacggcgtctacgaggcccagcgcaaccgcgcgccgatggtcctgatcgccagccagatcgtcaccccgcaactgggcatggagtttccccaggaggtcgacttcaaggcggtctacgccagctgctcggtgttctgcgagcaggtgcacagcccggaacaggcgcgccgggtggtggccctggcctgccaggcggcgctcaaccggcgcggcgtggcggtggtgatcctgccggccgacatcagccaggccacggtgaaggacgacctgccgttctcggtgcatttcccgcaaccggtgctgcgccccagcgacgccgaactgcaggacgtcgcccgcctgctggcccacggcaagaagatcggcatctacgccggctccggctgccagggcgcccacgacctgctggtggccctcgccgaccgcctcaaggcgcccatcgcgcacacgtcgcgggccaaggacttcgtcgagtacgacaaccccttcaacatgggcatgaccggtatgctcgggatcgagtccggcttccacatgatgaccgagtgcgacaccctcctgctgctcggcgccgacttcgcctgggcgcagttctatccgcagaaggccaccctgatccaggtcgaccgcgatggcagtcacctgggccgccgccaccccatcgatctcggcgtggtcggcgacgtgatccccaccctcgaggcgctcttgccgttgctcgaagcccgcgaggagcgcagcttcctcgacgaatgcctggagcaccgcgagcgctcgctgcggacgctggaaaaagaggagcaagccggcaagggcgagctgatccatccgcagcacctggtcagcctgctcgaccagcacgccagcgaggacgccctgttcaccgccgacggcggctcggcgatggtctggctgttgcgtcacatccacagcaacggcaagcgccgcaccctcaccagcctggtccacggcaccatggccaacgccatgccccaggcgctgggactgaagaaggcctaccccgagcgccaggtaatctcgatctccggcgacggcggcctggccatgctgctcggcgacctgctgacggccatccaggaaaaactgccgatcaaggtagtggtgctgaacaatgcctcgctgaacttcgtcgagctggaacagaaggtcgagggcctgctggacaactacaccgacctgctcaacccggacttcgcccgtctcgccgaagtgatcggcttccacggacgcaaggtgacgcgctccgaggagctcgaggcggcggtgcaggagttcctcgcccagcccggtccggcgctgctggacgtgcataccaaccctgcggagctggtgatgccgccgaagatcgagttcggccaggtcgccgacaccgcgctctacgccgccaaggccgtgctcagcgggcgcttcaaggacgtcgagacgctactggtgaacaacctgctgaaatga

SEQ ID NO: 30640 - DNA, 156 bp, Pseudomonas aeruginosa
atgcgtgaattgattcgtctggtgtccagcgccggtaccggccacttctacaccaccgacaagaacaagcgtaccaagcctgagaagatcgagatcaagaagtacgatccggtcgttcgtcagcacgtgatctacaaggaagccaagatcaagtaa

SEQ ID NO: 30641 - DNA, 675 bp, Pseudomonas aeruginosa
atgagcatccgcgattggcccgaagccgaacggcctcgggagaagcttctggagcagggcgcggcggccctttccgatgccgagctgttggcgatcttcctgcgcacgggagtgaccggttgtagtgcggtcgagctgtcgcggcggctgttgagcgagttcggcgggctgcgtgccctgctcgaggcggacctcgcctcgttctgcggccatctcgggctcggcgtggccaagtatgcgcaattgcaggccgtgctggagatgggccggcgccacctggccgagcgcctgcgtcgcgattcgatactggagagcccgcaggcggtgcgcgactatctcaaggcgcgcctgcgccacgagcagcacgaggtgttcgcctgcctgttcctcgacacgaggcaccgggtcctgtcgttcgaggtgctgttccagggcagcatcgatggcgccagcgtctacccgcgccaggtggtcaagcgcaccctggcgcacaacgcggcggcgctgatcctgacccataaccacccctccggcgacgcccgtccgagtctcgccgaccgccagctcactgcgcgcctcaaggaagccttggcgctcatcgacgtgcgggtgctcgaccacttcatcatcggcgacggcgagccgctgtcgctggccgaatacggttggctgtga

SEQ ID NO: 30642 - DNA, 642 bp, Pseudomonas aeruginosa
atgcaggcgtatcagcgcgatttcattcgtttcgccatcgagcgcggggttctgcgcttcggtgagttcaccctcaagtccgggcgcaccagcccctatttcttcaatgccggcctgttcgacagcggcctggcgctggcccgcctgggacgcttctacgccgaggcggtgatcgacagcggaatcgacttcgacgtcctgttcggcccggcctacaagggcattcccctggccgccaccaccgcggtggccctcgccgagcagcaccaacgcgacctgccctggtgcttcaaccgcaaggaagccaaggaccacggcgaaggcggcacgctggtcggcgcgccgctgagcggccgggtgctgatcatcgacgacgtgatcaccgccggcaccgcgatccgcgaagtgatgcagatcatcgacgcccagggcgccagggcggcgggcgtgctgatcgcgctgaaccgccaggagcgtggcaagggcgagctgtcggcgatccaggaggtcgagcgcgacttcggcatgccggtggtgagcatcgtttccctggagcaggtgctggaatatcttgccgaagatgctgaactgaagaagcatctgccggcggtagaggcctatcgcgcccaatacggtatctga

SEQ ID NO: 30643 - DNA, 864 bp, Pseudomonas aeruginosa
atggtgcacagcatgaccgccttcgcccgcgtcgagcaggccggtacccacggcaccctgagctgggagctgcgctcggtcaaccaccgttacctggagccccacctgcgcctgcccgacgccttccgcgacctcgaaggcgcggtgcgcgaggcgctgcgccagggcctgtcgcgtggcaaggtggaatgcaccctgcgcttcgccgaggaaaccgccggcaagagcctgcaggtcgaccaggagcgcgcccgccaactggtcgccgccgccgaaggcgtagccgccctgatccgccagccggcgccgctcgatccgctcgccgtgctggcctggcccggcgtactggtggccgactcggccgatccgcaggcgctcaacgccgccgccctggaagccttcggccaggccctggagcaactcaaggccggccgctcgcgcgaaggcctggagctggcgaagctgctcaacgatcggctcgacgcgatgctggtggaagtcggcaacctgcgcgaactggtgccgaccatgctggccaaccagcggcagaagatcctcgaccgcttcgccgaactcaaggccgaactcgatccgcagcgcctggagcaggaactggtcctgctggcgcagaagagcgatgtcgccgaggagctggaccgcctcgccacccacgtcggcgaggtccgccgggtcctcaaggccggcggcgccgccggtcggcgcctggacttcctgatgcaggaactcaaccgggaagccaacactctaggctccaaggcgttcgacccgcgctcgacccaggcggcggtcaacctcaaggtcctgatcgagcagatgcgcgagcaggtccagaacatcgaatga

SEQ ID NO: 30644 - DNA, 2106 bp, Pseudomonas aeruginosa
ttgccgggcatagacgccttcgccgacagactgtcgagctacctcgggccggaccaggtcaacctggtccgccgcgcctactactacgccgagcaggcccacgacgggcaacgccgccgcagcggcgaaccgtacgtgacccacccgctggcggtctccaacatcctcgccgacatgcacatggaccatcagagcctgatggccgcgatgctgcacgacgtgatcgaggacaccggcatcgccaaggaagcgctcaccgcgcagttcggcgagacggtttcggaactggtcgacggggtcagcaagctgacccagatgaacttcgagaccaaggccgaggcccaggccgagaacttccagaagatggccatggccatggcccgcgatatccgcgtgatcctggtcaagctggccgaccgcctgcacaacatgcgcaccctcgaggtgctgtccggcgaaaagcgccgacgcatcgccaaggaaaccctggaaatctacgcgcccatcgccaaccgcctgggcatgcacaccatgcgcgtggagttcgaggacctaggtttcaaggccatgcacccgatgcgcgccgagcgcatccgccaggcggtgaagaaggcccgcggcaaccgccgcgagatcgtcggcaagatccaggagtcgctggtcaactgcctcgcccgggaaggcatggaaggccaggtgatcggccgcgagaagcacctctacagcatctaccagaagatgcgcggcaagcgtaaggcgttcaacgagatcatggacgtctacgccttccgcatcatcgtcgacaaggtcgatacctgctatcgcgtgctgggcgccgtgcacagcctgtacaagccgttccccggacgcttcaaggactacatcgcgattcccaaggccaacggctaccagtcgctacataccaccctgttcggcatgcacggggtgcccatcgagatccagatccgtacccgcgagatggaagagatggccaaccacgggatcgccgcgcactggctgtacaagtccaacgacgagacgcccaagggcacccatgcccgcgcccggcaatgggtgaagggcgtgctggaactgcagcagcgcgccggcaactcgctggaattcatcgagaacgtgaagatcgacctgttcccggacgaggtctacgtgttcacgcccaagggccgcatcatggaactgcccaagggttccaccgcggtcgacttcgcctacgcggtgcacactgacgtcggcaacagttgcatcgcctgccgcatcaaccgtcgcctggcgccgctctccgagccgttgcagagcggccagacggtggaaatcgtcaccgccccgggcgcccggccgaacccggcctggctgagcttcgtggtcaccggcaaggcgcgcacccatatccgccatgcgctcaagctgcaacgccgctccgagtcgatcaacctcggcgagcgcctgctgaacaagacccttaccggcttcgacagccacctcgagaagattccccaggaacgcatccaggccgtgctcgccgagtaccgcatggaagtcttcgaggacctgctggaagagatcggcctgggcaaccgcatggcctacgtggtcgcccgccgcctgctgtccagcgagggcgaggaagcgccaagcgccgagggtccgctggcgatccgcggcaccgaaggcctggtcctgagctacgccaagtgctgcacgccgattcccggcgacccgatcgttggccacctgtccgccggcaagggcatggtggtgcacctggaaagctgcaagaacatcagcgaagtacgccacaacccggaaaaatgcatccagctcagctgggccaaggatgtcaccggcgaattcaatgtcgaactgcgcgtcgagctggagcaccagcgtggcctgatcgccctgctcgccaccagcgtcaacgcggccgacggcaacatcgagaagatcagcatggacgagcgcgacggccgcatcagcgtggtccagctggtcgtcagcgtgcacgatcgcgtccacctggcccgcgtcatcaagaagctgcgcgccctcaagggagtgatccgaatcacccgcctgcgtagctga

SEQ ID NO: 30645 - DNA, 1341 bp, Pseudomonas aeruginosa
atggacccttctcctagtaccagcatcgccacctatttcgccgatgccggcctgatcctcttcgcgcttttcctcgtcctgctcaatggcttcttcgtcgccgccgagttcgccatggtcaagctccgcgccacccgcgtggaaaccatcgccaagcagcacggctggcgcggcaccatcctgcgcaaggttcacaaccagctggacgcctacctgtccgcctgccagctgggcatcaccctggcctccctgggcctgggctgggtcggcgagccggccttcgccgaactcctggaaccgctgctggcgatgatcggcgtgcattccgacgaactgatccgcgggatctccttcttcaccgcgttcttcatcatttcctacctgcacatcgtggtcggcgagctggcgcccaagtcctgggcgatccgcaaaccggaactgctgtcgctgtggacggcggtgccgctgtaccttttctactggctgatgtacccggcgatctggctgctcaacgccagcgccaacgccatcctcaagatcgccggccagggcgagcccggcccgcaccacgagcatcactacagccgcgacgaactgaagctgatcctccactccagccgcgcccaggaccccagcgaccagggcatgcgcgtgctggcctcggcggtggagctgggcgagctggaggtggtcgactgggccaactcccgcgaagacctggtctacctcgagcacgacgcgccgctggcggacatcctcgcggtgatccgccgccataagtacagccgctacccggtctgggacagccacaagggcgagttcatcggcctgctgcacatcaaggacctgctgctggcgctgtccgccctggacagcctgccggagaccttcgacctcgacgaactggtgcgcccgctggagatcgtcaccaagcacaccccgctgtcgcgcctgctggagcagttccgcaagggcggcgcgcacttcgccgtggtggaagaggccgatcacaaggtggtcggcttcctgaccatggaggacgtgctggaagtgctggtcggcgacatccaggacgaacaccgcaagaccgagcgcggcatcctcgcctaccagccgggcaagctgctggtgcgcggcgacacaccgctgttcaagctcgagcgcctgctcggcatcgacctcgatcatgtcgaggcggacactctcgccgggctggtctacgacaccctgaagcgggtgccggaggaagaggaagtcctcgacaccgagggcctgcggatcatcgtgaagaagatgcgcggtccgaagatcgtcctggccaaggtggtcaagctcgactga

SEQ ID NO: 30646 - DNA, 900 bp, Pseudomonas aeruginosa
atgctagggcgccttctccttctctgtggcctgttcgccgcggcagctccggctgcggccctgaccatctacaagtacaccgacgccaatggcgtggtgacctactccgaccgcgccgtggccggggcgcaggtgttcgtcttccgcgaccggatggtcgagcacctggagcgggaagtgaagctggagacgaagaagcacgcgggtggcgagaccctgcaggtgcgcaacgacctctacgcgccggtcgaggtcgagttgcggatccgcaacccgcgcaatgccgttggggtgcccgacgggccgattcgctgggtggtcccggcgcgcagccaggtgcgcctggcgaccctggcgccgcgcaaggccggcaagccgatgagctacaccccgaagctgcgttacgcgctcggcgacccgcgccagcagccactgctctatcgctatccgctgccctggcgcggcgggccgttccgcctgtcccagggcgccaatggcaagtacagccacttcacccccaagggccgctacgcgatggacatcgccatgcccgagggcacgccgatcatcgccgcccgcggcggcaccgtggtgaagatcgagaacaaccagagcgggcgcggtaacaatccctcgggcaacttcgtccgcatcctgcacgacgacggcaccatgggcgtctacctgcacctgatgcgccattcggtactggtcgccgagggccagcgggtccaggtcggcacgccgctggcgcgctccggcaacaccggcaacagcagcgggccgcacctgcacttcgtgatccagcgcaacgtcggcctggcgctggagtcgattccctacgacttcgcccagccggtcgacagcctgccgaacttcgccatcgtccgcgagccttga

SEQ ID NO: 30647 - DNA, 834 bp, Pseudomonas aeruginosa
atgcaaaacgagaccgccagccacggcatcaacttcgatgcgctcggccgcgaccgccagagcctcgacctggcttccgaaagtgtcgaactggaagtgcccgggctgaacctgttctacggcgccaagcaggcccttttcgacgtccggatgaacattccgaagcagcgcgtgaccgccttcatcggcccgtccggctgcggcaagtcgaccttgctgcgctgcttcaaccggatgaacgacctggtggatggctgccgcgtcgaaggcgagattcgcctcgatggccacaacatcttcgccaagggcgtcgacgtcgccgagctgcgccgtcgcgtcggcatggtgttccagaagcccaacccgttccccaagagcatctacgagaacgtggtctacggcctgcgtatccagggcatcaacaagaagcgcgtacttgacgaggccgtcgagtgggcgctgaagggggctgcgctgtgggaggaggtgaaggatcgcctgcacgagtccgccctcggcctgtccggcggccagcagcagcgcctggtgatcgcccggaccatcgcggtggaaccggaagtgctgctgctcgacgagccgtgctcggcgctggacccgatctccacgctgaagatcgaagagctgatctacgagttgaagtcgaagttcaccatcgtcatcgttacccacaacatgcagcaggccgcgcgggtttccgactatacggcgttcatgtacatgggcaagctgatcgagttcggcgacaccgatacgctgttcaccaacccggcgaagaagcagaccgaagactacatcaccggccgctacggctag

SEQ ID NO: 30648 - DNA, 405 bp, Pseudomonas aeruginosa
atgatcgagcttgaacaagaagaccccattccccagggagacctggccttgcagattaccgcgctgccgcgcgaaaccaacggtttcggcgatatctacggcggttggctggtatcccagatggacctggcgggaaccgccatggccagcaagatcgccggcggccgtatcgccaccgtcgccatcgaccgcatggccttcatggtgccggtcgcggtaggtgcccagctttccttctatacccagaccctggaagtcggccgcagctcgatccgcatgctggtcgaggtgtggagcgacgacccgctgtccagcgaatggcgcaaagtcaccgaggcggtgttcgtgttcgtcgccatcgatggcagcgggcgcacccgcccggtcccgccacgccggggctag

SEQ ID NO: 30649 - DNA, 1686 bp, Pseudomonas aeruginosa
atgtcccaggaattcgactacatcatcatcggagccggctctgccggtaacgtactcgctacccgcctcaccgaagatgccgacgtcagcgtcctgctgctcgaagccggcggtcccgactaccgcttcgacttccgcacccagatgccggcggcccttgccttcccgctgcaggggcggcgctacaactgggcctacgagaccgaccccgagccctacatgaacaaccgccgcatggagtgcggtcgcggcaagggcctgggcggctcctcgctgatcaacggcatgtgctacatccgcggcaacgccctggacttcgacggctgggccaaggagccgggcctcgaggactggagctacctcgactgcctgccgtacttccgcaaggcggaaacccgggacatcggccccaacgactaccatggcggcgacggcccggtcagcgtgaccacgccgaaggccggcaacaacccactgttccatgcgatggtcgaggccggcgtgcaggccggctacccgcgaaccgatgacctcaacggctaccagcaggaaggcttcggccccatggaccggaccgtcaccccggagggccgtcgcgccgccaccgggcgcggctacctggaccaggcccgcggccggcccaacctgaccatcgtcacccacgccctgagcgaccgcatcctgttcagcggcaagcgcgccatcggcgtctcctacctggtgggcaacggcgacaacccggtcaccgcccacgcccgccgcgaagtattggtgtgcagcggcgcgatcgcctcgccgcaattgctgcaacgctccggcgtcggcccggcggccctgctgcgcgacctggacatcccggtggtgcatgacctgccgggcgtcggcgccaacctgcaggatcacctggaactctacctgcagtacgcctgcaagcagccggtgtcgatctacccggcgaccaaatggtggaaccagcctgccatcggtgcccagtggctgttcctcggcaagggcctcggcgccagcaaccagttcgaggccggcggcttcatccgaacccgcgaagcgttcgaatggccgaacatccagttccatttcctcccggtggcgatcaactacaacggcagcaagggcgtgcaggagcacggcttccaggcgcacatgggctcgatgcgctcgccgagccgcgggcgcatccacctgaagtccagggacccgcgccagcatccgagcatcctgttcaactacatgtcccacgagcaggactggcaggagttccgcgacggcatccggctgacccgcgagatcatgaaccagccggcgctggacccctatcggggccgcgagttgagccctggggtgagcgtgcagtcggacgccgaactcgacgagttcatccgcaaccatgctgagaccgctttccacccatcctgctcgtgcaagatgggcagcgacgacatggcggtggtcgatggccagggacgggtccatggcatggaaggactgcgagtggtggatgcgtcgatcatgccgctgatcatcaccggcaacctcaatgccaccaccatcatgatggccgagaagatcgccgacaggatccgcggtcgccagccgctgccgcgcagcacggcgaagtactacgtggccggggatgcgccggtacgcggcaaccccgtgcgggcctga

SEQ ID NO: 30650 - DNA, 978 bp, Pseudomonas aeruginosa
atgagcccagccgaattgcacgccgacagcatcgtcatcgacggtctgatcatcgccaagtggaaccgcgaactgttcgaggacatgcgcaagggcggcctgaccgccgccaattgcaccgtatcggtatgggaaggcttccaggcgacggtgaacaatatcgccgccagcaacaagctgatccgcgacaacagcgacctggtgatcccggtgcgcagcaccgcggacatccgcaaggccaaggagcagggcaagaccggcatcctctacggtttccagaatgcccacgcattcgaggaccagatcggctacgtcgaggtgttcaagcagctcggcgtgggcatcgtgcagatgtgctacaacacccagaacctggtcggcaccggctgctacgagcgtgacggcgggctctccggcttcggtcgggagatcgtcgcggagatgaaccgggtcggcatcatgtgcgacctctcccacgtcggcagcaagacttccgaagaggtcatcctcgaatcgaagaagccggtctgctactcccactgcctgccgtccggcctcaaggaacacccgcgcaacaagtccgacgaggagctgaagttcatcgccgatcatggcggcttcgtcggtgtgaccatgttcgcgccgttcctcaagaaaggcatcgactcgaccatcgacgactacgccgaggccatcgagtacgtgatgaacatcgtcggcgaggacgccatcggcatcggcaccgatttcacccagggccacggccacgacttcttcgagtggctgacccacgacaagggctacgcccggcgcctgaccaacttcggcaagatcgtcaacccgctgggcatccgcaccgtcggcgaattccccaacctcaccgagaccctgctcgagcgcggcatgcccgagcgcgtggtgcgcaaggtgatgggcgagaactgggtaagggtcctgcgcgacgtctggggcgagtaa

SEQ ID NO: 30651 - DNA, 1101 bp, Pseudomonas aeruginosa
atgtcgagcaacttcctcaatccggtcaccacccagacctgggccaacggccggcacctcgtgcgctgcgtcaaggtcatccaggaaacctgggacgtgcgcaccttctgcttcatggccgaccagccgatcctgttcttcttcaagccgggccagttcgtcaccctggagctggagatcgacggcgagccggtgatgcgctcctacaccatctccagctcgccctcggtgccctacagcttctccatcaccatcaagcgggtgccgggcgggcgggtttccaactggctgcacgacaacctcaaggaaggccaggagctaccggtgcacggtccggtcggcctgttcaacgccatcgacttcccggccgacaaggtgctgttcctctccggcggggtcggcatcaccccggtaatgtccatggcgcgctggttcttcgacaccaacgccaacgtcgacatggtcttcgtccacagcgcccgttcgccgaaggacatcatctaccaccgcgagctggagcacatggcctcgcggatcgacaacttcagcctgcacatcatctgcgagcgccacggcctcggcgaagcctgggccggctaccgtggctacctgaacctgcgcatgctggaactgatcgccccggacttcctcgagcgggaaatcttctgctgcggcccgacgccctatatgagcgcggtgaagcacctgctgcagggccacggctacgacatgagccgctaccacgaggaagccttcgggccgactccgccggaggtccgcgccgacgtcagggaactggccgcggaagccgccgaggcgccggaggtaccggtcgccgaccagcaccaggtggaattcaccgccaccggcaagagcatccgcgtcagccccggggaaaccgtgcacgccgccgccgccaagctcggcctgcacattccgaaggcctgcgggatgggcatctgcggcacctgcaaggtaatgaagaccgccggcgaggtggagatggagcacaacggcgggatcaccgacgaggatgtcgccgaaggctacatcctctcctgctgcagcgtgcccaagggcgacgtggtcatcgactactga

SEQ ID NO: 30652 - DNA, 246 bp, Pseudomonas aeruginosa
atgggattaatcggaaccatcatcgtcggactgatcgttggtctcgttgcacgctttctgaagccaggtgacgacagcatgggctggatcatgaccatcctgctcggcatcggcggttcgctgctggccacctacggcggccaggcgatcggcttctaccaggctggccaggcggccggtttcatcggcgcggtggtcggcgccgtcgtactgctggtcatttacggcctgatcaagaagaattga

SEQ ID NO: 30653 - DNA, 1029 bp, Pseudomonas aeruginosa
atgaccctgccacagaccatgaaagccgcggtcgtgcacgcctacggcgcgccgctgcggatcgaggaagtcaaggttccgctgcccggccccgggcaggtactggtgaagatcgaagcctccggcgtctgccacaccgacctgcatgccgccgagggcgactggccggtgaagccgccgttgccgttcattcccggtcacgaaggcgtcggctacgtcgccgcggtgggcagcggagtgacccgagtgaaggaaggcgaccgggtcggcatcccctggctgtacaccgcctgcggctgctgcgagcactgcctgaccggctgggagaccctctgcgagagccagcagaacaccggctactcggtgaacggcggctatgccgaatacgtattggccgacccgaactacgtcggaattctgccgaaaaacgtcgaattcgctgaaatcgcgccgatcctctgcgccggcgtcaccgtctacaaggggctcaagcagactaacgcgcgccccggccagtgggtggcgatctccggcatcggcggcctcggccacgtcgccgtgcagtacgccagggccatgggcctgcacgtcgccgccatcgacatcgacgacgccaagctggaactggcgcgcaagctcggtgccagcctgacggtcaacgcccggcaggaagacccggtggaggtgctccagcgcgacatcggcggcgcccacggggtgctggtcaccgcggtatccaatagcgccttcggccaggccatcggcatggcgcgccgcggcggcaccatcgccctggtcggcctgccgccgggtgacttcccgacgccgatcttcgacgtggtgctcaagggcctgcacatcgccggctcaatcgtcggcacccgcgcggaccttcaggaagccctcgactttgccggcgaaggcctggtcaaggcgaccatccatccgggcaagctggacgacatcaaccagatcctcgaccagatgcgcgccgggcagatcgaggggcgcatcgtccttgagatgtga

SEQ ID NO: 30654 - DNA, 1467 bp, Pseudomonas aeruginosa
ttgagtacaccagccactccaacgtcctgcgacatcctggtcttcggcggtaccggcgacctggccctgcacaagctgctgccggcgctctatcgcctgcaccgggaggaccgcctgccggccgatacacggatcttcgccctcgcccgcagcgcgctggacaacgccgccttcctcgccctcgccgagcgcaacgtccgcgcggtggtggcgcgcagcgagttcgccgccgaacaatggaaaggcttcgccgcgcgcctcgactacctggccatggacgcctcgcagagcgccgacttcggccgtctcgcgcggcacctgaagagcagcgagggccgggtgctggtgcactacctggcgacctcgccgagcctgttcgcgccgatcgcgcagaacctctccatcgccggcctcgccgggccgcaagcgcgcatcgtgctggaaaaaccgctgggccattcgctggactcggcgagggcgatcaaccagtccatcggccgggtgttcgacgagtcgcgggtgttccgcatcgaccactacctgggcaaggaaaccgtgcagaacctgatggccctgcgcttcgccaatgcgttgttcgagccggtctggcgcgcggcgcacatcgaccatgtgcagatcagcgtcaacgagacccttggcgtggagaaccgtggcggctactacgaccacgccggggcgatgcgcgacatggtgcagaaccatctgctccagttgctctgcctggtggcgatggaggcgccggtgcgtttcgacgccgaggctgtgcgcaacgagaagctcaaggtgctgcaggcgctgaagccgatctccgggctcgacgtgcaggacaagacggtacgcggccagtacgccgccggcaggatcggcggccaggaggtgccggcgtactacttcgagaagaacgtcgacaacgacagcgataccgagaccttcgtcgcgctccaggccgaggtcgagaactggcgctgggccggggtgccgttctacctgcgcaccggcaagcgcatggcgcgcaagtgctcggaaatcgtcatccagttcaagccggtgccgcacagcctgatcgacggcggcggcgggccggccaaccgcctgtggataaggttgcagccggaggagcggatcagcgtgcaactgatggccaagaccccgggcaagggcatgcaactggaaccggtggagctggacctcaacctggccgaggccctcagccgcaacaagcggcgctgggacgcctacgaacgcctgctgctggacgtgatcgagggcgactcgacgctgttcatgcgccgcgacgaggtagaggccgcctggggctgggtcgacccgatcctcgccggctggcgcgagcactaccagagcccgcggccctacccggccggcagcaacggcccggaacaggcgcaactgctgctggaactgcagggtcgacgctggctggaatga

SEQ ID NO: 30655 - DNA, 1395 bp, Pseudomonas aeruginosa
atgaccgccaccaccctccgccccgaactgctgtgccccgccggcaccctgaaaagcatgcgctatgccttcgcctacggcgccgatgccgtctacgccgggcagccgcgctacagcctgcgggtgcgcaacaacgatttcgaccacgcccaactggccgaaggcatcgccgaggcccacgcacttggcaagcgcttctacgtggtggtcaacatcgccccgcacaacgccaagctgaaaaccttcctgcgcgacctggagccggtggtcgccatgggtccggatgcgctgatcatgtccgatcccggcctgatcatgctggttcgccagcatttcccgcagatgcccatccacctgtcggtgcaggccaacgcggtgaactgggccgcggtgcaattctggcggcagcagggcctgacccgggtgatcctttcccgcgagctgtcgctggaggagatcgaggaaatccgccagcaggtgccggacatggagctggaagtgttcgtccacggcgccttgtgcatggcctattccgggcgctgcctgctgtccggctacatcaaccgccgcgaccccaaccagggcacctgcaccaatgcctgccgctgggaatacaaggcggtggagggccgcgaggacgagctgggcaacgtggtggcgcgggagccgaccctgggacgcggcgcgccgaccgagcaggtgttcctcctcgaggaaggcaaccgtcccggcgaaccgatggccgccttcgaggacgaacacggcacctacatcatgaattccaaggacctccgcgccgtgcagcacgtcgagcggctggcgcggatcggcgtgcactcgctgaagatcgagggccgcaccaaatcccactactacgtggcgcgcaccgcccaggtctaccgccaggcgatcgacgacgcggcggccggcaagccgttcgaccgcggcctgatggacaccctggagtccctcgcccaccgcggctacaccgagggcttcctgcgccgccacgtgcacgacgagtaccagaactaccagcacggccattcgttgtccgagcgccagcagttcgtcggcgaactcaccggcgaacgccgcgacggactggccgaggtggaggtgaagaaccgcttccagcgcggcgacagcgtcgaactgatgactccgcgaggcaacctgagcctgcgcgtggaggacctgcgcaacgccgccggcgaggccatcgaggtggcgccgggcaatggccacgtggtctacctggcgctgccggaaggcctggacctgtgctacgcgctactgatgcgcgatctccagcccggccaggatacccgccagccgcaggccgaacgcagcggagggtgtgccggcaagggcgcttgcggctgcgctcactga

SEQ ID NO: 30656 - DNA, 1749 bp, Pseudomonas aeruginosa
atgctgaaactgctcgacctgctctctgccgtcgccctgctggtgtggggcacgcatatcgtccgcaccggaatcctccgggtctacggcgccgacctgcggcgcatcctcagtcgcagcgtggaaaaacgcccgctggcgttcgccgccggcatcggcgtcaccgccctggtgcaaagcagcaacgccaccgccctgctggccacctccttcgtcgcccagggcctgatggcactggcgccggccctggcgatcatgctcggcgccgatgtcggcaccgcgctgatggcgcgggtgctgaccctcgacctgtcgtggctttcgccattgctgatcttcttcggcgtgattttcttcctcagccgcaaacagacccgcctcggccagctcggccgggtattcatcggcctcggcctgatcatcctggcgctccagctgatcgtcgccgccgccgagccgatgacccaagccaagggcgtcaaggtactgttctccagcctgaccggcgacatcatgctcgacgcgctgaccggcgcgttgttcgccatgatttcctattccagcctggccgccgtgctgcttaccgcgaccctcgccgcatccaaggtgatctcgctgaaagtcgcgctgtgcctggtggtcggcgccaacctcggcagcggcatcctggccatgctcagcgccaccgcgcaaaacgccgccggtcgccgggtggccctcggcagcctgttgttcaaggtcgccggctgcctgctggtgctgcccctggtggggccgctggcggactggatggatcactggcagttcagcacagccgaactggtgatcgccttccacgtgctctacaacgccgcgcgctgcctcgcctgcctgccgctgaccaacgccatggccagcttctgcacccgtgtgatgcccgaccgtgcccttcccgacgacgtcgcccggccgcgccatctcgaccccgccgccctcgacacgccgagcctggcgctggccaacgcggtgcgcgagaccctgcgcatgggcgacaccgtcgagcagatgctgaacaatctgatgcagatcatccgcggcggcgatccgctgctcggcaaggacatccgcaagctcgacgacgacgtcgacgccctctacaccgcgatcaagctgtatctggcaaggatgccgcgcgaggacctgtccgaacgcgacagccggcgctgggcggagatcatcgagctggcgatcaacctggagcaggccggcgacatcatcgagcacatgctcgccgccgtgcaggacaagaagacctcgcgcagccgctcgttctccgacaccggcctggaagagatcggcaccttgtaccagcagttggtctccaacctgcgcctgggtctctcggtgttcctcaacggcgacctcgacagcgccaagcgcctgcgccgggccaagcagcgcttccgtctgcaggaacggcgctacgcccatgcccatgtcgaccgcctgcaccagcaggtggtacagagcatcgagaccagctcgctgcacctggacctgatcagcgacatgaagcgtctcaactcgctgttctgcgccatcgcctacgccgtgctggacaatccagacgcgccgagcagcgcggccgacgagggcactcggcgggacgaggacgactgggccgacgaagtcgacgacatgacctcggcgccgctggccgagccagcgctcgccgaggagcgagcggaaacgcgccgttcgcgacattag

SEQ ID NO: 30657 - DNA, 1788 bp, Pseudomonas aeruginosa
atgagcatgccgctgccgatgaagctccggacccggttgttcctcagcatttccgcgctgatcaccgtctcgctgttcggcctgctgctcgggctgttcagcgtgatgcagctcggccgcgcccaggaacaacggatgtcgcaccactacgcgaccatcgaggtgagccagcaactgcgccagttgctcggcgaccagctggtcatactgctccgcgaaacccccgacgggcaggccctggagcgctcgcaaaacgacttccgacgagtcctggaacagggccgggcgaataccgtcgacagcgccgagcaggccgccctggatggcgtccgcgacgcctacctgcaactgcaggcgcacaccccggccctgctcgaggcgcccatggccgacaacgacggcttcagcgaagccttcaatggcctgcgcctgcgtttgcaggacctgcagcaactggcgctggccggcatcagcgaagccgagaccagcgcccgccatcgtgcctacctggtcgccggcctgcttggcctggtgggcgtcgccatcctgctgatcggtttcgtcaccgcccacagcatcgcccggcgcttcggcgcgccgatcgaaaccctggcgcgggcggcggacaggatcggcgaaggcgatttcgacgtgaccctgccgatgaccaacgtcgccgaggtcggccagttgacccggcgtttcggcctgatggccgaggccctgcggcagtatcgcaagaccagcgtcgaagaggtgctttccggcgagcggcgcctgcaggcggtactcgacagcatcgacgacggcctggtgatcttcgacaaccagggacgcatcgaacacgccaacccggtcgcgatccgccagctgttcgtctccaacgacccccatggcaagcggatcgacgaaatactcagcgatgtcgatgtccaggaggcggtggaaaaggccctgctcggcgaagtccaggacgaggcgatgcccgacctggtggtggacgtcgccggcgagtcgcgcctgctggcctggtcgctgtatccggtcacccatcccggcgggcatagcgtcggcgcggtgctggtggtccgcgacgtgaccgagcagcgcgccttcgaacgggtccgcagcgaattcgtcctgcgcgcctcccacgaactgcgtacgccggtgaccggcatgcagatggccttcagcctgctccgcgaacgcctggacttccccgcggagtcacgggaagcggacctgatccagacggtggacgaagagatgtcgcggctggtcctgctgatcaacgacctgttgaacttctcgcgctaccagaccggcatgcagaagctcgaactggcttcctgcgacctcgtcgacctgctcacccaggcgcagcagcgtttcattcccaagggcgaggcccgccgggtctcgctgcaactggagctgggcgatgaactgccgcgcctgcagctcgatcgcctgcagatcgagcgggtgatcgacaacctgctggaaaacgccctgcgccatagcagcgaaggcgggcagatccacctgcaggcccggcgccagggcgaccgggtgctgatcgcggtggaagacaatggcgaaggcattcccttcagccagcaaggacggatcttcgagcctttcgtccaggtcggacgcaagaagggcggcgccggcctcggcctggcgctgtgcaaggaaatcatccagctgcatggcgggcgcatcgcggtgcgctcgcaaccgggccagggcgcgcgcttctacatgctgctgccggtgtga

SEQ ID NO: 30658 - DNA, 594 bp, Pseudomonas aeruginosa
atggatatgttcggcgtcgccgtcctgatctttctggtcaccgaccccttcggcaacatcgccgtgttcctcgccgcgctgaaaggcgtcgcccccgggcgccgcttgcgcgtggcgtttcgcgagctggccttcgccctgggcctgctgctgctcttcctcaccctcggcgagcacatcctcagcggcctcggcctgtcccgcgaggcgaccgggatcgcgggtggcatcatcctgttcgtgatcgccatgcgcctgatcttcccgtcgccccaagggctgctcggcgaagtgcccgacggcgagccgctgctggtacccctggccaccccggcggtggccgggccctcggcgctggcgatgctgatcaccctgcgcaccaccttcgacggtccgctgtgggagctttacctggcggtggtgctggcctgggccgctactgcgctgatcctgctgcaggcggcgttcctccagcgtttcctcggcccgcgcgggctgaccgctatcgagcgcctggccggcatgctgctgatcatgctcagcgtcgatatgctgttggacaacctgcgcagcgtgttgcacatcgccgcctga

SEQ ID NO: 30659 - DNA, 678 bp, Pseudomonas aeruginosa
atggacttcttcgaaaccatgagcttcgccaacatcgactggtacgaaatctggctggccagcgtcgacaccttctggatgctcggcggttcgctgctgttcacagtggtcctcggcctgcccctcggcgtcctgctgttccttaccgggccacggcagatgttcgagcagaaggcggtctacaccctgctctcgctagtggtgaacatcctccgttcgttgccgttcatcatcctgctgatcgtgatgatcccgctgaccgtactgatcaccggtacctcgctgggcgtcgccggggccatcccgccgctggtggtgggcgccacgccgttcttcgcgcgcctggtggaaaccgcgctgcgcgaggtcgacaagggcatcatcgaggcaacccaggcgatgggcgccagcacccggcagatcatctggaacgccctgctgccggaagcccggccgggcatcatcgccgccatcaccgtcaccgccatcaccctggtctcgtacaccgcgatggccggagtggtcggcgccggcgggctgggcgacctggcgatccgcttcggctatcagcgcttccagaccgacgtgatggtggtcacggtggtgatgctgctgatcctcgtccagattctgcaaaccgtgggcgacaagctggtggtgcacttctcgcgcaagtaa

SEQ ID NO: 30660 - DNA, 783 bp, Pseudomonas aeruginosa
atgaaaaaactgcttgctgctttctccgctgtcgcggcgctcggcctcaccgccgcccaggccgccgagtccctcaccgtcgcggccaccccggtgccgcacgcggagatcctcaacgtggtcaagccgctgctggccaaggaaggcgtggacctgaagatcaaggagttcaccgactacgtgcagccgaacgtgcaggtctcggaaaagcgcctggacgccaacttcttccagcaccagccgtacctcgatgagttcaacaaggccaagggcaccgacctggtcgccgtgaccggcgtacacatcgagccgctgggcgcctactcgagcaagtacaagaagctcgacgaactgccttccggcgctaccgtggtgattcccaacgacgccaccaacggcggccgcgccctgctcctgctggacaaggccggggtgatcaagctcaaggacaacaagagcatcaccgccacgccgaaggacatcgtcgacaatccgaagaacatcaagatccgcgaactggaagccgcgaccctgccgcgcgtgctgacccaggtcgacatggcgctgatcaataccaactacgccctggaagccaagctgaacccaaccaaggatgcgctggccatcgaaggcagcgactcgccctacgtgaacatcctcgtcgcgcggccggacaacaaggacagcgacgccatgcagaagctggccaaggccctgcacagcgccgagatcaagcagttcatccaggagaagtacaaaggcgcggtggtaccggcgttctga

SEQ ID NO: 30661 - DNA, 1704 bp, Pseudomonas aeruginosa
atgcaccatacgccgttactcactacactcgccgcggggttcgtcctcgccttcctcttcggggccctggccaatcgcctgcgcatttcgccgctggtcggctacttgctcgcgggcgtcctggccgggccgttcactcccggttatgtcgccgaccaggcgctgtcgcaggaaatcgccgaactcggcgtgatcctgctgatgttcggcgtcggcctgcacttctcgctcaaggacctgctctcggtgaaggctattgccattcccggggcgctggtgcagatcggcgtcgccacgctgcttggcatcggcctggccaagctgctcggctggagcttcggcggcggcctggtattcggcctgagcctgtcggtggccagtaccgtggtgctgttgcgcgccctggagcagcgccagttgctggacaccaagcgtggcaggatcgccatcggctggctgatcgtcgaggacctggcgatggtcctgaccctggtgctcctgccggcgctcgccggcaccctcggcggcaagaccgacggcggcgacgccggtctgctctggccgctgctgattaccctgggcaaggtcgccgccttcgtcgccctgatgatcttcggcggtcgccgggtggtgccctgggtgctggagaggatcgccgccagcggttcgcgggagctcttcaccctggccgtgctggccattgccctgggcatcgcctatggctcggcggtgctgttcggggtgtccttcgcgctaggcgccttcttcgccgggatgatcctcaacgagtccgaactcagccacgaggcggcggagaactcgttgccgctgcgcgacgctttcgcggtgctgttcttcgtctcggtggggatgctgttcaatccgatgatcctgttgcaggagccgctgacggtcctggccaccttcctggtcatcgtcttcggcaagtcggtggccgcctacctgatcgtccgtgctttcggccatccgaacagcaccgcactggtgatcgccgccagcctggcgcagatcggcgagttttccttcattctcatcggcctgggcattggcctcgaactggtgccggagcagagccgcgacctggtgctggccggggcgatcctgtcgatcctggtcaatccgctgctgttcatcgccatcgatcgcctgcagcaacgcaaggagcagcgcctggcggaggccgctggcggggtccgcgagatgccggcgcaggacctgccgccgccgatcctggagcgcgagcatgcggtgctgatcggtcatggccgggttggcgggttggtcagcgctcgcctgcgcaccgccgggacgcccttcgtggtagtggtggacaagcgcgacaaggccgacgaactgcgcgaacagggctacagcgtggtcctcggcaatgccgccagtcccggcgtgctggaactggccaacatcgccgaggcgcgctggttgctgatcgccattcccaacggcttcgaggccgggcagatcgccagccacgcccgcgcggtgaacccgccgctggacatcgtcgcccgggcgcatttcgacgccgaggtggactacctggagcagaacggcgccaacctggtgatcatgggcgagcgcgagatcgcctgcggcatggtccatcgcctgggactcgaccgtgacgagcgcggcgccgacgcaccgctgccgcagtcggcctga

SEQ ID NO: 30662 - DNA, 741 bp, Pseudomonas aeruginosa
gtgcaactgcagcctgacgctttcccagcttccggcgccaccggcgacccggagctgaccatggccgagaatctccaggaacgactctaccaacgactgcgggaagacttgctggccggacgtttccagcccggcgagcgactgaagatccgcgacctggcgaaccagtgggacaccagcccgatgccggttcgcgccgccctgcaacggctggtggcggaaggggcgctggagggcgaggcacaacgctcgctcagggtgccgctgatgacccgcgagcgtttcctgcagatcctccaggtgcgcctgtccctcgaagggctggcggccgaaagcgccagcggccggctggacgagcaggcactggaaggactcgaaggttgtctgcggcgaatggaggacgccttgcgccgacgcgaggtacaggcctacctggacgccaatagcgaattccacctgacgctctaccgcgcctgcggcaacccggtgctgctgcgtctcatcgagacgctctggctacaggtcgggccgttcttcaaccggctgttcaccgaggccgacctctccctacgtctgaacgatttccacgaggacgccctggacgcgctacgccgcggcgacggcccggccgcgcgcgcggcgatcgaacaggacctggcctacttcggtcagtacctgctgaacctcctggagctggaggcccggccacgaaagcgacaccgttccggcgagcacgcctga

SEQ ID NO: 30663 - DNA, 897 bp, Pseudomonas aeruginosa
atgaatgccttgacgcttcccgatatcgcccgccagaccaccaccgccgatcttcccctggactgggtcggcatgcagggcatcgcccttcccgtgcagatcggcgggcagagggtcgccgccgaagccgatgccggtgtcagcctggacgacccgcaggcccgcggcatccatatgtcgcgcctctacctggcgctggccgaactggaacagggcgagctggacctttcctgcctgcgcgccgtcctgcaacgcttcctcgacagccacgccggcctgtcgcgtcgcgcctacctgcgcctacgcctcgcgccgctgctgcggcgtccggcgctggtcagcccgctgagcggctggaaacgttatccactggtgctggacacgcgcctggaaggcgatgacttccaggccgaagtccatctcgagctgacctactcctcgacctgcccctgttcggcggcactggcccggcaattgatccaggagcgcttcgaccaggacttcgccggacagccgctcgatcatgccagcgtgctcgcctggctcggcagcagcgccggcatcgtcgccaccccgcacagccagcgcagcagcgcgcacctgcgcatcggcctggcggaagactgcatcggactgcccctggaagagctggcggatctcggcgaaagcgccctcggcaccgcggtgcagactgcggtgaaacgcgccgacgagcaggccttcgccctcgccaacgggcagaacctgatgttctgcgaggacgcggtgcgccggctgcaccgcgccctgcagggttatccacaggcgagccggttctccatacgggtcgtccatgcggaaagcctgcatgcccatgacgccgtcgccgaaagccattggcagcgaggtgcagcatga

SEQ ID NO: 30664 - DNA, 1836 bp, Pseudomonas aeruginosa
atgtgtggaatcgtaggcgcgatcgccgagcgcaacatcacccccatccttatcgaaggcctcaagcgcctcgagtatcgcggctacgacagcgccggcgtggcggtcttcgataacgaaggcaggctgcagcgctgccgccgggtcggcaaggtcgccagcctggaggaaggcctggccggtacgccgctgctcggccgcctgggcatcgcccatacccgctgggcgacccacggcgcgccaaccgaaggcaacgcccacccgcatttctccagcgacgaagtggcggtggtgcacaacggcatcatcgagaaccacgaacctctccgtgagcggctcaagggcctgggctacgtgttcacctcgcagaccgacaccgaggtcatcgtccacctgctgcaccacaagctgcagtccatcggcgacctgaccctggcgctgaaggacgcggtcaaggaattgcacggggcctatggcctggcagtgatcagcgcggcgcagccggaccgcatcgtcgccgctcgcagcggcagcccgctggtgatcggcctcgggcttggcgagaacttcctcgcttccgaccaactggcgctgcgccaggtgaccgaccgcttcatctacctggaagaaggcgatatcgccgagatccgtcgcgacagcgtgcgcctgtgggatgtccagggcaacgacgtgcagcgcgagaccgtgcagtaccacgaaggcgccgaagccgccgacaagggcgagtaccggcacttcatgctcaaggaaatccacgagcagcccagcgtcgtgcagcgcaccctggaaggccgcctcgggcagaaccaggtactggtggaaagcttcggtccgcaggcggcggagctgttcgccaaggtccgcaacgtgcagatcgtcgcctgcggcaccagttaccacgccggcatggtcgcccgttactggctggaaagcctgaccgggattccctgccaggtggaggtcgccagcgagttccgctaccgcaaggtcgcggtgcagccggattgcctgttcgtcaccatctcccagtccggtgagaccgccgacaccctggctgccctgcgcaacgccaaggagctgggcttcctctccagcgtggcgatctgcaacgttgccaccagttcgctggtgcgcgaatccgacctgaccctgctgacccaggccggcccggaaatcggcgtggcctcgaccaaggccttcaccacccagttggtcgccctgctgctgctgaccctgggcatcggccaggtgcagaagcgcctggccgatggcgtcgaagccgagctggtggacgaactgcgtcgcctgccgacccggctgggcgaggcgctggcgatgaaccggacggtggagaaggtttccgagctgttcgccgagaagcaccacaccctgttcctcggccgtggcgcgcagttcccggtggccctggaaggcgcgctgaagctcaaggaaatttcctatatccatgccgaagcctacccggccggcgaactcaagcatggcccgctggcgctggtggacagcgacatgccggtggttaccgtggcgccgaacaacgagctggtggagaagctcaagtcgaacctgcaggaagtccgcgcccgcggcggcgaactggtggtgttcgccgacgaaggcgcgggcatcgaggctggcgagggcacccatgtggtgggcatgccgcacatcggcgacgtgctctcgccgatcctctacaccatcccgttgcaattgctctcgtaccatgtcgccgtgctcaagggcaccgacgtcgaccagccgcgcaacctggccaagtcggtcaccgtcgagtaa

SEQ ID NO: 30665 - DNA, 1365 bp, Pseudomonas aeruginosa
atgtcccttgaaatcgtgattctcgccgccggccagggcacccgcatgcgttcggccctgcccaaggtcctccatcccattgccggcaagccgatgctcggccacgtcatcgactgcgcgcgccagttgcagccggaacggatccacgtggtgatcggccacggcgcggatctggtgcgtgagcggatggccgccgacgacctgaatttcgtgctccaggccgaacagctcggtacgggccatgcggtggcccaggccctgccgttcctcagtgcagaccaggtgctgatcctctacggcgacgtgccgctgatccagctggacaccttgcagcgcctgctggcgcaagtcaccccggaccagttgtcgttgctcaccgtcgacatgctcgaccccaccggctacggccgcatcgtccgtgacgaccagggcgcggtgcaggccatcgtcgagcacaaggacgcgaccccggcgcagcgccagatcggcgagatcaacaccggcatcctcgcggtgccgggcaagcgccttgccgactggctcggccgcctgtccaacgacaacgcccagggcgagtactacctgaccgacgtgatcgccatggcggtcggcgacggcctggtggtggccagcgcccaaccgctggacgcgatggaagtgcagggcgtcaatgaccgcatgcaacaggcccagctggagcgtcactaccagcgcctgcgcgcagaggagctgatgcgccagggcgtgaccctgctcgatccgcagcgcctggatgtccgtggcgaaatctcggtcggccgcgacgtgctgatcgacgtcaatgtggtgctggaaggccgcgtggtgatcgaggacgacgtgcgcatcggaccgaactgcgtgattcgcgacagcgtcctgcggcgtggcgcggtgatcaaggccaacagccacctggaaggcgcggagctgggcgagggtagcgatgccggtccgttcgcccgcctgcgtccgggcagtgtgctcggcgctcgggcccatgtcggcaacttcgtcgaactgaagaatgcccgcctgggcgaggggagcaaggccggccacctgagctacctgggcgatgccgagctgggcgccaactgcaacatcggcgccggcaccatcacctgcaactacgatggcgcgaacaagttccgcaccgagctgggcgatgatgtgttcatcggctcgaacaactcgctggtggcgccgctgaagatcggcgatggcgcgacgaccgcggccggctccaccatcacccatgaggttccggcgaagaacctggccttcggccgcgcccggcagaagaacctggaaaactggaagcgcccggaaaaaatcaagaagtaa

SEQ ID NO: 30666 - DNA, 1545 bp, Pseudomonas aeruginosa
atgcagcaactcaatccttccgaaattagtgaaatcatcaaggggcgcatcgagaaactcgacgtcgcctcccaagcacgaaacgaaggcaccatcgtcagcgtgtccgacggtatcgtgcgcatctacggtctggccgacgtcatgtacggcgagatgatcgagttcccgggcggcgtctacggtatggcgctgaacctggagcaggattccgtgggtgccgtggtcctgggtgaataccagggcctcgccgaaggcatgaacgccaagtgcaccgggcgcatcctggaggttccggtcggtccggaactgctgggtcgcgtagtcgacgcactgggcaatccgatcgacggcaagggtccgatcgacgccaaggccaccgacgcggtcgagaaggtcgctccgggcgtgatctggcgtaagtcggtagaccagccggtacagaccggctacaagtcggtcgacgccatgatcccggtaggccgtggccagcgcgagctgatcatcggcgaccgccagatcggcaagaccgccctcgcggtcgacgccatcatcaaccagaaagacagcggcattaagtgcgtctacgtggccatcggccagaagcagtccactatcgccaacgtcgtacgcaagctggaagagaacggtgccctggccaacaccatcgtggtcgccgccagcgcttccgagtccgccgccctgcaatacctggcgccgtactccggttgcaccatgggcgaatacttccgcgatcgcggtgaagacgccctgatcgtctacgacgacctgtccaagcaggccgtggcttatcgccagatctccctgctgctgcgccgtccgccgggtcgcgaagcctacccgggcgacgtgttctatctccacagccgtctgctggagcgcgcttcccgcgtttccgaagagtatgtcgagaagttcaccaacggcgccgtgaccggcaagaccggctcgctgaccgcgctgccgatcatcgagacccaggccggcgacgtttccgcgttcgttccgaccaacgtgatctcgatcaccgacggccagatcttcctggaatccgccatgttcaactcgggtatccgtccggccgtcaacgccggtatctcggtatcccgcgtaggtggcgcggcccagaccaagatcatcaagaagctgtccggcggcatccgtaccgctctggcccagtaccgtgaactggcggccttcgcccagttcgcctcggacctggacgaagcgacccgcaagcagctggagcatggtcagcgcgttaccgagctgatgaagcagaagcagtacgcgccgatgtcgatcgccgagatgtcgctgtccctgtatgccgccgagcgtggcttcctgcaggacgtcgaaatcgccaaggtcggtagcttcgagcaggcgttgatctcctacttccagcgcgagcatgccgctctgctggcgaagatcaacgagaaaggtgacttcaacgacgaaatcgacgcgggcatcaaggccggcatcgagaagttcaaggccacccaaacctggtaa

SEQ ID NO: 30667 - DNA, 537 bp, Pseudomonas aeruginosa
atggcagaactgaccacgttggctcgtccctacgcaaaggcggctttcgagtacgcccaggctcatcagcaactggccgattggtcggctgcgctgggtgtgctggccgcagtgtcgcaggacgacaccgtgcgccagctgctcaaagagcctcagctgacctcttcggccaaggcccagagcctgatcgatgtgtgcggcgacaagctgaatgcaccagcccagaacttcgtccggactgtggctgagaacaagcggctcgaactgctgccgaccatcgctgagatgtacgagcagttgaaggccgagcaggaaaagtcggtcgaggtagaagtcaccagtgccttcaccttgagcaaagaacagcaggacaaactcgccaaggctctcagcgcccggctcagtcgcgaagtgcggctacatgcgtcggaagacgcgagcctgatcggcggcgtgatcattcgcgccggtgacttggtaatcgatggctcggtgcgcggcaagctcgcgaaactggccgaagcgttgaaatcttga

SEQ ID NO: 30668 - DNA, 471 bp, Pseudomonas aeruginosa
gtgaacattaatgcaaccctgattggccagtccgttgcgttcttcatctttgtgctgttctgcatgaagttcgtgtggcctccggtcatcgcggctctgcaagagcgtcagaagaagatcgctgacggcctggacgctgccaaccgcgcggctcgtgatctggagctggctcatgagaaagcgggccagcaactgcgcgaagccaaggctcaggcagccgaaatcgtcgaacaggcgaagaaacgcgctaaccagatcgtcgatgaagcccgcgaccaggcccgtaccgaaggcgaacgcctgaaggcccaggcccaagcggaaatcgaacaggaactgaacagcgtcaaggacgccctgcgtgcccaagtgggtgccctggccgtcaccggcgcagagaagatcctgggtgcttcgatcgacgcaaacgcgcacgagcagctggtttccaaactggcagccgagatctaa

SEQ ID NO: 30669 - DNA, 258 bp, Pseudomonas aeruginosa
atggaaactgtagttggactgactgctatcgccgttgctctgctgattggcctgggtgccctgggtaccgccatcggtttcggtctgctgggtggcaagttcctggaaggcgcagctcgtcagcctgaaatggttccgatgctgcaggtgaaaatgttcatcgtcgccggcctgctggacgccgtgaccatgatcggtgtgggtatcgccctgttcttcaccttcgcgaatcccttcgttggtcaaatcgccggctaa

SEQ ID NO: 30670 - DNA, 870 bp, Pseudomonas aeruginosa
atggcagcagaaaccgcttcgggttacatccagcaccacttgcagaacctgaccttcgggcgtctgcctaatggtgattgggggttcgcccacaccgccgagcaagccaaggaaatgggcttctgggcattccacgtagacaccctgggctggtcggtactgctcggcgtggtgttcctgttcatcttccgcctggcagccaagaaggccaccagcggccagccgggtggactgcagaacttcgtcgaggtgatggtcgagttcgtcgacaccagcgtcaaggacaccttccacgggcgcaacccgttgatcgcgcccctggccctgaccgtgttcgtctggatcttcctgctcaacctgatcgacctggtaccggtggactacctgccgatgctggccgcgaagatcaccggcgacgagcacctgttcttccgcgcggtggccaccaccgacccgaacgccaccctcggcctgtcgatctcggtgttcgcgctgatcgtcttttacagcatcaaggtcaagggcatcggcggcttcctcggtgaactgaccctgcaccccttcagcagcaagaacatcgtcgttcagatcctgctgattccggtgaacttcctgctcgagttcgtgaccctgatcgccaagccggtttcgctggcgctgcgtctgttcggcaacatgtatgccggcgaactgatcttcattctgatcgccgtcatgttcggtagcggaatgttcctgctgagtgccctgggcgtagccctgaactgggcgtgggctgtgttccacatcctgatcatcaccctgcaggccttcatcttcatgatgctgaccatcgtctacctgtcgatggcgcacgaagacaaccattaa

SEQ ID NO: 30671 - DNA, 645 bp, Pseudomonas aeruginosa
atgtctgcggtaacccaacaccacgccgacgaactcgcgcgcggtgctgacgagctaggcgtcgccctcgacgccgacaagcaacgccagctgctggcctacctggccctgctgatcaaatggaacaaggcctacaacctgaccgccgtacgcgacccggacgagatggtttcgcgccacctgctcgacagcctgagcatcgtgccttatgccgaggctggggataactggctggatgtcggcagcggcggcggcatgcccggcgtgccgctggccattctgttcccggaaaagcgcctgaccctgctcgacagcaacggcaagaagacccgcttcctgacccaggtgaagctcgaactgaagctggccaacctcgaagtcgtgcacagccgggtggaagccttccgtcccgagagccccttcgatggcatcgtttcccgcgctttcagcagcctggaggacttcgccaactggacccgccacctcggtggccaggaaacccgctggctggcgatgaagggcgtgcatccgaacgaagagctggcggcactcccggaggatttccgggtcgaagccgagcacgcgctggcggtacccggttgccaaggtcagcggcatctgctgatactgcggcgcacagcatga

SEQ ID NO: 30672 - DNA, 1893 bp, Pseudomonas aeruginosa
gtggatttccctacccgttttgacgtaatcgtgatcggcggtggccatgcaggcaccgaagccgcactcgcggctgcgcgcatgggtgtgaaaaccctgctgttgacccacaatgtggaaaccctggggcagatgagctgcaaccccgccatcggcggcatcggcaagagccatctggtcaaggaaatcgacgcccttggcggcgccatggccgaagccaccgacaagggcggtatccagttccgcatccttaacagtcgcaaggggccggcagtgcgcgccactcgtgcacaagccgatcgcgtgctctataaggccgctatccgccatacactggaaaaccagccgaacctgtggatattccagcaggcctgcgacgacctgatcgtcgagcaggatcaggtccgcggcgtagtgacccagatgggactgcgcttccatgccgacaacgtggtcctgactaccggcaccttcctcggcggacttatccacatcggcctggagaactactcaggcggacgcgccggcgacccgccgtccatcgcactggcgcgtcgtctgcgtgaattgccgctgcgggtcggccggctgaagaccggtacgccgccgcggatcgacgggcgcagcgtggacttctcggtgatgaccgagcagccgggcgacacgccgatcccggtgatgtccttcctcggttcgaaggaacagcatcccgagcaggtcagttgctggatcacccataccaacgcccggacccacgagatcatcgccgccaatctcgatcgttcgccgatgtattccggtgtgatcgaaggcatcggcccgcgctactgcccttcgatcgaagacaagatccatcgcttcgccgataaggaaagccatcaggtcttcctcgagccggaaggcctgacgacccacgagctgtatcccaacggcatttccacgtccctgccgttcgacgtgcaactgcagatcgtgcgttccatccgtggcatggaaaacgcccacatcgtgcggccgggctatgcgatcgagtacgacttcttcgatccccgcgatctcaggtacagcctggagaccaaggtcatcggcggcctgttcttcgccggccagatcaacggcaccaccggctacgaggaagctggcgcccagggcctgctggccggcgccaatgctgcgttgcgttcgcaaggcaaggacagctggtgcccgcgccgcgacgaggcctacatcggcgtgctggtggacgacctgatcacgctcggcacccaggagccgtaccgcatgttcacctcgcgggcggaataccgcctgatcctccgcgaggacaacgccgacctgcgtctcaccgagaagggacgcgagctgggccttgtcgacgatcggcgctgggctgccttcgaagccaagcgcgaaggtatcgaacgcgaggaacagcggctgaagagcacctgggtgcggccgaataccccgcagggcgacgccatcgccgagcgcttcggtacgccgctgacccatgaatacaatctgctcaacctgctgagccgccccgagatcgattacgccggcctggtggagatcaccggcaacgctgtggataacccccaggtggccgagcaggtggagattcgcaccaagtacgccggctacatcgaccgccagcaggaggaaatctcccgtctgcgcgccagcgaagatacccgcctgcctgtggatatcgattacctggggatttccggcctgtcgaaggaaatccagaacaagctgaaccaggcccgtccggaaaccctcggacaggcttcgcggatccccggcgtcacgccggctgcgatttcgctgttgttgatccacctgaagaagcgtgcctctggccgccaactggagcagagcgcttga

SEQ ID NO: 30673 - DNA, 1737 bp, Pseudomonas aeruginosa
atggacattcaacgctcgattctcatcgtcgcccttgcagtcgtgtcctacctgctggttctccagtggaacaaggattacggtcagcctgagctgcccgccgccagcgcttcgatgaacaccacgcaaggcctgccggacactccgtccgcctcgggcaccagcagtgacgttcccactgcccagagcagcgcggccggcagcgaagccgccgacaagccggttgcggtcagcgacaagctgatccaggtgaagaccgacgtcctcgacctggccatcgatccccgtggcggcgatatcgtccagctcggcctgttgcagtatccgcgccgcctggaccgtccggacgtgccgttcccgctgttcgacaacggtcgcgaacgtacctacctggcgcagagcggtctcaccggtgccgacggcccggacgccagcagcgccggccgcccactgttccgcagtgcgcagagcagctaccagttggccgacggccagaacgaactggtcgtggacctgagcttcagccacgacggtgtcaactacatcaagcgcttcaccttccaccgtggcctgaaagccgattgctcggacaaggaaaaggcccagaagaagatcgagtgcatcaatgaaaacgcctatcaggtcggcgtcagctacctgatcgacaaccagagcggcaagacctggagcggcaacctgttcgcccagctcaagcgcgacggcagcgccgacccgtcctcgaccaccgccaccggggtgtccacctacctcggcgccgcggtctggaccccggattcgccgtacaagaagatctccaccaaggacatggacaaggaacagttcaaggagtccgtgcagggtggctgggtcgcctggctgcaacactacttcgtgaccgcctgggttccgaccaagggcgagcagcaccaggtcatgacccgcaaggacggccagggcaactacatcgtcggtttcaccggcccgaccctgagcgttccggcgggtagcaaggtggaaaccgacctgaccctgtatgccggcccgaaactccagaagcacctgaaggaactctccccgggcctggaactgaccgtcgactacggtttcctttggttcatcgcccagccgatcttctggctgctgcaacatatccacagcctgatcggcaactggggctggtcgatcatcgccctgaccgtcctgatcaagctggccttcttcccgttgtccgccgccagctaccgttcgatggcgcgcatgcgcgcggtgtcgccgaagatgcaggcgatcaaggaacagcacggcgacgatcggcagaagatgtcccaggcgatgatggagctgtacaagaaggagaagatcaatccgctgggcggctgcctgccgatcctggtccagatgccggtcttcctctccctctactgggtactcctggaaagcgtggaaatgcgccaggcgccgtggctcggctggatcaccgacctgtcggtgaaggatccgttcttcatcctgccgatcgtcatgggcggcaccatgctgatccagcagatgctcaacccgaccccgccagacccgatgcaggccaaggtgatgaaactgatgccgatcatcttcaccttcttcttcctctggttcccagccggtctggtgctgtactgggtagtcaacaactgcctgtcgatcgcacagcagtggtacattacccgcaagatcgaggcagccgcgaagaccgcctga

SEQ ID NO: 30674 - DNA, 408 bp, Pseudomonas aeruginosa
gtggtgagtcgggacttcgaccgggacaagcgtctactgacagcccggcaattcagcgcagtcttcgactctccgaccggcaaggtccccggcaagcacgtcctgctgctggcgcgcgagaacggtctcgatcacccccgcctgggcctggtgatcggcaagaagaacgtcaagctcgccgtccagcgcaatcgcctcaaacgcctgatccgcgaatcgttccgccataaccaggaaaccctggctggctgggatatcgtggtgatcgcgcgcaaaggcctgggcgaactggaaaatccggagctgcaccagcagttcggcaagctctggaaacgcctgttgcgcaatcgacctcgcacggaaagccctgctgacgcccctggcgtggccgacggtactcatgcatag

SEQ ID NO: 30675 - DNA, 135 bp, Pseudomonas aeruginosa
atgaaacgtactttccaacccagcaccctcaagcgcgctcgcgtccacggtttccgcgcccgtatggccaccaagaacggccgtcaggttctgtcgcgtcgtcgcgccaaaggccgtaagcgtctgaccgtctga

SEQ ID NO: 30676 - DNA, 699 bp, Pasteurella multocida
atgcgattagataaatttttagccgaaaatacaggactaacccgctcacaagcgaataaagtcttaaagcaaagtgcggtcacggtaaatggacacgttgagaaaaatggtgcacaaaaagtcagtcaaacagatgaaatttgtttagaaggcgagcatttaccttgggtatctgcaggacaatatttgatgttatacaagccgcaaggctatgtttgctctcatgaggatggggattatccaacgatttatcaattctttgattatccgttggcaggtaaattgcatagtgctggacgattagatgtggacacgaccgggctcgtgttattaactgatgatggaaaatggtcacatcgtattacgtccccaaaacaccattgtgagaaaacctatctggtgacacttgccgatcctgtggaaagccattatcaacaagcctgtgcagaaggtatgctattgcgtggtgagaaaaccccaacgaagcctgcaacgttagaaattcttgatgattataatgtgaatttaacgattagtgaaggacgttatcatcaagtcaaacggatgtttgcggcgttggggaataaagtagtgggcttacaccgctggaaaatcggtcagattgaactcgatgatcggttagcagaaggagaataccgttctttatctgccgaagaaattgcaacatttaataaataa

SEQ ID NO: 30677 - DNA, 1197 bp, Pasteurella multocida
ttgaatcaacataaacgcagtacagtcagtgggctgttcattatgacattagcccttttatccatgttaccgccattgggcgtggatatgtatttacccgcattcttattgatcgctcaggatttatcgattacacctgaacaagttcaacacaccttaacgctttttgccttgggtatggctgtggggcaattgttttggggaccttttggggatagttatggtcgcaaaccgattattttgctcggtgtgagtatcagtgcgattgctgcgttgatgttaactgctacttattctattgggcactttaccactttgcgctttttacaaggtttctttggtgcagcccctgttgtgctggttggggcaattttgcgtgatttatttcataaaaatgaattgtctaaaatcatgtcaactattacgttggtatttatgatcgcaccacttttagcccctattattggtggttatctggtgttgtggtttcattggcatacgattttctatgtcattgcggtaatggggatcttgtgttgcctcttaaccttttttgttgtgccagaaacgcaccaaaaagggaatcgacaacccttacacttacggattattagccgaaactttttcagtttatggcaacaaaaagaagttttaggttatatgttttcctccgcgtttggttttggtggactgtttgcttttattaccgcagggtcgattgtatatatcggattatacggtgtcgctgtggaaaattttggctatttcttcatgctaaatattggtgtcatgattttcagttcttttttaaatcgcagatgggtgacaaaactgggagcagaaacgatgttacgtttggggctcagtgtacagtttattgcggcggttgccttggtgtgcatttcactttttgacctcggtttttggccaatggcgttgtgttgtgctatttttgtcgggcaaaatcccttgatctcctcgaatgcgatggcatcaattttagaaaaatttccgaccattgccggtaccgcaaactcaatggtgggaagcgtccgttttggtactgcctccctcgttggttctttagtggctgtaatggaaatgaaaacggcagcacccatgttatttaccatggcattttgtagtgtcatggcaattgggtgttattactttttgacttatcgctcgctgaaataa

SEQ ID NO: 30678 - DNA, 666 bp, Pasteurella multocida
atgatatttttagccattatcaaaagagagttacaaattgcgatgcgtaagcaagcggagattttaaatccgttatggttctttttgctagtgatcaccttatttcccttagtgattggacccgatccgaaattacttgcgcgtattgcaccggggattgcttgggtcgcggcattattatccgcgttgttgtcttttgaacgtttattccgagatgactttgttgatggttctttagaacaattaatgttaacggctcagcctctggcattaacagccttagctaaagtgattgcgcattggttactgacaggcttgccactgattttattatcacccattgcggcgctgttactttctttagaggttgaaatctggtgggcattggtgctgacattattgattggcacccctgtgctcagttgccttggcgcgattggtgtggcgttgaccgttggattacgtaaaggcggcgtgttattaagtttattagttgtgccgttatttattcccgttttaattttttcggcttctgtgttagaagctgccagtttaagcctaccttacagtgggcaattagccattttaggcgctattttagccggctctgtaacattatcgccgtttgctattgcggctgcattacgaattagcttagatcaataa

SEQ ID NO: 30679 - DNA, 627 bp, Pasteurella multocida
atgaaattagtccaagtacagcatccgctggtcaaacataaattaggtctaatgcgttcagctgagattaatacgaaaaaattccgcgaattagcaacagaagtaggcagtttattaacatacgaggctaccgctgacttagaaacagaaaaagtgatcattgatggttggtgcggtcccgtcgaaattgatcaaattaaagggaaaaaagtcactgttgttcctattttacgagcaggattagggatgatggacggggttttagaacatgtaccaagcgcccgtattagcgtcgtggggatgtatcgtgatgaagaaacccttgaacctgttccctatttccaaaaactcgccagtgatttagaagaacgcttagccattgtggttgacccaatgcttgccaccggcggctctatgattgcgacaatcgatcttctaaaagcgaaaggctgtaaacacattaaagtgctcgtgttagtcgccgcgcctgaaggcattaaagcattagaagctgcgcaccctgatatcgaattatataccgcatcagttgatagtcacttaaatgaacaaggctatattattccaggtcttggtgatgccggtgataaaatttttggcactaaataa

SEQ ID NO: 30680 - DNA, 1224 bp, Pasteurella multocida
atgaacaactattctgatgtaattattctcggtgcgggtgcagcgggattattttgtgcaagccaagccgccaagttaggcaaacaagtcaccttactcgataacggcaaaaaaattggacgaaaaattttgatgtcaggtggtggattttgtaatttcacgaatttagaagtgacgccacaacattatctttcgcagaatcctcattttgttaaatcggctttagctcgatatacccagtgggattttattgccatggtggcaagctatggtattgcctatcatgcaaaagaattaggtcaactcttcaccgatgaaggcgccgaaaaaatcgtggacatgctggcgacagaatgtgccaactatcaggtaaatattcagttacgccaacaagtgagcgacatccgccaactgaaccaagcagatgctgaacaaggaagaaaagggcgttttgcattacttgctaatggaacaacttggtattgcgatgctttagtgattgcgacaggagggctgtctatgccgggcttaggggcaacaccttttggctatcaagtggcagagcaatttgggattaaggttttgccaccaagagccagcttagtgccttttacttggcgtgaagcagataaagtgtataccaccctctctggcgtagcgttaccgatagttgttacggcaaactgtggcaaatcctttagcaatcaaatgttgtttactcaccgtggtatttctggtcctgctattttgcaaatttctaactattggcaaccgaacgaatccgtggagattaatttattgcctcatcaagatattgtggaatttttgcagcaattacgtaccacttcacctaaattacagcttaaaaatgcattagcaagagtcttgcctaaaaaattagtcgaagtttggagcgaacaacaactcattcaagacgagccgattgcacaactcagcaaagtccgtttacagcaattaagcgatttgatccatcattggcaatttttaccgaatgggacggaaggttatcgtactgcggaagtcactatgggtggggtggatacccgtgctgtttcgtcgaaaaccatggaagcacaaagcgtaaaaggcttgtattttattggtgaagtgctcgatgtcactggctggttaggcggttataattttcaatgggcatggagttcggcttatgcttgtgctatggcattagttgacgacaactga

SEQ ID NO: 30681 - DNA, 1455 bp, Pasteurella multocida
atgtctaaatgcccatttgaccatggttcaaaaaccttaacgaatgcagctggtgcacctattgttgaaaacgacaacaccatgtctgcgggtcctaaaggtccattacttttacaagatgtttggttccaagagaaattagcacactttgcacgtgagcgtattcctgagcgtgttgttcatgcaaaaggttcagcagcgtacggtacattcactgtgacacacgatatcagcaaatacaccaaagcggatttattcaatggtatcggtaaacaaacacaagtcttattacgtttctcaacagtagcgggtgagcgcggtgcggcagacgctgagcgtgatgtgcgtggtttcgcattaaaattctacactgaacaaggtaactgggacttagtgggtaacaacacacccgtattctttatccgtgatccattgaaattcccagatttcattcatactcaaaaacgtaatccacaaactaacttgcgtgatgcaaacgcggcatgggatttctggtcacgtcatcctgaatcattacaccaaatcatgattcttttcagtgatcgtggtattccaactgacttacgtcatatgaacggttacggtagccatacatatagctttattaacgcacaaaatgagcgtttctgggtgaaattccacttcaaaacacaacaaggtcacaaattctatactaatgaagaagcggctaaagtggtgggtgaaaaccgtgagtcaagccaacaagatttatacgaagcgattgagcgtggcgaattcccacgttggaatgttcaagtgcaaatcatgccagaagcagatgcacacaaacataactatgcgtttgacttaactaaagtatggccacacaaagattatccgatgatcgaagtgggtgtattagagttaaaccaaaacccaattaactacttcgcagaagtggaacaagctgcgtttgcaccttctaacatcgtaccgggaattggtttctcaccagaccgtatgttacaaggtcgtcttttctcataccaagacgcgcaacgttatcgtttaggggttaaccatcaccaaatcccagtgaacgcaccaaaatgcccataccacaccactcaccgtgatggcgcaatgcgtgtagataacaatggtggtacacaccctaactatgcaccgaaccgttttgatacttatgtgccgactcaccaacaagagcctgcattagagttagagcgttcagcagcacactttaacttccgtgagtatgatgaagactactacacacaacctgccgcactttacaacttattcgatgtggatcaaaaagcacgtgtggcagccaacttcgcagcgggcttagcaggtgttacagaacctgcgattgttgaaagacaattagcccacttcgacaaagtaagcaaagaattagctgatgcaattcgtgcgaacttagcgaaataa

SEQ ID NO: 30682 - DNA, 3480 bp, Pasteurella multocida
atgtctgaaccccgttttgttcacctgcgtgttcacagtgatttttccatgattaatgggattgccaaagtcaagccattaattaaagcctgtgttgataatcatatggtggcaatgggcttaacagactttactaacttttgtggtttagtgcgcttttatggcgaggcattatctgctggtgtgaaacccattattggagcagatgtgctggtgagaagtgaactttgtggtgacgaaccttttgagctgacattactggctaagaacaatataggctatcacaatattactttgctactctctaaagcctatgagcgaggctatcaagatctcccttatctagaccaagcctggctcgctgaacaccgtgaagggattattgtactgtcggggggacacaatggtgatgtgggtaaaaaattactaaaaggtcatgcggctgagattgaaagtgcggtcgctttttatcaagattttttccctgatcacttttatttgagtttgagccgtacaggacgttatgaagaagaacgctatgtgagtttggctttgacattggcagaagaaaaaggcttgcccgttgttgccactaatgacgtgttatttttgcatgaagacgattttgaagcccatgaaattcgtgttgctattcatgacagttacacccttgatgatcctaaacgtcctaaactttataccaatcagcaatattttcgctctgaacaagaaatgtgcgatctttttgcagacgtgccttctgcattagaaaataccttactgatcgcgcaacgttgtaatgtgaccattcgtcttggagagtattttttaccacaatttccaacgggcgatctgtccacagaagattttttggtaaaaaaatcgaaagaaggtttggaagagcgccttaaatttcttttccccgatgaaaaagtgcgtcaagcacgtcgccctgaatatgatgaacgtttacaagtggaattagacgtgattaatcaaatgggttttccggggtatttcttgatcgtgatggagtttattcagtggtcgaaagataacgatattcctgtcggtccaggacgtggttcaggtgctggatcgttggtggcgtatgcattaaaaattactgatcttgatccgctagaatttgatttactttttgaacgcttcttgaacccagagcgagtctccatgcctgactttgacgtggatttttgtatggatggtcgcgatcgcgtgattgatcatgtggcagaaacctatggtcgtggtgcagtatctcagattatcactttcggtaccatggcagcaaaagccgtgatccgagatgtggggcgtgtacttggtcatccttatggttttgtggatcgcatctcaaaattaattccgcctgatcccggcatgaccttggcaaaagcatttgccgcggagccacaattacaagcagtatacgactccgatgaggaagtcaaagccttgattgatatggcgcgcaagcttgaaggagtcacccgcaatgcaggtaagcacgccggaggcgtggtaatttcccctgggttaattacagatttctcgccgctttattgtgactctgaaggtaaacatccagtcacccattttgataaaaatgatgtggagtatgccggtctggtgaagtttgactttttaggtttacgcacactgaccattatcaaatgggcattagacatgattaatacgcgtcttgctaaagaaggcaaaccgcctgtggatattgccacaatcccgttagatgatcctgcttcttttgaattattaaaacgttcagaaaccactgccgtattccagctcgaatcgcgtggtatgaaggatttgatcaaacgtcttcagcctgactgttttgaggacattatcgcgttagtagcattgttccgtcctggtccattagagtcaggcatggtacaaaactttattgatcgtaagcatggcaatgaagtagtggcgtatcccgatccagaatatcaacacgacagtttaaaaccgattttagaaccgacttatggcgtaattgtatatcaagaacaggtcatgcagattgcccaagaattggctggatatactctcggtggggcggacttattacgtcgtgcgatggggaagaaaaagccagaagaaatggcagcacaacgtgaaatttttgagaaaggcgcgattcaaaaaggagtggatggcgagttagccatgaaaatctttgacttggtggagaaattcgcgggttatggctttaataaatcccactctgcggcttatgctttagtgtcttaccaaaccctgtggttgaaaacccattatcctgccgagtttatggcggcggtaatgacatcagagatggataacaccgataaaattgtcggcttatacgatgaatgtttgcgtatggggttaaaagttgctccgccagatattaacaccggtaagcatcatttcagcgtgaatgaatatggcgaaattgtgtatggtattggtgcgattaaaggggtgggagaaggacccattgaagcgttaatttcagcccgtgagcaaggcggcattttcaaagatttatttgatttatgtgctcgagtcgatttgaaaaagatcaatcgtcgtacttttgaaagtctgattttatctggtgcgtttgataaattaggtccacaccgtgccgcgttatcgaaaaatcttgaagatgcgttaaaagcctccgatcagcacgcgaaagatgcggcaatggggcaagcggatatgtttggtgtgctgactgaaagtcatgaagacgtggaaaaagcgtatgccagtacgccacgttggagcgagaaagtaattttggaaggggaacgtgaaacccttgggttatatttaagtagccatcctattagtccgtatttgaaagagttagcgcattacagtgctacgcggttaaaagatttagtaccaaattctcgtggacaaatgagtacggtcagtggtttacttgtctcatctcgttttgctgtaaccaagaaaggcaatcggcttggcatcgctacactagatgatcgttcagggcgattagatatcacgttatttggtgaagccttggataaatatgcagacaaattacaaaaagatacggtaatcattgtatcagggcaagtcagttttgatgagttttcgggtggattaaaaatgtcagttcgcgaactgatgagcttagatgaagcgcgtagtcgctatgcgaaaagtttggcgatatgtttatctgaggaaaacatgaaaccgacatttattcgtgaattgaaagcgttattaacaccttatagtggcggaaccttacctatctatgtttattatgcgagtacagcggggcaatgtcgtgtcaaaatgggagtacagtggtctgtgaatccgaccgatcaattatttactgaactggctgaaaaattaggtgaaaatgcagtggagttagagtttcaatcatga

SEQ ID NO: 30683 - DNA, 1368 bp, Pasteurella multocida
atgattagtgtttttgatatgtttaaaattggtatcggtccctcgagttcccatactgtcggtcccatgaaagcgggcaaacaatttattgatgatcttgtgagtcgtcatcagctagcacaagtgagtaaactgcgtgtggaggtgtacggttcactttccatgacaggacgtggacataataccgacattgccattattatgggattagccggctatttaccccatgatgtggatatcgagttgatccctcaatttatttctaccctaaaacagactgcccgtttgcccattgcgcaaaatacgaaagaggtcacctttaattttaatgatgacttaatctttcatcaaaccttcctcccacgacatgaaaatgggatgaccattaccgcactagcacaagatgatacggaactttatcagcaaacctactactctatcggaggtgggtttattgtggatgaagaacattttgaacatgctatgcatactgaaatcagtgtgccatttccttaccaaaatgcagcagatatgctaaaacactgcgatgacaatggtctcccgttgtctagtgttgtgatgaaaaatgaaaccgcattacatggaaaaaccgcattaagccaacatttacaacaggtctggcaaaccatgaaagcctgtatccaacacggtatcaatacagaaggtttattaccgggtccattaaaagtacctcgtcgcgcggcaagcttatatcgaatgttacaagcgaatagtagcttatccaatgatccaatgagcattgtggattgggtgaatatgtatgcgcttgctgtcaatgaagaaaatgctgcaggcggacgtgtggtaactgcgccaaccaacggagcttgtggtattgtgcctgctgtatttgcttattacgaacaattcatcgcagatagcatacctgacatcatcgaacgttatttattaacttgtagctttattggttcactgtacaaaatgaatgcgtcgatttcaggtgctgaagtaggctgccaaggcgaagttggtgtagcttgttctatggcggcggctggcttgactgaaattctgggtggtagtcctgaacaagtatgtattgcggcagaaattgccatggaacataatcttggtctgacttgtgatccagtgggaggacaggtacaggtcccttgtattgaacgtaacgctatcgccgcggttaaagccattaatgccagtcgaatggcattgcgtcgaacaaccagtccacgagtcactttagacaaggtcattgaaactatgtatgaaacaggcaaagatatgaatgctaaataccgtgaaacctcgcagggtggattggctattaaagtagtctgttcataa

SEQ ID NO: 30684 - DNA, 1242 bp, Pasteurella multocida
atggcaacaaaatcttgtgtcagttggagcaagtttgatcttgtctgggcattaaatttattcggtaccgctgtgggtgcgggtgtcttatttttacccattaatgcaggaaaaggcgggttttggcccttagtatgtatgacactcctagtaggtcccatgacttacttagcacaccgcggactcactcgttttgtcctatcttctgccaaaagcggcagtgatattactgaagtcgtagaagaacattttgggcaaaccgcaggaaaattcattactttactttatttctttgcgatttttcctattctgctgatttatggtaacggaataactaacacagtcgattcatttattgtacatcaactgcatatgaactcacctaatcgcgccttattggctttcatcctcattgccggcttaatttctgttatgttaatgaacgagaagatcatgctaaaaattaccgagtttttagtctatccattagtctgtattctgctcgccttatcactctatcttattccggaatggaatacctcaatgttaacagaatttccgagtacgcaagccctattcagcaccttatggattacgatccctgtattggttttttcgtttaaccactcaccggctatttcatcttttgcccaatctcaacaacgtgaatatggtgatctcacaaacacagaaacgcatactaaccgcactttaaaaataacctcaagtattttgctggtgtttgtgatgttcttcgtttttagctgtgtattaagtttaactcctgctgaattagcacaagcaaaaacacaaaatatcagtatcttatccttcctcgccaacaaatttgataatccttatatttcttaccttggacctttcgttgccttcttggcaattactagctctttctttggtcactatctcggtgcaaaagaaggactagaagggttaattatcaaaatgtctggcaaaaaagagattaagtgtcaaaaattaaattatttcaccgcacttttcttcttgctaaccctgtggattgtcgccattattaatccaagtattcttggcttaatagaatccttcggcggaccgattattgctgcaattttatttatcatgccgatgtatgcgatccgtaaaattcccgcgatgcaacgttaccaaggacgcttttcgaatctcttcgttaccatcatgggtatgttcgccatctcagcggttgtttatggcttattttaa

SEQ ID NO: 30685 - DNA, 1695 bp, Pasteurella multocida
atgatgggtagccaattacaaggatttttcacacaattatttcacttagcgcgcattttttggggtgataaaaagaactggtcatcttggattattttagcgactgtcattgcgattggtgtctttattgtttccttaaatgtcatgatcaatgattggagcaaacatttttatgacaccttagcagaattaaacgtccagcttattttgcctcttattcaagaatatttaatttatgtcgcactctatattttagtcagcgtttatcggagctggttacgtaagctgttgattattcgctggcgccaagccatgacagaacactttgtcgaacgttggtttagtaaaaagattttttataaattggcacaagaaaataaaatggataatcccgatcaacgtatcgcagaagatattcacttatttgccaaatacagtctagagctcaccgtatcctttgtcctcaatttcgtccaattaggttcttttttaatgatcctgtggaatctctccggctccccaacattcaacttatttggatatgatattgttatcaaaggttacttagtatgggttgccattatttatgcgtttttagggagtgttgttacccatttaattggtcgtaagcttcatccactcaattatagtcaacaagtttacgaagccactttccgtggaaatttagtacgtcgtcatgaacatgccgagcaaattgcgttatatggtggagagcaaacagaaaaacgtaaattggctgatgagtttgcgcatattgtcaaaaattggcgagcgattatggataaagaacgtaatcttggtttctttacagtaggctactctcgctttagctcaatgttacctgtcctttgtgcaattcccttactgttgcttaaaattattacttttggtggcttaatgcagatccgcagtgcttttggtactgtattaagttcattaagttggtttatttatgcttataccattttacccgagtggtctgccaccatttcacgtttagcgcaatttaaccgagaaattgaacaattcgaaaaatcctactgcacaccacagtcaccaaaaaaagcgatgatctcagttgaaaacctttcactgtttacatctgatcatcagctgctcttaaaaaatatccagttttctgtacaagaaaaagaatggctacatttaaaaggacaaagtggtttaggaaaatccagtttattacgcacgttatgtggtatttggcaatattattcgggacaatatcaaatatgcctgaaaaatcatttatttattccacaaaaaacttatttaaatgaaggtaatctcgccgaattattacgttatccaaatcaacatcactattcaccacaagaacttaatcaagtgcttaaccttgtgggcttagagaaatggcagaatcgcttagaggaagtattaccttggcatattgttttatcacatggtgagcaacaacgcttagcctttgcacgtattcttctcactaaaccccaactcttatgcttagatgaggcgacttcaaatttagatgaaacctctgccctcttattaatgcaattaattcgtgagcaattaccaaataccactgtgatttttacttcacatcaaaccaaaataagtcaattggctgatcgagaagtggatttaaatagttatttaccagaacagaactaa

SEQ ID NO: 30686 - DNA, 1350 bp, Pasteurella multocida
atgtctcaagttgcaacattagatgcgtttttagaaagagtcgcacaacgcgacggtacgcaacctgaatttttacaggcagtacgtgaagtatttacctctatctggccttttttagaagctaacccaaaatatcgttcacaagccctactcgaacgcttagttgaacctgaacgtgttattcagttccgcgtagcatggacagatgatcaaggtcaaacccaagttaaccgtgcattccgcgtgcaatacaacagtgcaatcggtcctttcaaaggaggaatgcgcttccatccttctgttaatctttccattttaaaattcttaggttttgaacaaatcttcaaaaacgcgttaaccacattaccaatggggggcggcaaaggcggttccgattttgatcctaaaggaaaatctgacggtgaagtcatgcgtttctgccaagctttaatggcagaattataccgtcatgttggcgccgataccgatgtgcctgcgggtgatattggtgtaggaggacgtgaagtcggctatctagcaggttatatgaaaaaattatctaaccaagccgcttgcgtgtttaccggtcgtggcttgtcattcggtggcagtttaattcgcccagaagcaaccggttatggtctagtctatttcgcccaagcgatgctcgctgaaaaagggcaaagctttgccggtaaaacggtgtctgtttcaggttcgggtaacgtggcgcaatatgccattgaaaaagcgctgcaattgggggcaaaagtcgtaacttgttctgactcatctggttatgtttatgatgaagccggtttcacaacagaaaaattggctgcattaatggaattgaaaaacgaaaaacgcggtcgtgtggaagaatacgcgaaacaattcggtttaaaatacgtagcaggcaaaacgccttgggaagtcaaagttgatattgcactgccttgtgcgacacaaaacgaattagacttagcgtctgctaataccttaattgccaatggcgtacaattagtggctgaaggggctaacatgccaactactattgaagcaacagatgcctttttagacgcgggcgtgctctttggtccgggtaaagcggcgaatgctggcggtgtagcaacctcaggactagaaatgacgcaaagttcacaacgtttatactggtctgcggaagaagtcgataaaaaactccacagtatcatgttagatattcacgcgaactgtaaaaaatacggcacgattgaaggtcaagccaacattaattatgtcgttggtgcaaacgttgcgggatttgtcaaagtcgccgatgcgatgttagcgcaaggtgtttactaa

SEQ ID NO: 30687 - DNA, 1419 bp, Pasteurella multocida
atggtgtttccttggcaacaaatcatgcgttctgaagagaaccgctatactgcgattcaaagtcgcggtaagttggtggtgggaacaattaataatccgatttcttattttattgatcatgcaggacaagcggcgggacttgagtatgagttgagtaaggcgtttgctgactatcttaatgtggatctcgaaattctcgcgatgtcaaatggtgatgaactctttagtgcgctgaaaaataataaaattgatattgcggcagcgaatttgttgtatcaaccgaataaattagatatgttccaagtaggtcccacttataattcggcttcgtggcagttagtgtaccgtaagggaacagaacgtccacgtagtctaggggaattgaaaggcagtttaagtattgcctctggatcagagctcacggaattattaaaagtagaaaaagaaaaataccctgacttaatctggcgtgtaaatgaaaaacttactccggaagaactgctgattcaaatggcagatggcaaaattgactatgtgatcgcgaattctattgatgtgtctgcggtgcaacaaattaagccaaatgtagcggtcgcgtttgatgtgacggatgaatcgacggtgcattggtatttaccaagtaattcgtatagtgaattgcaagcctcattattagattttatgaatagcgctattgaaacaggcttgattgcgcgtattgaagaaaaatattttaatcatttagcgcaatttgactatgttgatacccgtagctatctacgggcaatagaaacggttttaccgaaatttgccccgctctttgaaaaatataaaggcgatcttgattggtgtttattggcggcaattgcttatcaagagtcccattggaatcctgatgcaacctcaccgaccggggtacgaggtatgatgatgttaacgaaagccacagcagagcggatgcgaattcaagacagaacggatccggaacaaagtattaaagccggttcagaatatttacattggcttattacgcaaatgcctgatacgattaaagaagatgagcgtatttggtttgccttagcggcgtataatatgggattagggcatttgttagatgcgcgccgtttaaccaagagcctaggtggtgatcccgataattggttagatgtgaagaagaatttgccactattagcagaaaaacgctattacacggggttaaaatacgggtatgcgcgaggctatgaagcatatcactatgtggaaaatatccgtcgttatatgaacagcattgtgcattattatcgggtacagcaagcacaaattgaagaaacattagatacacaggccgccgaaatagaaaacatcaacgaaatcaagaaagaaacggatacgttagcgacaaccgtaacgacacaataa

SEQ ID NO: 30688 - DNA, 921 bp, Pasteurella multocida
atgaacgaaataaagacggcagataacgccaaaacttactgtggctttattgctattgtaggtcgtcctaatgtagggaaatccacccttttgaataaaatcttggggcaaaaaatttcaattacctcacgcaaagcgcagacaacccgtcatcgcattgtaggtattcacactgacggtccttatcaagcagtgtatgttgatacaccgggcttacatattgaagaaaaacgcgcgattaatcgtttaatgaaccgtgcagcaagcagtgcaattggtgatgtggatctgattatctttgtggtagatggtacgcattggaatgaagatgatgaaatggtgctcaataaattgcgtgcggcgaaagcccccgtggtgctcgcaattaataaaattgacaacatcaaaaacaaagaagagatgctaccatttattaccgagctgaccagtaaatttgactttgcccacgtagtcccaatttcggcacaagggggcaaaaatatcgcagaattagaaaaaattgtgcgtgaatctttacatgaaggtacgcatcatttccctgaagaatacgtgactgatcgttcacaacgctttatggcctccgaaatcatccgtgaaaaactcatgcgttttaccggtgatgaattaccttattctgttaccgtagaaattgaacaatttaaattgaacgaacgcggcacttacgaaatcaatggattaattctagttgaacgtgaaggtcagaaaaaaatggtgatcggcaataaagggcaaaaaatcaaacaaattggtattgaagcgcgtgctgatatggaacgcttgtttgataataaagtccaccttgagctgtgggtgaaagtcaaatcaggttgggcggatgatgaacgcgccttacgtagtttaggttatatggacgaataa

SEQ ID NO: 30689 - DNA, 1023 bp, Pasteurella multocida
atgtctaacttcttcctcattctattgttagtagcaggattcggtgtctggaaagtattagattattttgccttacctaacacgttttccatcttgcttattctcttgaccgtcatttctggcgccttgtggtgctattaccgttttacggtccaaccacggcgcgcaagacaaattgcgcgtgcagaacaacgttctggcaaagcactcagcgatgaagaaaaggctaaaattgaacccatctcagaaggcggagagtttttatcttcactgtttccggttctcgcctttgtgttaattttacgttcctttttgtttgaaccctttcaaattccatcttcatcaatggaaccaacattgcgtattggtgactttttggtagtaaaaaaatacgcatacgggattaaagatcctgtgttccaaaacacgataattgaaactggcaaacctgaacgtggcgatattattgtgtttaaagccccgttacaacctagcgtagattatattaaacgtgttgtcggcgcaccgggcgataaagtgcaatacaacgaatacacgcgtcaattaactttaacctatgcgaaagacggtcaagaatgtcacagtgactgtgaaacaaaaatctttagctatactgagcctaaagaaaatcccgactttcagtttctgattggacgtgatcataaaggtgaatatctatatggtccttcgccgttagaaaccaccgaaacaggcgatgtgtctcaccaaattcactggtatcctgaaccaatttcagaaggttttcgttataaagcctaccgttcacaaagcaattatgtgacagaatgggtcgtaccagaagggcattattttgtgatgggcgacaatcgtaataacagtgaagacagccgtttttggggctttgtcccagagaaaaacattgtggggaaagccacatatatttggttgagtttagataaaaaacaagatcaatggccaacaggcgtccgttttgaacgcttttttacagaaattaagtaa

SEQ ID NO: 30690 - DNA, 966 bp, Pasteurella multocida
atgataaaaaaaatagcagtattaaccagtggtggtgacgcaccgggcatgaatgccgccattcgcggcgtggttcgttcagcacttgcggcaggattagaagtatacggtatttatgaaggctattatgggttatatcataataaagtgaaacaaatgacccgttatagtgtttccgacattattaaccgcggcggtacttttttaggatcggcgcgttttcctgaatttaaagatcctgcggttcgcgctaaatgtgctgaaattttacgttcccatggtattgatgcacttgtggtgattggtggggacggttcttacatgggggcaaaattactgacggaagaacatggtttcccttgcgtcggtatcccgggtacgattgataatgatgtggcagggacagactacaccatcggttatcaaaccgcattacagacagccgtcgaagccattgaccgtttacgcgatacctcaagctcgcaccaacgtatttcgattgttgaaatcatgggacgtcattgtagtgatttagctatttcagcgggtattgctggtggttgtgagtatattgtggcatcggaagtagaatttaaccgtgaagagttaattcaacagattgagcgcagtattatcaaaggtaaacgtcatgccattattgcaattactgagttaatttgtgatgtgaatgaattagcccgtgaaattgaatcgcgtgtgaaacatgaaacccgtgctaccattttaggtcatattcaacgtggcggtacgccttgcgcatttgaccgtattttaggttcacgtatgggcgtttatgcggttgatttattaatgcaaggtaaaggtggctattgcgttggtattcaaaatgaacaattagttcaccacgatattattgatgcaatcaacaatatgcgccgtgaatttaaagcggattggttagcattatcgaaacgtttagactaa

SEQ ID NO: 30691 - DNA, 1056 bp, Pasteurella multocida
atgtcaacactattgatcgatttacaaggtcaagaacttagccaagaagaagtcgagctgttatcacatcctttagtagcagggctcattttatttacacggaatttccatgatcgcgcccaaatgcaagcgctgatccaatcgattcgtcaacgcgtcaagaagccgttgttgattacggtggatcaagaaggtgggcgagttcagcgttttcgtgaaggtttcacccaacttcctgctatgcaagcctttgcctgtttaattgatgatcctgtacaacaaacaaacatggcacagcaagctgggtggcaaatggcagcagaaatgaccgcacttggtattgatctcagctttgcgcctgttttagatttaggacatcaatgtcaagccattggcgaccgcagttttcattcacaagcagaaatgacactcaaccttgccagcgcctttattgacggtatgcatcaagtgggaatggccgccacgggtaagcattttccgggtcatggtcatgtgattgcagattcacatttagaaacgccttatgatgaacgtccaaaacaacagatctttgcgcaagatattcagccattccagcagttgattcaacaaaatatgctcaatgccatcatgcctgcacatgtgatttatagccaatgcgatcctcaacctgcgagtggttctgcatattggttaaaacaggtactacgccaacaacttggctttaacggtgctattttctctgatgatctcggtatgaaaggcgcgggctttatggggaattttgtgcaacgttgtgagcaatctttgcaggcgggttgtgatttactgttactgtgtaatgaaagagaaggcgttatccaagtgttagataatttaaaactttctgaaacagagccgcactttgccctacgtcaacagcgtttacagcagcttttcaaacgtaaaactattcgttggtctgaattggaagccacttcacgttggttggaaaatcgcaaaatattgaccgcacttcaacaacgctggcttgataacaaagccaacaaacattaa

SEQ ID NO: 30692 - DNA, 852 bp, Pasteurella multocida
atgaaacactatttagaactttgccaacgtatcgttgatgaaggtgtttgggttgaaaatgcacggactggcaaacgttgtctgaccgtgattgatgcggatctcacctacgatgttgccaataaccaatttccgttgatcaccacacgcaaaagctattggaaagcggcaattgcagaatttttaggttatatccgtggctatgacaatgcggcagatttccgcaaactcggcaccaaaacctgggatgccaatgctaatgaaaacagtgcatggctcaataatccgcaccgcaaaggcaccgatgatatgggacgtgtttatggcgtacaagggcgtgcatggcgcaaaccgaacggtgaaaccgtcgatcaattgcgcaaaatcgtcaataatctgcgcaacggcattgatgaccgtggtgaaatcatgaccttcttcaaccccggtgaatttgaactgggttgcctacgtccttgcatgcacacccacaccttctcattactcggtgataccctctatctcaccagttatcagcgttcttgtgatgtgccgcttggcttgaatttcaaccaaattcaagtgttcacctttcttgccttgatggcacaaattacgggcaaaaaagcgggtaaggcgtaccacaaaatcatcaatgcacacatttatgaagatcaacttgatctcatgaaaaatgtgcaattaaaacgtgaccccttcccgttgccacaattacacattaaccccgagattaaaactctcgaagatttagaaacttgggtgactatggatgattttaaggtcacgggctatcaatgccacgatgccattaaatatcctttctctgtgtaa

SEQ ID NO: 30693 - DNA, 894 bp, Pasteurella multocida
atgaaagattccgcgttaattgagctttttctaaatgaaatttggatcgaaaagcaactctcgcaaaatacgattgcctcttatcgcttagatttgactgcactcattcaatggctagaaaaacaacaattaacgcttatcaatctggatgccatcgacttacaaacatttctaggtgaacgcttaaaccaaggctacaaagccaccagcacagctcgcctactcagtgcgatgcgaaaattatttcaatacttataccgcgaaaaataccgcacagatgatcccagtgcggtattaagttctcccaaattacctagccgcttgcctaaatacctaacggaacaacaagttactgatttactgaactctcctgatgtcgatatccccttagaattacgcgataaagccatgatggaattgctttatgcaacaggattacgggtcactgaattagtgtcgttgactattgaaaacataaatattaatcaggggattgtacgggttgttggtaaaggaaacaaagaacggattgttcccattggggaagaagcaacttattggattcgtcaatttatgctatatgggcgtccttttttattgcatggacaaagctcagatgtcgtcttcccaagtaaaagagcgctacaaatgacacgccaaaccttttggcaccgtattaaacattatgcgcttttgagtgacattgatatcaatagcttatcgccccatgtactgcgtcacgcttttgctacacatttagtaaatcatggtgcggatttgcgtgtagtacaaatgttactcggacacagcgatttatccacaacacaaatttatactcacgttgctaaagagcgtttaaaacatttacatgaacgctaccatccaaggggctaa

SEQ ID NO: 30694 - DNA, 1167 bp, Pasteurella multocida
gtggattcagaaaaacacactccagaaaatcaacacaatccagaacaaagcgaactggatttagaatttagccaagtcgagccaattacgcccaaaaaaatggctaaaccgacgccctctttttttgatagcgtaaaaggtgtttttgctaaaaaaacatcacatgacgcggcattaaagacaacgcgtcaagcccctgcatttaatgaagccacctcttcatcaaatacacaaactgatttaaatgccgatgaactgactagcgaacagccaacctcagaagatatgggcgctgctgttgttgcgtcagcagtaaactggaaaaacccagaaacttggccattcctacaaattctgccacaacgtcatcgccgtttatttgtcgcgttatttggtctgattttattattaattattttctttgccctcaagccaagttcacaaacggtccaatcgtttgagcaacaaaacagtcaagccgtgcctattcaatttcagccgttagaaaaaggtcaaactgttgaaaatacgattttagataacttaaatcagcctgcagacaacagcgcaagtgcaacacaagataataccgtgacaagcgcggtcacctcagaaactcaacccacatcgtctgccagtgggacagagagcacgccaacggcaatagcacctacaaaagtggaacaaccggtggcacctaaaatgggggcggctgacgcagacaaaccaagcgctgtagaaaaagtcgtgaatgaaaaagtcacgaatgaaaaagtagtgactgaaaaacctaaaacagtagaaaaacctaaagcggtagaaaaagccaaagtcccagaaaaaccaacgcatattgaaaaagcgaaggtggagaaaaaagtcgctcccgttgtggacgctaacccagcgaaagcaagtaatagcaaaaccttaacgattccacagggtgtcagcttaatgcaagtattccgtaaccataatttaaatattgcggatgtcaatgcgatgacaaaagcgtcaggggcaggtaacgcactgagtaacttcaaagctggcgataaagtgcaaatttccgtgaatagtcaagggcgagttaacgagctccgtttagaaaatggtgctaaatttattcgccaagccgatggcagttatatttataaaaaataa

SEQ ID NO: 30695 - DNA, 1533 bp, Pasteurella multocida
atgacaacgcctgtagtggctcttgttggtcgcccaaatgtgggaaaatcaacattatttaatcgtctaacccgtacgcgtgatgcgttggtggcggattttcccggcttaacgcgtgaccgtaaatatggtcaagccaatatcgcaggttatgattttattgtgatcgatactggtggtattgatggtacagaagaaggcgtggaagaaaaaatggcagagcaatccttgcttgcgattgaagaagccgatgtggtgctgtttttagtagatgcccgtgcaggcttaacctctgcggatattggtatcgcaaactatttacgccaacgccaaaacaaaatcacggtagtcgttgccaataaaaccgatggcattgatgcagattcccattgcgccgagttctatcaattaggtttaggtgaagtcgaacaaattgctgcctcgcaaggtcgtggcgtttctgccttaatggaacaagtactggcgccaattgcagaaaaaatgaatgccgaaagtcccgaacaaagtgcggtagaaaataccgatgtttctgaaaccggcgaacaagacgagtgggatcacgacttcgactttgctaatgaagaagataccgccttgttagatgacgccattgcggaagaactggaagcacaagataaaaatattaaaattgctatcgttggtcgcccaaatgtgggtaaatcgaccttaacaaaccgtattcttggcgaagatcgcgtggtcgtgtacgacttaccggggacaacgcgtgacagtatttatatcccgatggaacgcgatggtcagcattacaccatcattgacactgcaggggtacgtaaacggggtaaagtccatttagcagtggaaaaattttcggtcatcaaaaccttacaagcgattcaagatgccaatgtggtgttattaactattgatgcgcgtgaaggcgtgtcagatcaagacttatctttactgggttttatactcaatgcagggcgttcattggtcatcgtagtgaataaatgggatggtttaaatcaagacattaaagatcaagtcaaatctgaacttgatcgtcgtttagattttattgattttgcccgtgtgcactttatttccgctttacatggcagtggcgtgggcaacttatttgattccattcaagaagcctatgcttgtgcgacacaaaaaatgaccacatccatgttaacccgtattttacaaatggcaacggatgagcatcagccgccgatgatgggcggtcgtcgaattaaattaaaatacgcacacccgggcggttataatccacccattattgtggtgcatggtaaccaaatggataaattacccgattcgtataaacgttatttatccaattactatcgtcgtagtttgaaaattattggttcgccaatccgcttattattccaagaaggaaataacccatttgcaggtaaacggaataaattgacaccaaatcaattacgcaaacgcaaacgcttaatgaagtttattaaaaaatcgaagcgttaa

SEQ ID NO: 30696 - DNA, 702 bp, Pasteurella multocida
atgacaatcgaacaaaatttagcacaaattcaacaaaatattcagcacgcggtccaacaagccaagcgcccagaaagtgcggtcaaattactcgctgtttcaaaaaccaaacccgttgaagatatctatcaagcctatcaagctggacaaaccgcgtttggcgaaaactatgtacaagaaggcgtggaaaaaattcagtattttgcccaaaaaaatatccctcttgaatggcatttcatcggtccgcttcaatcaaataaaaccaaactcgtggcagaacattttgactggatgcaaacgctcgaccgcaaaaaaatcgccgaccgtcttaacgagcaacgcccacattataaaaaaccactgaatgtattaatccaaattaacatcagcgatgaagacagcaaatctggcattcaacccaacgaaatgcttgatctagcaaaacagatccaaaacctaccgcacttatgcctccgcggcttaatggctatccccgcccccaccgacgatcttgccacacaagaacaagcattcacccaaatgcacagcttatttgaacaactcaaacaagccttacccgatgcacaaattgatacgctttcaatggggatgactgatgatatggcgagcgccattcaatgtggttcaacaatggtaagaattgggacagcgatttttggggcgagggattattcgaaataa

SEQ ID NO: 30697 - DNA, 2448 bp, Pasteurella multocida
atgcgtgtactaaaattcggggggacgtctttagccaatccagagcgtttttcgcaggcggcacagcttatcgaaaaagcccattttgaagaacaagccgctggcgtgttatcagcccctgcaaaaattaccaaccatcttgtcgccctttctgaaaaagccagtttaaatcaacctaccgatgccaatttcaatgaagctattgagattttttatcacattattcatggtttacacgcagaaaataatcgttttgatctagaagggacaaaagctttaattgataccgagtttgcacaaatcagccagttgttggaagaaattcgtcaacaaggttttgtgtcggatgcggttaaagccacgattgattgtcgtggtgaaaaactgtctattgcgatgatgaaggcatggtttgaagctcgcggttatgacgtgactgtgattgatccagtcgaaaaattattagcacacgggagctatttagagtcttcagtggatattgaagaatcgacaaaacgcgtagatgccaagtcaattccaaccaaaaatgtagtgttaatggcaggctttaccgcaggtaatgaaaaaggtgagctcgttttactcgggcgtaatggttccgattattctgctgcttgtttagccgcttgtttgggcgcaagtgcttgtgaaatttggaccgatgtagatggggtctttacctgtgatccgcgtttggtaccagatgctcgcttattgccaagcttgtcttatcgcgaagcgatggaattgtcttatttcggtgcaaaagtgattcatccacgcacgattggaccattagtacaaactaatattccttgcttaattaaaaatacgggcaatccttctgcaccgggttcgattattgatggcaacattcaatctgaacagttgcaagtaaaagggattactaatttagataatgtggcgatgtttaacgtgtctggtcctgggatgcaggggatggtgggcatggcgtcacgtgttttctctgccatgtcaaatgcaggcgtttcggtgattttaattacgcaatcttcctcggaatacagtatcagtttctgtgtaccagccaaatcagttgaggtagcaaaacaggcgttagagaaagaatttgagcaagaattaaaagctaatgatcttgaaccaattgatgtaattcgtgacttatccattatttcggtagtgggtgatggcatgaaacaagccaaagggattgccgcacgtttcttctcagcccttgcccaagcgaacatcagtattgttgctattgcacagggttcctctgagcgttcaatttctgccgtggttgcactgaataaagcaattgaagccgtgaaagccacacaccaagctctctttaataataaaaaggtcgttgatgtttttttagttggggtagggggtgtcggtggcgagttgattgagcaaattaaacatcagaaaagttatctagccaagaaagatattgaaattcgggtgtgtgcgattgccaattcaaacaaaatgttattaaaagcagatggcttaaatttagaaaattggcaagcagatttggaaaccgcgactcaaccttctgattttgatgtgttactgtcctttattaaattgcaccatgtcgtgaatccggtatttgtggattgtacgtcagcggattctgtagctggtttatatgtgcgtgcactgggagaagggttccatgttgtgacaccaaataaaaaagccaatacgcgtgaactggcgtattataatgcactgcgtgaaagtgcccgtaataaccaacgtaaattcttgtatgatacaaacgttggcgcagggttacccgtcattgaaaacttgcagaatttattggctgcgggtgatgaagtcgtcaagtttagtggcgtactctcggggtcgttgtcctttatctttggcgagttagaaaacggactcacgttatctgaagcgactgctcttgcgcgtgaaaaagggtttactgaacctgatccaagagatgatctttctggacaagatgttgccaggaaactgttgattttagcgcgtgaaaccggtgcacaattggaattaacagatattgaggtagaaagtgtgctcccagcgggatttgctgaagggaagaccacacaggaatttatggcgatgttaccacaattagacgcagaatttagccaacgtgttgctaacgcgaaagcagaagggaaagtattgcgttatgtgggacaaattgaaaacaacagttgtaaagtctctgtgttggaagtcgatgcagatgatccattatataaagtaaaaaatggtgaaaatgcgttagccttctatactcgttattatcaaccgattccgttacttttacgtggttatggcgcgggaaattccgtaactgcagcggggatttttgccgatatattgagaacgctacaacattaa

SEQ ID NO: 30698 - DNA, 945 bp, Pasteurella multocida
atgctcagaatttatgcaccagcatccagtgcaaatttaagtgttgggtttgataccttggggaccgcggtgtccccgattgatggttctttgctgggagatgtggtgcaaattgaggcactgcctagcggatttgaactagaaagtgcgggatattttgtgcgtaaattgccaaaagaagcgcagaaaaatattgtctatcaagcttatgtgttatttagtgaacgtttaaaattgcgtaacatagctgtacgcccattgcgattaacgttagaaaaaaatatgccaattggttctggcttggggtcgagtgcgtgttctatcgtagcggcgttggttgcactcaataagtttcatgctgaacctttttctaaaatggaactgttagaaatgatgggcgaactagaaggacgcatttcgggctcaatccattatgataatgtcgcaccttgttacttaggtggggtacaattgatggtgcaatctttaggtaatatttgccaacaattgcctttttttgatgagtggtattgggtgttggcttaccccggtatagaagtctccacggcagaagcccgtgcgattttaccgaaaagctatacgcgtcaagatgtgatttcacaagcgcgtcatttaggcagttttgtacatgcgtgtcatactcgacaagcgcagcttgctgcgttaatgatgaaggacgtgattgcggaaccttatcgtgaagccttgttacctaattttgctgacgtgaaacaagccacacgagatttaggggcactagcaacggggatctcgggttcaggaccaacaatattcgcgattgcgcctgatttaggcacagcgatgaagttatccacttatttagaaaaccattatttacaaaacaatgaagggtttgtgcatatttgtaaagttgataatcaaggtgcgagagcgctcgattaa

SEQ ID NO: 30699 - DNA, 1275 bp, Pasteurella multocida
atgaatttatacaacattaaacatccagaagaacaagtcaattttgcgcaagcggtacgtcaaggattaggcaaaaaccaagggttattttttccagaaaccctaccgcactttgaggatatggatgcgctgttagcgttaccattggtggagcgtagccagaagattttatctgcgttaattggtgaggaaatttcgccaacccagttagcaaaaatggtagaaaatgcctttactttcccagcacctgtagcaaaagtggaagagggggtttatgcattggagttatttcatggtccaaccttagccttcaaagactttggtggtcgttttatggcgcaagccttagctacagtacgtggtgagggcaaaattacgattttaacggcaacgtcaggggatactggagcggcggttgcccacgctttttatggtttagaaaacattgatgtggtgattttatatccacaaggcaaaatcagcccgctacaagaaaagttattctgtacgcttggtggcaatattcgtacgattgcaatcaacggggattttgatgattgtcaggcattagtgaaacaagcgtttgatgatgcagagttgcgtcaagcgattggcttaaactcagcaaattcgatcaatatcagccgtttattagcgcaggtttgttattactttgaggcggttgcgcaattaccaaaagcggcacgcgataatcttgtggtatcggtaccaagtggtaactttggtaacctgaccgcaggcttaattgccaagtctttaggcttgccaattaaacgttttgtagcgtcaaccaatgtgaatgataccgtaccgcgttatttacgcagtggcaattggcaaccgcatgacacggtggcgacgttatccaatgcaatggatgtgagtcgtccaaataactggccacgggttgaagagttatttaaacgcaatggttgggcgctatcagatttgcattctgatgccgtaaatgacaatgaaacggaacaaactttaaaagatatgtatgccaaagggtacttgtgtgaaccacatggtgcggtggcttatcgtgtgttaaaacaagatttacagccaggtgaaaccggcttattcctctgtacggctcatcctgcgaaatttaaagaaagtgttgaacgtattttagcgcttgaattacctttacccgatgcattagcaaaacacgcggctttaccgttgctttcggatatcatggaaaatgattttgctaaattacgtgcgtatttgttagcttaa

SEQ ID NO: 30700 - DNA, 1260 bp, Pasteurella multocida
atggagaacgtaatgtcattgaacggttcagatcaagatccttggggcaaacccggacagaaaaaacctgagagtcagcgtcctgataatgaaggcggtcagccgaattggaacgataaccagtcaggtcgtaagcaaaacaatcaagagcaatcaccacctgatattgaagagatttttaataatctgctgaaaaaattaggcggttcagggaatggcggtaaacgcaataactcgcattctggtggatcgttaaatcttggtaaattattgccaattgcagcggtgattggtgcaattgtctggggcgttagcggtttttatactgtcaaagaagcagaacgtggcgtggtgatgcgttttggtgaattacacgctatcgttcaaccgggtttaaactggaaaccgacttttattgaccgcgtgattccggtgaacgttgagcaagtgaaagagttaagaacacagggttcaatgttaacgcaagatgaaaacatggtgaaggtagaaatgacggtgcagtatcgtgttcatgatccagccaagtatttattcagtgtgactaatgcggatgatagcttaaatcaagccacagacagtgcattacgttatgtgattggtcatatgtcaatggatgatattttaaccacggggcgttcagtggtgcgtgaaaacacgtggaaaactttaaacacaattattgagccttataatatgggactcgaagtggtggacgtgaacttccaatctgcgcgcccaccagaagaagtgaaagatgcgttcgatgatgcgattaaagcgcaagaagatgaacagcgttatattcgtgaggcggaagcctatgcacgtgagcgtgagccaattgcgcgaggtgatgcacagcgtattctagaagaagcgactgcctataaagatcgtgtggtgttagatgccaaaggggaagtggaacgtttcgaacgtttgctgccagagtttaaagcggcaccggagttattacgtgaacgtttgtatattcaaaccatggaaaaagtgatggcgaatacaccaaaagtgatgttggatggcaatagtggaaacaatttgacggtgttgccattagagcaaattttgaagggacaacaaacgaaagggaagtcaacaaatgcgacctcagaggaagtgcgtccagtgttccgtgccgagacaccaaacgtgatgcctacacaaacatcaacatcgtcaacacgacaagaaaatactcgccaagggagatttaactaa

SEQ ID NO: 30701 - DNA, 543 bp, Pasteurella multocida
atggcaaaacgcggcaaaaataaaattgagtgggacaatactgactgggaacaagaagaagaggaaatcatttgggtcagtaaaagcgaaattaagcgcgatgccgaagcattaaaaaaactcggtgagaaactggttgacctcaccaaagcaaaattagaaaagattccgcttgaagagaagttacttgaggcaattgaacttgcacaacgtttacaaaaagaagcaagacgtcgccaattacaatatatcggcaaattacttcgcaatatcgatgttgagccgatccaagatgccttagaaaaactggaaaataaacatcaacagcaacaagcgatgttacataagctcgaaatgttacgtgataccttgattgacaaccctgaggcaatcacgcaatttcttgaacaacatcccgatgcggatcgccaacatttacgtaatctagttcgggcagcacaaaaagaaaaagcacaaaataaaccgcctaaagcttaccgtgaaattttccaatacttaaaagacttcatgcttgaagactaa

SEQ ID NO: 30702 - DNA, 723 bp, Pasteurella multocida
atgaaaaaattactgttaaccgcacttttagccagcacggcattagctgccaatgcaaaagagatcacctttgcgatggaaccaagttacccaccttttgagttaacgaatgaaaaaggggagattattggttttgatgtggatattgcgaatgcgatctgtaaagagatccaagcgacttgtcattttaaaggacaagcctttgatagtttaattactggtttacgttctaaacattttgatgcggcaatctctgcgattgatattaccgaagcgcgtgcgaaacaagtgagttttagcgatccttactatgacagctcttctagctttatttcagtgaaagggaaagtggacgatttagcccaagcgaaaaaagtgggtgtgcaaaatggtactacttatcagcaatatatcgtcgcagaagcgaaacagtatcaacctgtaccttatgctagtttacaaaatgcgattcttgacttaaaaaatgggcgtattgatgtgatttttggtgatactgcagtgttagtcgatatgcttgctaaagaacaaagtttagctttcgtcggtgacaaagtgacgaataaaaaatactttggtaacggttttggtattgcagtcaataaagcgagtaaagacttgttagatgacctaaataaaggattagccaccattaaagcaaatggtgaataccaaaaaatttatgataaatggatgacgaaataa

SEQ ID NO: 30703 - DNA, 672 bp, Pasteurella multocida
atgttttttgattatctttctttaatgtacaccgcaaccctaatgaccttagggttagcggtttgttcgttaattgttggtttaattttatccattatctttgtggtattagaaaccagcaagtggcaatggattcgtaaaccaacctccgtgtttgttacccttctacgtggcttaccggaaattttagtggttttactgatttactttggttcgaccgaagtcgtggaaatgctcaccggtgaatttattcaatttagtgcctttagttgtggtgtgtttgccctgtcaattatttttgcagcctatgcctcacagtctttgcggggagccattcaagccattccgttgggacaatgggagtcgggggcggctttagggttgagtcgtggttatacctttgtacagattattatgccgcaagtgtggcgtcatgctttgcccggattgagtaatcaatggttagtcttattgaaagatacggcattggtttcgttaattggtgtggaagatttaatgcgtcaagccgagttagtgaatacggtgactcatcagcctttcacttggtatggcattgcagcgttattgtatttgacaatcaccttaatcagccaatttattattcgcaagttagagttccgttttactcgttttgaaagaggcgtggaataa

SEQ ID NO: 30704 - DNA, 774 bp, Pasteurella multocida
atgagcttaaccgtagaacatttacaactggcgtatcaagataaaaccattgtctctaatctcaatttgcgcttgccgagtaacaaagtcattgcgttaattggaccgaatggctgcggaaaatccacgttattaaaagcgcttgcacgtttgctgaaacccaagtcaggtcaagtgaaacatcaagagcaagatatttggcagatcacggccaagtcttacgctaaaaccttagcgtttctaccacaacaacacctggtaccagaaggtattaaagtgcgtgagttagtagcttatgggcgttcaccgtatttaaatctttggggaaaactcagtgaaaaagatgaaaaaatagtaacacaagcaatgcagataacccagacagacgcattcgcagaacgactcgctactgatttatccggaggacaacagcaacgcgtttttttagcgatgacattagcacaagatgccaatattgtcttattagatgaacccacaacttatctcgatctcaaccatcaagctgaactgatgtcaatgatgcgacgcctacagcaacaaggtaaaacggtcattacggtcttgcatgatctgaaccaagcttgtcgctattgtgattatttagttgtacttaaacaaggggaattaattgcccaaggcacaccacacgaggtgatgaccgaacacttattaaaacaagtgtttgatctcaatgtagagattcatcaagatcctatcagtttcaccccaatgtttattttgaaagcgcattaa

SEQ ID NO: 30705 - DNA, 993 bp, Pasteurella multocida
atggcagccaatagcaaaccacttacacgctttaaaatacctttttatccaaccgcacttttgctgttgttgatactcttttgtttaagtttacagctaggcacctatcatctctctatcagtgaaatttggcagattttacatcaccctgaagacgccaatcactttacgttaatggaatatcgtttgccacgtgccttgctcgcgatcttaatgggcagtgccttagcagtttctggcgtattagtgcaaagtgtggtgagaaatcccctcgcctcgccagatattctcggtatcaacaacgcggcagggctagtcgcagtgattagcttgatttatttcccgggacttgctttttactggttacctatttttgcctttattggtggcattttgtcttttctgctactttggcttatttgtggtttacattttcgtccacttaaaatggcaattattggggtcgcgctgtctgccttatgggctgcagcaagccactatctaatgctatccaatccagttgatattaactccgcgatgttatggttaaccggcagcctatggggacggagttggtcttacttattggtggtgttaccttggttgcttgtgctactgcctttggcttttctgttctgtcgtgatctggataccttagcattaggcgaaaacaaagccgccactttaggggtatcccttcacaaaatgcagatcatcgtgttgctactttctgtggcgcttgccaccaccgcggttgcgatttgtggtccaatcgcatttctcggcttagtcgcaccgcactttgctcgccatttagtcggcggtcgtcatcgaaccttattgccagcggcattactgttaggggcaattttactgctgatttcagatattttagcccgcattattgctccccctgtggagattcccgctggggtcctcaccgcaattttaggggcaccatattttttctatttattaatgagaacgaaataa

SEQ ID NO: 30706 - DNA, 897 bp, Pasteurella multocida
atgaaaactgtcttaacctccactcttgccctgactttattgatggcaagccaattcgtttctgctgttaccgtcaaagatcaaaaaggggaatttaccttagatagcgtacctaaacgtgttgttgccttagaatattcttatgtggatgcacttgcacaaattggtgtcagccctgttggtgtcgcagatgacaatgataaaacccgtattctgcaaaaagtacgcgataaagtgcagccatgggaatcagtggggacgcgttctcaaccgagtttagaagcgatttctgcacttaaaccagatttgatcattgccgatgataatcgccattctgccgtctatgaagaactcaaaaaaatcgcgccgacagtcgtctttaattcccgccatgagaactatcaagaaaaccttgaaaccgcacaaaaaatcggtgatttattaggtaaatcaaaagaaatgcaagcgcgtattgcaaaacataagcaggatattgcggacatcgccaaaacgttaccgaaagggaaaaaagcgattatcggtgtttcacgtgaaacccaatttaatttatataatagcgaatcctatgctggtggcttagtggaagtgctaggttatcaaatgccaaaagcccgtgccgataaccaacctaatgcttcggttggtttagaacaagtggcggcagaaaagcctgatctgatgatcttaatccattatcgtgatgagagtattgcaagaaaatgggaaaatgaagccttatggaaaattatccctgcggtaaaaaatggtcaagtcatcttagctaatgataatttatgggcaagagcacgtggtattgatgccgctgaagtaatggctaaagaagtccaagactttgtaacgaaatccgccaaataa

SEQ ID NO: 30707 - DNA, 459 bp, Pasteurella multocida
atgtttcgtggcgcatcagcaattaacttggattcaaagggacgtattgcgatcccgactcgttatcgtgctgaaattattgaacaaaatgcagggcaaatggtctgcacagtcgatattcgccaaccttgtttgctactttatccgttaaaagaatgggaattagttgaacaaaaactttcagcactagcaaattttgatctcacacaccgtagccttcagcgcgttatgcttgggtatgccactgaatgtgaactggatagtgccggacggatattaattagcggacctttacgccttcacgctaaattagaaaaaagcctgatgcttgttgggcaactcaataaatttgaaatttggagcgatgcggaatggcatgctcaaattgaacaagatatggcgttgggtgcaagtggtcagtttgcactatctgaagaattaaaaatgctgtcattataa

SEQ ID NO: 30708 - DNA, 966 bp, Pasteurella multocida
atgaacgataaagatcatttttcatcacctgcgcatattactgtcttactcaatgaggcagtagcgggtttagccttgaaagaaaaaggtatctatatcgatggtacatttggacgaggtggacattctcgtttaatcctttcccgtttagccgataatgggcgtttgattgcgattgatcgcgatccacgtgctattgctgaagccaagacgattcaagatccccgttttcatattgaacatcgcagtttttctgacattcctcgcatttgtgaacgattaaatcttgttggtaaagtcgatgggattttattggatttaggtgtttcttctccccagttagatgaagcagaacgcggctttagctttatgaaagatggtccgcttgatatgcgtatggataccacacaaggtttatcggcaagtgagtggctgcaacaggtatcagaacaagatttagcttgggtgttaaaaacctttggggaagaacggtttgccaaacgcattgcacaagcgattgtgaattataacaaacaggcgttacaacatggcacggaaccattgagcagaaccttgcaattagcagagttgattgccaatgcggtgccttttaaagataaacataagcatcctgcgacacgaagttttcaggcgattcggatttttattaatgcagaattagatgaactcgagagcgtgttgaaatcagctgtacaagtgctcgcgccacaaggacgattagcaattatcagttttcattcgttagaagatcgcatggtgaaacactttatgcgtaagcaaagtaagggagaagatattcctaaaggtttgcctttacgtgatgatcagattcagcggacacaaactttaaaagtgattggtaaagcaattatgccaacagagcaagaacaacaacaaaatccgcgttctagaagtgcagtattacgtgtagcggagaagttgtga

SEQ ID NO: 30709 - DNA, 1806 bp, Pasteurella multocida
atggttaaatttaatacgacgaagaaaatcaaaaaagtcagattcgctaaaaatgacgcaattaagctaaataaacccaaaatggtttatgaaaatagctttttaaaatggcgttatttttcgtcattgctcatcattattggttgcttggtggtattaattggaaaggctgccagcgtgcaaatcatcaattcagatactttaactgatgaggcagataagcgttccttacgtattcaagaaattcaatcagttcgtggttcgattctcgatcggcatggtcaattactctctgtgagtgtaccaatgtattccatcgttgcggatcctaaagatatttttgacaaaaattctttccttgataaagagcgttggaaagccttggctgaagtgctcggcatttcatatcatgacatgattaaacggattgaaaaaaatccgaaatcacgcttcgtttatttatcacgtcaagtttctccaactgtggctgattatgtcagagagttaaaattaaaaggtgtggtgcttaaaaatgaagcacgccgtttttatcctcgtgtcgaagaagtcgcacatttaattggttataccaatattgatggggatgggattgaaggcattgaaaaaagctttaattcaatgttgatcggtaaatcgggttcgcgtacgtatcgtaaagataaatttggtaatatcgttgaaaatatcgcggatgtgaaaaaatacgatgcacaggatgtgacgttaagtattgatgaaaaattacaatccatggtttatcgcgaaattaaaaaagcagtggcggaaaataaagccgaatcaggtacggcagtattagtagatgtaagaacaggtgaagtgttagcgatggcgaatgccccgtcttataacccaaataatcgtgtcggagtcaaagctgatttcatgcgtaaccgagcgattacagatacctttgaaccgggctctactgtcaaaccgtttgtggtgcttgccgcccttcaacgtggtgcagccaaacgtaatgaagtaattaatactggacctttagtgttgaatggacatgaaattcgcgatgtggcaccacgtgatcaattaacattagatggcattttagagcattccagtaaccgaggggtgagccgtttagcattacgtatgccacccagcgcgttaatggaaacttatatgcatgcgggacttggtaaaccgacggatctggggttaattggtgaacaatctggcttacttaatgcgaaccgtaaacgttggtctgatattgaacgtgctaacgtggcttatggttacgggattaatgcgacaccattacaaattgcacgggcttacgtgacacttggtagttttggtatttatcgtccactttcgattaccaaagtggatcctcccgtaattggtcaacgcgtgtatccagaaaagattacccgtgaagtggtcaatatgatggaaaaagtggcgattaaaaataagaaagccatggtggaaggttaccgtgtcggcattaaaacggggacggcgaaaaaattagaaaatgggcgttatgtggataaatatatcgcttatactgccggcgtcgcacctatttctgatccacgttatgcgttaattgtcttaattaatgatccaaaagcgggacaatattatgggggcgctatttcagcaccggtgttctccagtattatgggctatgcgttacgtgtgaataatattccaccagatgcgatgccacaagataaaatggcaagacgcgttgtgcgtttgaatagtgataatggaacaacgacaaactaa

SEQ ID NO: 30710 - DNA, 1485 bp, Pasteurella multocida
atgcgaagattaaccgcacttttggggcaagttgaacttgccccaaatattgaattgacggaaatgattctagacagtcgggctgtaaagcaaggctgtctttttgttgcattacaggggcaccaagttgatggacgtcagtatattccgcaagccatcgccaagggggcaagtgcggtgttagctgaaacagaggatgcacagcagcatttgagcacgaaaatagaacaaggggtgccgatcatttcgttttatcaattaggctctcacctttctgcgttagcggggcttttttatgataatccgtcgcacaaattgaccttggttggggtgacgggcacgaatggcaaaactactatttcgcaattattagcgcaatggacaacattactggggcatcgcagtgctgtgatgggaacgattggcaatgggttgttggggcaagtgaaagaagcaaccaataccactggatctgcggtggaagttcaagcttctttagcggattttgttaagcgaggtgcagatttcgccgcgattgaggtttcatcacatggactagtgcagcaccgcgttgaagcgttagcctttgatgttgctatttttactaatctcagccgtgatcatttggattatcatcaaagtatggaaaattatgcgttggccaaaaaacgcttatttaccgaattgaattcccgacaccaaattattaatgcagacgatagcgtcggacaaacttggttacaggaacaacccaatgcagtagccgtcagctgtcagacagattttaaacctcatcaagctcgttggttgaaagcaactgcgattcagtttagtcagaaaggtgcacgaattcaatttgaatcaagttggggaaaaggcgaattacatagtgcgttgatagggcagtttaatgttagtaatttgctgttggtgtttgctaccttactttcattgggctatgacattgaaaaactcatgaagacggtgcctcaattaacgggggtatgtggtcggatggaaagattaagtgcatcaaaccaacctaccgcgattgtggattatgcccatacgccagatgcgttagagaaagctttgcaagcagcgcgattacattgtcaggggaaattgtggtgtgtgtttggttgtggtggtgatcgtgatcgtggtaaacgtcctattatggcgaaaattgcggagcaatttgctgatcacgtgattgtgacagatgataatccgcgtactgaatccgcggcgcaaattgtgcaagatattctggctggatttgaacatccgcaacacgttgaggtctgccacgctcgagatcaagcgattattcaggcattacaaaaagcagatagcgatgatgtcgtgctgattgcgggaaaagggcatgaagactatcaaattatcggcacacagaaacagcatttctctgatcaagaaaccgtacaacagtattttaaggtaaatcatcaccatgcttaa

SEQ ID NO: 30711 - DNA, 1383 bp, Pasteurella multocida
atgcttaaattaacaacaaaacaactggcaacgattttacaagccgaattggtgggcgaggcaaatgttgttgtagagaatatcagtacagatacgcgtcagcgtgttgccagttcactcttttttgccttaaaaggtgaacattttgatgcgcataattatttagataaagccgtcgcacaaggggcaaacgcccttgtggttgagcgtgcggatacgcaaatttcagtaccgcagttgatcgttaaggatacacgcattgcacttggtgaacttgccaaatgggtgaaacagcaagtgaatccacgcacgctagcgatgacaggatcatccggcaaaaccacagtaaaagaaatgaccgctagcattctacaaagtgcggtcggtgttgagcaggttttatttacacaaggtaattttaataatgatattggtgtgcctttaaccttattgcgtttaaccgagcaacatcaatttgcggtgattgaattaggcgcaaatcatcaaggtgaaatcgcttataccacggggttagtacaaccgaatgtggcattagtgaataatgtggctgctgctcatctagaaggctttggcagtcttgaaggtgtggcaacagccaaaggtgaaatttatcgtggtttacagccggatggtgtggcgattatcaataaagagcatgattatcgcagtacgtgggcgcaggatattggtgctcacagggtacaatatttcgcttatcaggataacacagccgatttttatgccgataatgttatatttcatgaagcgggatcgacttttgatttatgtacaccacaagggaaaaccacgattcatctcccttatttgggggaacataatgtcaaaaatgctttagctgcctctgcgttagccatgaatgtgggggcgaccttagcgcaaatcaaacaaggtttagaagttcgcacacaagtgaaagggcggttatatccagtacaaccttgtgacaatctcttattacttgatgatacttataatgccaatgtggattcattacaatcagcgattcgtgttctacaaaaatatgacgcatttcgaattttagttgttggagatatggcagaattaggcgaaaatagccaaatttgtcatcaacaggtggcggagtgtgcgaaagcggcgaaattagagagggtgtactcgtttggcagcgaaagtgcggtgatttctcaagcatgtttaggtaaacattttacggataaagcgttgttgtgccgtgaactaacgcaactgttgagtgaaaaattaaaagaaaaccaaaaaatcgttttattagcaaaaggatcacgtcgaatgcaaatggaggatgtgattaatactttaagggaaaactttgtatgttag

SEQ ID NO: 30712 - DNA, 1083 bp, Pasteurella multocida
atgttagtttggctcggtgagtttttacaacaatattacagcggatttaatgtgatctcttatatcacagtacgtgccattttagcgttattaaccgcacttttggtctcgttgtggattggtccgaaagtcattcgtcgtttacagctactcaaatttggtcaagaagttcgtcatgatggaccggaaagtcattttagtaaacgtggcacaccaactatgggcggtgtcatgattttatttgcgattactgtaagtactttattatgggcaaatttggcgaatccttacgtctggtttagcttgtttgtgttattaggttatggggcaattgggttcgtggatgattaccgtaagattacccgtaaaaataccgatggcttaattgcacgctggaaatatttctggttatctgtgattgcgcttgttgccgcctttggcatgtatgcgattggtaaagatacggatgcaacccgtttagtcgtgcctttctttaaagaaatcatgccacaattaggtttattctatattattctgacctactttgtgattgtggggaccagcaacgccgtcaacctcactgacggtttagatggattagcaattatgccgacggtcttagtcgcgggagcatttgcgttgattgcgtgggcaaccggtaacgtgaattttgcagaatatttacacattccttatatcaaatttagtgctgaattagtggtgttctgtacggcgattgtgggcgcagggcttggttttctctggtttaatacttatccggcgcaagttttcatgggcgatgttggctcattagccttagggggcgccttgggagtggttgcggtgttagtccgccaagaattcttattagtcattatgggcggggtatttgtggtcgagacactctccgttatcttacaggtggggtcttataaattacgtaaacagcgtatttttcgtatggcacccattcatcatcattttgagttaaaaggctggccagaaccacgcgtgatcgtccgcttttggattatttccttaatgctggtccttgttgggctcgttaccttaaaacttcgctaa

SEQ ID NO: 30713 - DNA, 1305 bp, Pasteurella multocida
atgcaaacgtcttataaaaataaaaaagttaccgtgattggtttggggaaaacagggctatcttgtgttgatttcctactggcaaaacaagcggatgtgcgtgtgattgatacgagaacgcagcctgctggggcggaacaattggcaaaaaatgtaccgttgcatactggcagtttaaaccaacaatggttactcgagagtgatctgattattattagtccaggattagcggtcaaaacaccagaaattcagactgcacttgcagcaggtattgaggtgattggcgatattgagctgttctgccgtgaagcgaaaaagccgattattgcgattacgggctcaaatggcaaaagcactgtgacatcacttgttgcgcacatggtaaatgcggcgggcttgaaggttggcatgggcggtaatattggtattcctgcactgtcgttattagaacaagcacatgatatgtatgtattggaattatccagtttccaactagaaacgacatacagcttaaaagccacttctgcaacggtgttaaatattagtgaagatcacatgaatcgctatgtggacttagaagactatcgccaagcaaaattaaaaatctatcatcatgcccaaactgcggtgattaatgcggaagatgcactaaccgcaatggacggattaaaaaatggagtaagctttggcgaagacaatgctgattattggttaaaaaccgaaaaagggcggtcatatttgatggcgaaagacgaacgggtgttggcttgtgatgagatgaaattagttggacgtcataactatatgaatgcactggcggccatcgcattagcacaggctgccggtattccattagagagtattcgtcgtgcattgcgtgagtttaacgggctagatcaccgtttccaattagctcattttgcccatggtgtacgctgggtgaatgattcaaaagccaccaatgtgggcagtactgttgccgcattaactggcttacagttaaacgggacattgcatttgttactcggtggtgatggtaaaggtgcggacttttcggaattagccagtttaattaatcaaccgaatattatttgctattgttttggtcaagatggcgaacaacttgcagcactctcgccaagaagtcaacgttttagcacaatggaagaagcgatcaacgccttacgcccaaccttgtcagcaggtgatatggttttactttctcctgcttgtgccagtttagatcagtttagcagtttcgaacaacgtggtgatgaatttacacgtttagcaaaattaagttag

SEQ ID NO: 30714 - DNA, 1191 bp, Pasteurella multocida
atgccatttttagataaagtaaagcagcaatatgaggattggacgcgtattacaccgagtaatttgttatacgatcgtgccttgctgttgctcttttttgttttacttttaattggcttattggccgtttcttctgcgtctattccagtgggaacccgcttatttaaagatccgttttacttcgccaagcgtgatgcgatttatgtatttctttcctgtgtgacctgttatctgtgtgtgcaagtgccaatggagaaatgggaacaatggcatgtccgcttatttgcttttgctatttttctgttgattctagtactcattcctggcattggcttatccgtaaatggggcgcgtcgttggattccgatggtgttatttaacttccagccagcagaatttgcgaaattggcgctgacgtgttttttagccagctattttacgcgtaaatatgatgaggtgagaagtcgtaaactcagtgcatttaaaccctttgcgttgatgggattgatgggactctttttattatcacagcctgatctcggcagtaccgtcgttctttttgtgattactttcggactattatttattgttggggctaacttttggcagtttgttgggttaatggcgtttggtggacttttgtttgtgtggttagttttatcttccgcttatcgtttaaaacgtttcacgggttttcttgatcctttcaaagatccctacggtaccggtttccaactctctaactctttaatggcatttgggcgtggtgaatgggtaggagaaggactcgggaattccattcaaaaattagaatatttacctgaagcgcatactgacttcgtgatggcagtagtgggcgaggagttcggttttttaggcattttagtgattgtgatattactcgggttgttaattttccgtgccatgaaaattgggcgggaatccttattattagaacaacgctttaaaggtttctttgcctttggtatcagcttttggattttcttccaaggttttgtcaatttagggatgtctctcggcttgttacctactaaaggtttaacctttccgctcatcagttatggtggctccagtttaattattatgtctatgaccattggcttgttactgcgaattgatcatgaaaatcgattaatgcgaattgggcaagcacgtttacgggatgattaa

SEQ ID NO: 30715 - DNA, 1065 bp, Pasteurella multocida
gtgagcgaacaaaagaaaagattattagtcatggcaggtgggactggagggcatgttttccctgcgattgcggtggcacaatatttacaacaacaagggtgggatatttgttggttagggacggcggatcgtatggaagcgcaattagtgccaaaacatcatatccctattcaatttatccaaatttcaggcttacgcggtaaagggataaaagctttactgagtgcgccttttagtatttttagagcaatattacaggcacgtaaaattattaaagcctatcaaccacatgctgtattaggcatggggggctatgtgtctggtccgggtggcattgcggcaaaattatgtggcatccctgtgattttacatgagcaaaatgcggtagcaggcttaaccaatagttggttagcaaaaattgccagacgagttttacaagcctttccaactgcgtttcccaatgcggaagtagttggtaatcccgtacgacaaacattattttctcaacctacgccagaacaacgttttgcagggcgagaagggaaattacgtgtactcgtggtaggcggtagtcagggcgcaagagtccttaatcaaacgttgcccaatgttgttgcacaattatccgacaaacttgaagttcgtcatcaagttgggcaaggtgccgttgagcaagtcacgacattgtatccagaacatgcttcggtcaccatcacggaatttattgataatatggcagacgcctatgcttgggcggatatcgtcatttgtcgttcaggggctttaaccgtaagtgaacttgctgcagtaggcgcagcagcgatttttgtgccatttcagcataaagatcaacaacagtatttaaatgcgaaatatttagcggatgccggtgcggcaaccattattccacaagcagaattgactgcggagaaattagtgagtgtattaacgcaattcgatcgtgaaaccttgcaacaaatggcaattaaagcaaaagccatggcaaccccactcgccgcacaacgtgtcgcggaagtgattatcgaagaagcgaatcaagattag

SEQ ID NO: 30716 - DNA, 1449 bp, Pasteurella multocida
atgatgaattcaaaatgtggtaaagcttttcagcaacgggtaagagatatgatcccggaaatgcgccgtgttcgtcagatccattttgttggtattggcggcgctggtatgggcggaattgcagaagtgttattaaatgaaggttattttgtcactggctcggatattatggaaagtgcggtcacggcacgcttgacgtccttaggtgccaagattgctttctcgcatgcggcagaaaatatcgacggggcaagtgtggttgtggtgtcaagtgcgataagagcagataatgttgaagtcgtcgcagcacaagaaagacgtattccggttattcagcgtgcacaaatgttggctgaaattatgcgttttcgtcatggtattgcggtggcgggtacacatggtaagacgacgactacagcaatgatttcaatgatttatgctgaagcgggtttggatccgactttcgtaaatggtggattagtgaagtctgcagggacaaatgcccatttaggttgtagtcgttacttaattgccgaagcggatgaaagtgatgcttcatttttacatttgcaacctatggtgtctgtagtcactaacattgaacccgatcatatggaaacgtatcacggcagttttgaagagatgaaacacacctatgtgaatttcttacataatttgccattttatggactggcggtgttgtgtgcggatgatgatgtattaactgaactgacacccaaagttggacgccaagtgattacctatggcttcagtgaaaaagcggattatcgcattgaagattatcagcaaacaggattccaagggcactacactgtcattacaccaagtggtgagcgcattgatgtgttgttgaatgtaccaggtcgccataatgcattgaatgccacggcggcgctagtggtagcgaaagaagaaggtattggtaatgaagcgattcttgcagccttagccgatttccaaggagcaggacgtcgatttgatcaacttggtcaatttattcgtccaaatggcaaggtgatgttagtcgatgattatggtcatcatccaacggaagtgggcgtgaccattcaagccgcacgccaaggttgggaaaataagcgtattgcgatgatttttcaaccgcatcgttattcaagaacacgtgacttatttgatgattttgtccaagtgctttcgcaagtggatgtcttaattatgttagatgtgtatgcggctggtgaaacgccgattgccggcgcagatagccgttctttgtgtcgttctattcgtaacttaggtaaggtcgatcctatttttgtctctgaccatcgtcagttaggagagattctagatcaagttttacaagatggggatttaattttggcacagggtgcgggtaatgtgagtaaaattgcgcgtcaattagcagaaacttggaccaaagaatag

SEQ ID NO: 30717 - DNA, 930 bp, Pasteurella multocida
atgaaaaaaacattaaaacaagaaaaaattgcagtgttattagggggcacttcagcagagcgtgaggtttctttggattcaggtcaggcggtgctcaatgcgttactgagtgctggctttgatgctcaccctatcgatccgaaaacttttcctgtagcgactttaaaggaacagggttttgatcgcgtttttaatattttacatggtcgtggcggtgaagatggcaccatgcagggactattagagcagattggtattccctatacggggtgtggcgtcatgacctcagcactgacaatggataaaatgcgaacaaaaatgctgtggaaagcttttggtttgccagttgctgagatggaaattgtgacaaaagccaatgtgggagaacttaatcctagtgctgttgtcgaaaagttaggcttacctgtaatggtgaaaccttcattagaaggctctagtgtagggttaaccaaagtaaaacgggtggaagatctgaaaagtgcggtcgattttgccttaaaatacgatgatacggtcttaattgaagagtggttatccggtgccgaatttacggttcctgtattagataatgaagtgctaccttctattcgtattgtgccagaaggtgaattttatgattatgaggcgaagtacatttcagataatacccaatatttttgtccatctggcttaagtgctgaacgtgaagatgaattaaaacaattggtgaaacaagcttatgatgtggtgggatgccgtggttggagccgtattgatgtgatgttagatggcaatgatgcgttccgtttagtggaagtgaatactaacccgggcatgacaagtcatagtttatttcctaaatccgctgcaacagtcgggtattcatttgagcaactggttgtgaagattttggagttgagtgctgaatga

SEQ ID NO: 30718 - DNA, 777 bp, Pasteurella multocida
atgaaaggcttaaaacgtaaaacaacacagggcgttaaaaaaagcaatgagaccaagatagggatgataaagaaccttaaattggcctttttgctatgttgtattgccgtgtttttttatgcttatgcaaactggcagcagcttatggataaacttgatagtaaacccattagtgcctttattttaacgggaacaccgacgtttaccacttacgatgatattcgtgatgtagtattgaaaatgggcgatttaaaaggtttttttggtcaagacattgatgccgtacgcgaacaaattgaaaccatgccttggataaaaggagcggtggtacgcaaaatatggccagataaactcagtattgctttagcggaacatacgccaattgcgatttggaatgacgctgaatttctctcaagcgatggggcgattttccaattaccttttgataaattaaaagaaaaaaatttaccgcacttgtcaggacccgattatcaaagtgcgaaagtattacaagcgtggaatcaagtgtatctcaatttaaaagagaaagggttagcgctaaaggcaatcgccattgatgatcgcggcgcatggcaaattgtacttgataataatcttgtattaaaattaggcagaggggaatggaaagcaaaattagatcgttttgtgaccatttacccacaaattgagatacctgaaaataaaaaattatcttatgtcgatttgcgatatagtgttggggcagcagtaggattttcagaggctgacataaattag

SEQ ID NO: 30719 - DNA, 1281 bp, Pasteurella multocida
atggcaaaaattgtggaatcaaaaattattgttggattagaggtggggacatctaaagtcgtggctttagtcggtgaacttttacctgatggcgtagtgaatattctaggagtaggcagttgtcctgctaaaggcattgataagggcaatattaccgatttaaatgcggttgtgacttcggtacaaagagcgattgaattagcagagtcggtggcagattgcgaaattattagtgttacgttagcgataactggtcaacatattcaaagttggaatgacagtggtgctgcgccgattgcagatacagaagtgacacaagaagatattgatgcggccttgcatacagcgagttcaatcaaaatgccagaaggattagtggtgttgcatcgtttgccacaagaatatgccgttgatcagcaaaaaaatattaaaaatccactgggtttccaaggtggtcgtttaacttctaatgtgcatttaattgcttgccaccaagattggctaaataacttacgtcaagcggttgaacgctgtaaactgaaaattgacaaagtgattttctctggaattgcaacaagccattcggtattaactgaagatgagaaagatttaggggtgtgcttgattgattttggtgcaggtactatggaagtgatggtgtataccaatggtgcattacgtttcagtaaagtcatcccttatgctggcaatcgtgtgactgatgatattgcgtatgatttaacaacctctcgtgttgaagctgagaatattaaagtcaaatacggtagtgcggtgacaccaccaagacaaaacccagaagaacaatttgatgtcatgagtattgatggcagtgtgattgagcgttgttcaaaaacacgtttatctaatgtcaccgcagggcgttatcgtgagattcttgaattagtcaaagaagaactcattcaacttaaatatgatttagaaagtaaacaaatgaaatttgagttaatcgcgggtattgttatcaccggcggtggcgcgcaaattaaagatttgaaagaatgtgcaacggatgtatttggtttgcatgtgcgtattggtaatccactcaatattactggggttactcatctcgtagagaaaaaaccgcaatattctacagtacttggcttattacagtatgaatatagtagcaatgatgaaagcccaattaatgatgcttatagtaatgaaagtggtttttttggttccctttggtctggaatgaaaaaaattgcaaagaaagtaggttcagagttttga

SEQ ID NO: 30720 - DNA, 1305 bp, Pasteurella multocida
atgtttgaaccagtagattatgatcttggtgaaatggacggagctctcattaaagttgtgggcgtcggtggtggtggcggtaacgctgttaaccacatggtagccaatatgattaaaaatgatattggtggaacacttttagatgaagcagtcatgaattcagatgaacatggcaaaattattttttatgctgtgaacacggatgcacaagctttacgtaaaagccaagttcagcaaaccgtccaaattggtggttcaacaacaaaaggtttaggtgcaggtgccaatccgaatgttggacgtaaagcggcagaagatgaccaagaagctattcgggcgatgcttgaaggggcagatatggtctttatcgcagcgggcatgggcggtggtacaggaaccggtgccgcgccaatcgttgcacaaattgctaaagaactgggtattttaactgttgctgtcgtcacaaaaccgttctcttttgaaggcaaaaaacggatgttatttgctgaaatggggattaaagaactttctaaacacgtcgattctctgattattattccaaatgaacaactggctaaagcgttacctaaaaatgcgacgttgcttcaagctttctctgcggctaatgatgtgttacgtaattctgtgactgggatttcggatatgattacctctccagggttaatcaacgtggactttgctgacgtgcgtacggtgatgtcagaaatgggacaagcgatgattggctttggttcttgtaaaggtacggctggcgaaggtcgtgctgaagaagcgacacgcattgcagtgaaaagtgatttattagaacgtgttgatttatccggcgctaaaggggtattagttaatatcacatcgggtatggatctcgggcttgatgaatttaatgtagtcggtaagaccgtcgctgagtttgcctcacaagaagccactgttgtaattggtaccacgctagtgcctgaaatggttgatgaaattcgtgtgaccattgttgcgacaggtattggcgatattgaagcgccagagatgccgatgccacatcgtcaacaacagcctattcaacacacggtcggtgagtcaagaccgttacaacccgcgaatttgagtggtcatccgactccaagttctggttatggggctcagcaagggcatgtaccaccacgaccaacagatttaaccaaaaccagtattttggatacgccaatcacagcgcgtacatcaaataacttgcaaaaagatgaaaatttgtttaatgtgcaaaatttcatccgcaatacagataaataa

SEQ ID NO: 30721 - DNA, 918 bp, Pasteurella multocida
atgattaagcaaagaacattaaaacagagcattaaagtcaccggcgtaggcttacatagtggtaataaagtaaccttgacgttacgtcccgctatggcaaatacgggtgtcatctactgtcgtacggatttaaatccgccagtgacgttcccggcaaatgccaatgctgtacgtgatacaatgctgtgtacttgtttagtgaatgaagaaggcgtgcgtatttcaacggttgaacatttgaatgccgcgttagctggattaggtattgataacgtgattattgaagtggatgcgccggaaattccaattatggatggtagcgccagtccgtttatttaccttttacttgatgcgggtattgaagagcaaaacgcagcgaaaaaatttattcgcatcaaacaaaaagttcgtgttgaggatggcgataaatgggcagagttcactccatataatggattccgcttagactttaccattgactttgagcaccctgcgattggtaaagatgtgcgtaattatgtgatggatttctccgcacaagcctttgttcaacaaattagccgcgcaagaacttttggctttatgaaagatattgaatatcttcaatcgcaaggtttagcgctaggtggcagtttagataatgcgattgtgttagacgattatcgtattttgaacgaagacggcttacgttttaaagatgaacttgtgcgtcataaaatgttagatgccattggtgatttatacatggcgggttataacattatcggtgactttaaagcctataaatccggtcatgggctaaataacaaattattgcgtgcggttttagctaatcaagaagcgtgggagtttgtgacatttgatgacaaacaagctgttccacatggttatgaagcgccaacacaagtgctgatttaa

SEQ ID NO: 30722 - DNA, 888 bp, Pasteurella multocida
atgaaaaaacttcaaaaactcacaacgttagcctcagcattgatgttaagtttggcagtcagtggcactgcactagctaaagaaaccattgctttggctgtttcaacgctcgataaccctttctttgtgacactcaaagacggtgcacagaaaaaagccgatgaactgggctataaattggttgttttagattcacaaaacgatccagcaaaagaattagcgaacgtagaagatttaactgttcgtggagtgaaagtccttttaatcaacccgactgattctgaagccgtggtcaatgctgtgaaaatggcaaatcgcaataaaattccggtcatcactttagaccgtggtgcagttgcgggagacgtcgtcagccatattgcgtctgataacgttgctggaggaaaaatggcgggcgattttatcgctgaaaaacttggcgcaggggcaaaggtcattcaacttgaaggcatcgcgggcacctcagcagcacgtgaacgcggagaaggctttaaacaagcgattgacgctcataaatttgatgtgcttgcaagccaacccgccgactttgaccgtaccaaagggcttaacgtaatggaaaacttgttagccagcaaaggggatgttaaagccgtctttgctcaaaatgacgagatggcattaggggcattacgtgctatcaatgcagccaataaaaaggtgttagtcgttggctttgacggtaccgatgatggtgtaaaagcagtacaaacaggtaaaatggccgcgaccattgctcaacaacctgatttaattggcgcattaggtgtggtaaccgcagataaagtcttgaaaggtgaaaaagtggaagccaaaattcctgttgatttaaaagtgatccataaataa

SEQ ID NO: 30723 - DNA, 969 bp, Pasteurella multocida
atgacaactcaagcaaaaccattccaattcggtaaattcttaattgaacaacgttccatcattgccttactggtgctgattgcgatcgtctcaatgatcaatcctgactttttcagtgtggataatattctcaatattttacgccaaacttcagtcaacgcaattattgccgtcgggatgacatttgtgatcttgattgccgggatcgatctttcggtcggttcggtacttgcattaacgggggctattgccgcctcgatggtcagtactgagttaccaatactgctcgtcattccagtcacactcttgattggtacattactgggcgggatcagcggtgttattgtcgcgaaagggaaagtacaagccttcattgctactctcgtaaccatgaccttattacgtggtgtgaccatggtttataccgatggacgcccaattagtacaggcttttcggaaggtgcggatacgttttcgctgttaggcacgggttatgtattcggtatccctgtcccaatttggattatggcatttgtctttgctgcctcttggtatgtattaaaacatacacgtattgggcgttatatttatgcacttggggggaatgaagccgccacccaattatctggcattaacgtcaataaaattaaaatctttgtttttgccgtcagtggcttcttatctgcccttgccggtctgattgtcacttcacgtttatcctctgctcaaccgactgccggtgtgtcatatgagcttgatgcgattgccgcggttgtagtcggcggaacaagcttaatgggcggaaaaggacgcgtcatgggcactttaattggcgcattgattattggtttcttaaataacgcgctgaatttactggatatttcctcttactatcaaatgattgcaaaagcattagttatcttagtcgcggttttagcggataactatttaggcaccaaaaaagtttaa

SEQ ID NO: 30724 - DNA, 420 bp, Pasteurella multocida
atgaaaaaaaccgccctattaaacgccccgttatcccaagtaatcgcgacattaggtcataccgatagcctcacgatttgtgatgcgggactgccgatccctaaacagatagaacgtgttgatttggctttaagtgcaggggtgccaagttttcttcaaacttttcatgcagtagtcacagaaatgtttgtagaaagagccatcattgccgaagaaatcaaagaaaaaaatccgaaaatactgaccgcacttttaaacagtttggctcaacttgagcaacaacaaggtaaccaaattgaggtgcaatatgtcagtcatgacatgttcaaaacgtacacgcatgcaagcaaagcaattgtacgtagtggcgaatgtagtccttatgccaatattattttgtattctggcgttccattttaa

SEQ ID NO: 30725 - DNA, 1413 bp, Pasteurella multocida
atgtcgaataaaaaaatcggtttattatccctcaccgccttagtgttaagctcgatgattggctcggggatttttagtttgccacaaaacatggcggaagtggcaggtgcacaagcactcgttattggttggatcattactggtattgggatcatctttttaggtctttcctttttctttatttcccgtttacgtcctgagttagacggcggcatctacacttatgctcgagaaggttttggcgatttagtcggttttctctctgcttggggttattggttgtgtgctactattggtagcgttggttacttagtggtcgcctttgagggaatcggtttatttaccgatagtcctaatcgtatcattttcgctcaaggcaatacgattttcgcctttctaggctcttctttagtggtttggttagtgcattggctgattacacgaggagtcaaagaagcagcatttttaaatctcttagcgacttttgtcaaagcttttccgttagtgttgtttattgtattagccgcttggtttttctcaccagaaacctttaaccatgatattcaagccacaaatttaaatcattccattactgatcaagtgaaaaacaccatgttgatcacgctctgggtattcgttggggttgaaggggcagcagtgttatccgctcacgccaaaaaacgcagtgatgtggggttagccacggtgttggggattgtgattgccttaattttatatgtggcgattaccgtattatctctggggatcttaccacgtgaaatgatcgccaatatgcccaatccatcgatggctggtctgctagaacacctgattggcagtagcggtaaaatcattatcaccgcctgtttaattgtctctgtgttagcgtcttacattagttggaccatgtattctgccgaagtcccttatcgtggcgcgcaaaacggggcgttcccgaaaatcttaaataagatcaacgaaaacgacacgccaattaactctctgtggttcactaacctcgtggtgcaattctgtctcgtgttggtattaatgacaggtaaaagctataacgcactgttgttaatttccacctctatgatcttagtgccatatttcctgattggtgcctacttattgaaattgtctattcaacaaaacagtgcttggtatatcaagcttactgggttacttgcctcgatttacggagtctggattttatatgccgccggactagatcatttattgttatcgatcttgttgtatgtcccggggattggaatctacttatattctcgctatcagcaccaaggcaaacttcattttaatcaaaaagagaaagcactattgctctttattgctatcgcgtttgtgttagctatttacaatagtgctgtcaatgtcaattggaattaa

SEQ ID NO: 30726 - DNA, 1092 bp, Pasteurella multocida
atgggatttaaatgtggcatcgtgggtttacctaacgtcggtaaatcaaccctatttaatgcattaaccaaagcggggattgaagccgccaactacccgttttgtaccattgaacctaacacgggggttgtaccaatgcccgatccacgtttggacgccttagcggaaatcgtcaaacctgagcgcgtgttaccgactacgatggaatttgtggatattgccggattagtcgcaggcgccagcaaaggcgaaggcttaggcaataaattcttagccaacatccgtgaaactgacgctattgggcatgtggttcgttgttttgaaaatgatgacatcgttcatgtcgcaggacaaattaatcctgcagaagatatcgacacgatcaataccgaattggcattagcagatttagacagttgcgaacgtgccattcaacgtttacaaaaacgggccaaaggcggcgataaagacgccaaatttgaattgtctattatggaaaaaatcctgcctgtgctggaaaacgccggtatgattcgttccatcgatttagacaaagacgaactacaagcgatcaaaggttataacttcttaaccttaaaaccgacaatgtacatcgccaacgtcaatgaagatggctttgaaaacaatccatatcttgatcgcgtccgcgaaattgcagaaaaagaaggcgcggtcgtagtgccagtctgtgcagcgattgaatcggaaattgccgaattagacgatgacgaaaaaatcgagtttttacaagatttaggtattgaagagccgggcttaaaccgcgtgattcgtgcgggttataaattacttaacctacaaacttactttacagcgggtgtcaaagaagtgcgtgcgtggacaattccaattggtgcaactgcacccaaatcagcagctgtgattcacactgattttgaaaaaggctttattcgcgctgaagtgatcgcctatgatgactttatccaatacaaaggcgaagcgggtgcaaaagaagccggtaaatggcgcttagagggcaaagattacatcgtacaagatggcgatgtaatgcatttccgctttaacgtctaa

SEQ ID NO: 30727 - DNA, 1338 bp, Pasteurella multocida
atgtctgaacacatttactcagtttcgcaattaaatcaaactgtacgggttatgctagaaaatcagctaaggcaagtttggttgacgggtgaaatttctaatttcacacaacctgtttcggggcattggtacttaaccttaaaagatgaaaatgcgcaggtgcgttgcgcgatgtttcgcatgaaaaatatgcgtgtgagtttccgtccacaaaatggcatgcaagtgctggtgcacgccagtgtcagtttatatgaacctcgtggcgattatcagttgattatcgaaagcatgcaccctgcaggtgaaggcttattgcagcagcaatttgaagcattgaaaatgcagctagcagcagaaggtttatttgctcaacatttgaaaaaaagcttaccaccattttgtaaaagtgtcggtattgtgacatcacaaactggggctgcattacaggatattttgcagattttgcgtcgtcgtgatccgagcttacaggtcgtgatttatcctacagctgtacaaggtaaagaggcgagtgcggaaattgtacaaatgattgaactggcaaatcgtcgtcaagaagtagatgccttgatagtggggcgtggtggtggctcattagaagatttgtggtgttttaatgaagaaatggtggcaagggcaattttccattctcaactcccgattattagtgcggtagggcatgaaaccgatgtgacgattgcggattttgtggctgatttacgtgcccctacgccgtcagcggcagccgaactcgttagccgagatcagcaggccttattacagcaacttgtttatcaacgtcaacgtctagagatggcgttagatcgtttatttaaacaaaaagacgatagattacagcgtttacgcttgcgcttgcataaccagcatccacaaagacaactttcggctcagaaacagttaatgcaacaactggcacatcgtttagattggtcaatgcaagcggtattacaacaaaaacaggcgcaacttcgtgtattgtgggcaagggttgagaaaaatcccttaccatttacgttgcagaaacaaaaacaggatttggcacaacttaaagtccgtttagatgtagctttgaaacgagagctcactttcaaacaccatcaattcgccgctttatgtacgaaattagatagcataagcccactcaaagtctttgcaagaggctattcgattgcacaaaatgcgcaaggtgtggcaattacacaacttaagcaggttagtgtcggtgaacgtgtgatcacgcgtttggcagacggcgaaattgttagccaagtaacggatttaagaccgcgaagttag

SEQ ID NO: 30728 - DNA, 867 bp, Pasteurella multocida
atggaaattatcattattagtgggcactctggtgcgggcaagtccgttgctctccgttgtttagaggacattggctattattgtgttgataatttgcccttagacttactcccccaattagcctcgattctttcgactaatcagcaatccgttgcgattagtctagatattcgtaatttacctcactcctcaaaaacgttagaaaatctccttaccgaagtacaacagcaacaccaaatcaaattgatttttttggatgctgacagaggcacacttattcgtcgctacagtgactcgcggcgtttacatccgttgtccactcaagatctttccttggaagctgcgattgatgcagaaagaaaatatttagacccgctcacacaacatgcggatttaattattgacaccactcgtctttccacccatgaattagccgagcgattacgtgattttttatgtgaaaaatcagataaagctttaaaaatcatttttcaatctttcggctttaaatatggtttacccttagatgccgattatgttttcgacgtacgttttttacctaatccacattggattcccgaattacgcccactcactggcttagatgcgcctgttgccgagttcttaaataaacaaaatgaagtcaatcactttatttatttaacacgcaattatattgaaacctggttacctatgttagaacaaaataaccgtagctatctgacaattgcgattggctgtacaggagggaaacaccgttctgtctatatcaccgaacagttaggggaatatttccaagctaaggggaaaaacgtgcaaattcagcataaatccttagcaaaacataaaaaagcgaatacacaataa

SEQ ID NO: 30729 - DNA, 726 bp, Pasteurella multocida
atgtcaattctttatgctgaacatttagcaaaaagctacaaaagtcgccaagtcgtttctgatgtgagtctcaccgttaactccaatgaaatcgtgggcttactcggtccgaacggcgcgggaaaaacaacgacattttatatggtggtcggtttagtccagcacgatcaaggtaaaattcgcattgatgatgaagatattagtctattacctatgcataatcgggcacaacgtggtatcggttatttacctcaagaagcctccatttttcgtcgtttaagtgtctatgataatttaatggcggtgttagaaatacgtaaagacttgacgccagaacaacgtcgagaaagagcagatgaactgattaatgaatttaacattgatcatattcgccataacttaggtcaatccctctccggcggagaacgtcgccgtgttgagattgcacgtgctctggccgctaatcccaaatttatcctacttgatgaaccttttgctggtgttgatccgatttccgtgatcgatattaaaaagatcatcatggatttacgcgatcgtggcttaggcgttttaattaccgatcacaatgtcagagaaaccttagatgtttgtgaacgtgcttatatcgtgagcgcgggaaaaatgattgccactggcacacctgagcaaattctaaataatgaacaagtgaaacgtgtttacttaggtgaagaatttaaactctag

SEQ ID NO: 30730 - DNA, 1278 bp, Pasteurella multocida
atgcaaaaatttcgtgtgtacggtcagtcacgtttaagaggttctgtgaatatttcaggggcaaagaatgcagcgttgcctattttatttgcagcgattttagcgcaagagccagttaaattgaccaatgtaccagaattaaaagatattgaaaccaccttaaaaattctgcgcaaactcggtgtcgttgttgaacgtgatgctgaaggggcggtgcacttagatgcgtcaaaaattgatcatttcgttgcaccttatgaactggtcaaaaccatgcgtgcgtcaatttgggcattagccccgttagtggcgcgttttcatcgtggtcaagtgtctttaccgggaggctgttctattggtgctcgtccagtggatctgcatatcagtggtttagaacgtttaggggcaagcatcattttagaagatggttatgtaaaagcctatgttgatcactgcttagtcggtactcgtattgtgatggaaaaagtgagtgtgggcgcaacgttatctattatgatggcggcaacactggccaaagggaaaaccatcattgagaatgctgcacgtgaaccggaaattacggatacagcactgtttttgaataaaatgggagctaaaattgtaggggctggtactgatactattaccgtggaaggcgttgagcgtttaggcggttgtgagcatagtattgtgcctgatcgcattgaaacagggactttcttagtggctgccgccatttcaggtggacgcattgaatgtaaaaataccaaagcagatactttggatgcggtaattgataaattacgtgaggcaggagcccaagtggatgtgacagaaaacagcattactttggatatgctgggtaatcgaccacgagctgtcaatattcgtactgcaccttatcccggttttccaacggatatgcaagcgcaatttactttattaaacatggtggcatgtggtaccagtatcattactgaaaccatttttgaaaatcgctttatgcatatcccagagcttattcgtatggggggcaaagctgaaattgaaggcaatacagcgatttgccatggtgttgatcatttaagtggtgctgaagtgatggcaacggatttacgggcttctatcagtttagttctggctggatgtattgctaccggtgaaaccattgtcgatcgtatttatcacattgatcgtggctacgagcgaatcgaagaaaaactgcgtggcttaggcgcacgtatcgaacgtttttcagcacaaagtgaagaaagttaa

SEQ ID NO: 30731 - DNA, 1977 bp, Pasteurella multocida
atgttccaaaataatcccctcctttcacaattaaaacaacaaatccgagacagcaaacaacaagtcgaaggtatcgtaaaaggttcagataaagcctttggttttcttgagtgtgataaaaaaagttactttattccccctgctgcaatgaagaaagtcatgcatggtgacaaaatcaaagccctgattgaagtcgttggtgaaaaagaacaagccgaacccgatgcattaattgagccaatgctcacacgctttatcgcgcgtgtgcgtttcaataaagataaaaaattacaagtgctcgtcgatcatccacaaatcaatcaagccattggtgctgcccaagataaatcaataacagaaacgttacaagaaggggattgggtcgttgctactttaaaaacacacccattacgtgatgacagattctttttcgctcaaattcagcaatttatttgccgtgcagaagatgaactcgcgccttggtgggtcacgctagcacgtcatggacaatcgcgttatcctgtgcaaggttgtgcagattatccaatgatagatcaacatacacgtgaagatttgaccgcattgcattttatcaccattgatgcggaaacgacgttggacatggatgatgcgctttaccttgagcctattcatcaagcggaggaacagattggttggcgtttagtggtcgccgttgccgatccaactgcttatatcccgcttgattcacaaattgaacaagaagccagacaacggtgttttaccaattatctaccgggcttcaacattccaatgttaccaccggaattgtctgatgaacgttgttctttaatgcaagacgaaattcgtccggcgttggtctgctatatcgaaaccgatttaaccggtaatatcactgaaaaaccgcgctttgtttccgcttatgtacaatccaaagcgaaattagcctatgatcacgtctctgattatttagaaaattgtcttgatgcatggcagcctgaaaatccacaaatcgcacaacaaatccaatggcttcatcaatttactcaagcacgcatcgagtggcgtaaacaacatgctttgttatttaaagaaaagccagactattcgtttatcttagcggagaatggcagcgtacaagccattcaagcacaatatcgtcgcattgcgaatcaaatggtagaggaatgtatgattctcgccaacatttgtgctgcacactatctcgatgaacatgctaagtgcggtatttttaatacgcattctgggtttgataaaaaatacctagagagtgcacatcaatttttattaaatcagttaagtgatgaaacaaaccaagccgtcttagcaacacgttattctgtagcgaatttaacaacattagcgggctattgccaaatgcgccatgatattgagttattaaatagtgactatctcgaattgcgtttacgccgtttcttaacatttgctgaatttaaatctgaaatcgcaccgcactttggtttaggcttatcgggttatgcgacctggacatccccgattcgtaaatattccgatatggtcaatcatcgcttaattaaagctgtgttaacccaacaaacttgtgagaaaccgcaagatgacctgttcgtacgtttgcaagaagcgcgtcgtcaaaaccgtttagtagagcgtgatattgcagattggctttattgtcgttatttagcaacacaagtggaacaaaaaccaacattccaagcggaaattcaagatgtgatgcgagggggattacgtgtgcaactgcttgctaatggtgcgccgatgtttatccctgcctccttaattcatgacaataaggaagcgattcaagtcaatacggatacgcttactctgtctattcaaggtgaagtgaaatataaattaggagatatcattcaggtgcaactcttggacgtgaaagaagaaacgcgtagtattgtcggcactctttgttaa

SEQ ID NO: 30732 - DNA, 783 bp, Pasteurella multocida
atgggtttcttaacaaacaaacgtattttaattgccggtgtggcaagtaatcgttctattgcttacggtatcgcacaagcaatgaaacgtgaaggggcagaactcgctttcacgtatcaaaatgataaattaaaagggcgtgtagaagaatttgctaaagaattaggttctgatattgtgattccttgtgatgtgggcacggatgaaagcatcgaacaatgttttgctgaattagctaaacactgggaaaaatttgatggttttgttcattctatcgcttttgcgccaggcgaccaattagacggtgattatgtggatgcagtaaaccgcgaaggtttccgtattgcacacgatgtgagttcatatagctttgttgcgatggcaaaagccgcgcgtggcatgttgaatccgaactcagcccttttaacactttcctacttaggggcagaacgtgcaattcctaactataacgtaatgggcttagccaaagcctcattagaagccaatacacgttttatggcagcagcattaggtaaagacggtatccgcgtaaatgcaatctctgcaggaccaattcgtacacttgccgcctctggtattaaaaacttcaagaaaatgctcgcaaacttcgaacaaaccgcaccattacgccgtactgtgacgattgaagatgtcggtaactctgcagctttcttatgctcagatttaagtgctggtatcacaggtgaagtggtccatgttgatgccggtttcagtatcgtagctatgggtgaactcgaataa

SEQ ID NO: 30733 - DNA, 426 bp, Pasteurella multocida
atgtttaaaattgcaaaagaatttagttttgatatggcacatatgctcgatgggcatgatggcaaatgcaaaaatttacatgggcatacttacaaattacaagtagagctctgtggtgaattacatcaaaccggtccgaaaaaaggcatggtgattgatttttccgatttaaaagatatcgttaaacagcacattttagatcccatggatcatgcgtttatttatgattgcagcagtgaaaaagaatcgaaagtggctcatttattgcaatcactggattcaaaaacgtttgcactgcccacgcgtactaccgccgaagaaatggcgcgctttatgtttaattgtttgaaatatgaggcacatttaccggtatcggcgatccgcttatgggaaacccccacttcattttgtgaatataaggaataa

SEQ ID NO: 30734 - DNA, 1506 bp, Pasteurella multocida
atgtcagaacaaactcaagaacttgatcttaatggcgagatgttagtccgccgtgaaaaattagccgcgttgcgcgctaaaggtaacccatttccaaatacatttcgtcgtgatgcgcttgcacaagatttacacgcaaactacgatgcacttgaaggcgaagcattaaaagcacaagaagtcgaagtaaaagtcgctggacgtattatgacgcgtcgtgcaatgggtaaggcgacttttatcaccttgcaagatatgtctggtcgtattcaactctatgtcgcacgtgataatttgccagaaggtatttatgctgacgatgtgggacagtgggatttaggcgatatcattggcgtaaaaggcaccttatttaaaaccaaaaccaatgaattaaccgtacgttgtactgaagtgcagttattaaccaaagcattacgcccattaccagataaattccatggtctaagcgatcaagaaacacgctatcgtcaacgttatttagatttaattgcaaacgaagactcacgtcgtactttcattattcgttctaaagtgattgcgggtattcgtgaatattttctgtcaaaaggctttatggaagtagaaaccccgatgttacaaattattccgggtggggcttctgcacgtccatttgtaacacatcataatgcattagatgtggatatgtatttacgtattgcgcctgagctttatttaaaacgcttagtggttggtggctttgaacgtgtctttgaattaaaccgcaacttccgtaacgaaggagtgtctgttcgccataacccagaatttaccatgctcgaatactaccaagcctatgcggattaccatgatttaatggataatactgaagaattgttacgtaaactggcaatggacattttaggcacgacgattgtcccttatggtgagcttgaatttgattttggcaaaccatttgaacgtatcacgatgcatgatgccattttgaaatacggcgcagaaaaaggtatcgtcaaagaggatctatatgactttgatcgtgctgttgccgttgcgaaaaaattaggtattgaagtacaaaaatcgtgggggttaggcagtctagtcaatgtaatttttgaagaggtggcggagcatcacttaattcagccaacgttcttaatggcacaccctgccgaaatttcgccattagcgcgtcgtaatgatgaaaatccagaagtcactgaccgttttgaattattcatcggtggacgtgaaattggtaacggtttctctgagttaaacgatgccgaagatcaaaacgaacgctttgacgcacaagttgcggcgaaagaagcgggggatgatgaagcgatgtttaaagacgaagatttcgtgactgctcttgaacatggcttaccaccaacagcaggcgaagggttaggtatcgaccgcttagcgatgctattcgcgaatgcggcctccattcgagatgtgatactcttcccagcaatgaagcagaaataa

SEQ ID NO: 30735 - DNA, 963 bp, Pasteurella multocida
gtgtggaacgaaccagaaaaagcacaagcattaggtaaagaacgggttgccttagaaggggtcgtcaatacaatccatacacttgatcaaggcttagaagatgtcgaagggctactcgaactagcaattgaagccgaagatgaagcgactttccatgaagccgtcgcagagctcgaagaattagaacaacagttggcaaaattagaatttcgccgtatgtttagtggtcaacatgatgcagcagactgctatgttgacttacaagcgggctctggtggtaccgaagcacaagattggactgaaatgttactgcgtatgtatttacgctgggctgaaagtaaaggctttaaaaccgaattaatggaagtgtccgatggggatgttgccggaattaaatccgccacgattaaagtttctggtgaatatgcttttggttggctacgcacagaaaccggcattcaccgtttagtacgtaaaagtccatttgactccaacaaccgtcgtcatacctcgtttagtgcggcattcgtttatcctgaaattgatgacgatattgatatcgacattaatcctgcagatctgcgtattgatgtttatcgtgcttcaggtgccggtggtcagcacgtcaataaaaccgaaagtgcggtgcgtattacccatattccaagtggcattgtggtgcaatgccaaaatgatcgctctcaacataaaaacaaagatcaatgtatgaaacagttgaaagcgaaactgtatgaaatggaattgcaaaagaagaatgccgataaacaagccatggaagacaacaaatccgatattggttggggcagtcaaatccgttcctatgtgttagacgattcacgcattaaagatttacgcacgggtgtggaaaatcgcaatacccaagcagtgctcgatggcgacttagatcgctttattgaggccagtttaaaagccggattataa

SEQ ID NO: 30736 - DNA, 684 bp, Pasteurella multocida
atgaaaaagatcttgagcacacttttgatgttggggatgtcgagtttgacgtttgccaattcacagcaagtggtagaacagttgcaaaaaatgggcttatctggtgtagaagtgagcgattcgcctgtgaaaggcatcaaaaccgcagtgacggacaatggtattttttacatcacagaggacgcgaaatatattcttgatggtaagttatatgcactgtcagaaaaaggattacgcgatgtgtcatcaagcttattactagataaattaacagcttataaaaatgaaatggtcgtttatcccgcaaaagacgaaaaacatgtgattaccgtgttcatggatacttcgtgccattactgcaaagtgttacataaacaaattaaagaatataatgatctcggtattacagtacgttaccttgctttcccgcgtggtggcgtgcaatcgaaaacagcacgtgaaatggaagcgatctttactgcacaagatcctcagtttgcattaactgaagcgattaatggtaatccaccaaaaacgttgaaagacgctaatatcaccaaaaaacattaccagttaggcttacaatttggtgtgaatggtaccccaagtattgtgaccgagaaaggcgaattgattggagggtatttaaaacccgcagatttattgtcggagttagcccagtaa

SEQ ID NO: 30737 - DNA, 1722 bp, Pasteurella multocida
gtgaataaattaatccaacgtcgtgctgttcccttaggtgaggcggtgtcttctgatcccttacttgatcgcctctatcgtgcacggcagattcaacatcctcaacaattagaccgcactttagctgcccttttacatccgcaacaactggatggaattgaagcggcggtcactctcttcgtacaagcctataagcaacaagaaaagattgtaattgtgggcgattttgatgcagatggtgcgactagcaccgccttagctgtactcgcattacgtcaattaggctttacacaagtggcgtttttaattcctaatcgttttgaacaaggttatggtttgagcatcgcggtagcagagcaagctttagaaaaagatgtacagctattaatgaccgtcgataacggggtatcctcagtcgagggggtggcttttttaaaagcgcaaggggtcaaggtcttaattactgatcatcatttgcctcctactcaattgcccgacgcggatgccattgtcaatcctaatttatcaagctgtgcttttccatcaaaagccttagccggtgtcggggttactttctatttaatgttagcattgcgcgcgaaatttcgtgagttggggatatttaatcagcaaactcaaccaaatttcaccgacttattggatctcgtcgccttaggtaccattgccgatgtggtgcccttagatcaaaataatcgtattttagcctatcaaggtttagcacgtattcgcgcagaacgttgtcgttgcggtattcgtgcgttagcagaagtggctaatcgagatatgcgtcagttatctacttcggatttaggtttttctcttgcaccacgtttaaatgcggcagggcgtttagataatatgtcagtcggtgttgagcttttattggctgaagatatggcaagcgcgcgagcattggcacttgaattagatggtttgaatcaaacgcgtaaagaaattgagcaaggcatgaaacttgaggcattagaaatttgccgtcaattgaccgcacttcaacaaacccttccgttcggcattgcgctgtatcaagcggactggcaccaaggggtgttagggattgtggcttcacgtattaaagatcattttcatcgtcctgtggttgcatttgcgcaagagcaagccggtattctaaaaggctcagcccgttccgttgagggattacatttacgtgatgcgttagagcgcattcattgtttgtatcctgacatgattttaaagtttggtgggcatgcgatggcggcaggcttaaccattcaagaaagccgttttgctgattttcagcaggcatttaatcaaattgttggtgattggcttgatgaaggtcagcgacaaggtattgtgtggacggatggtgagcttgatagtgttcaattaagtttaacaaccgcggaatgcttgaaagaggcgggaccttgggggcaagcgtttccagaacccgtatttgacggcgagtttaaaattttacagcaacgtttagttggcgaaaaacatcttaaaatgatggtcgaaccaaaacagggtggaccattgctcgacgccattgcctttaacgtcgatactcgttattatcctgacttgtcgataaaattagcaaaattggcatataaattagatattaatgagtttcggggcaatcgtcatcttcagttattagtggattatattgtaccgatagggacttaa

SEQ ID NO: 30738 - DNA, 690 bp, Pasteurella multocida
atgaaaattggtattgtgggtgcgatggcacaagaagttcaaatgttggcagatttaatgcaagataaacgcgttacccaagtcgccagttgcacaatttatgaaggcatgattcatggtaaagcggttgccttattacaatctggcattggcaaagtcgccgctgcaatcggtgccactttattgttagagatgtgcaaacctgatttggtcattaataccggttcggcaggcggtgtggcgacagggcttaacgtcggggatattgtgatttctgatgaaacggtttaccacgatgctgatgtgacggcatttggttatgctaaaggacagttgcccgcttgcccagcacgattccaatctgacgagaagttagtacaactggcagaaaagatcgctgttcaacaacagcaacaagttaaacgtggtttgatttgttctggggacagttttattcaaggtgggacaccgttagcgcagattaaagcagatttccctacggttatggctgtagaaatggaagcgacagcaattgctcaagtatgtcatgccttcaatgtgccttttgtggttgtcagggcaatttcagacagtggtgacggtgaggcgagtatgtcttttgaggaatttttgccactggcggcgaaacaatcttcagcaatggttttggagatgattgataatttatag

SEQ ID NO: 30739 - DNA, 1485 bp, Pasteurella multocida
atggaatatcgcgtaaaatcaaccgcacttttagacataaaaagtaatattattattggcttatatgagaatggtgagctatcaccatccgcacaaaaaatcgatgaaatttctcaaggctatttaagcaaattgattcaatctggcgaaatcaaaggtaaacttggacaagttttggtgttacgtcatgttcctaactacagcgcagaacgtgttttcgtggtaggcgctggtaaaaaaggtgagattaacgagaaacaatttaaacaacttattcaagacactatcaacgctgttaaagccaccagtgcaaaagaggttatcagctacttgtctgatatcaagattaaagatcgtgatctctactggaatatccgttttagcgttgaaaccctcgaaaccagcatctatcagttcgaacaatttaaaagtaaaaaaagcgaacaagatgtggcattaacagatgtcatttttagcgcggaaggcgatgttgcacaacaagctgttaatcatgccaaagcaattgctttaggtgtacgcgccgccaaagatgtagcgaactgtccacctaatgtttgcaatcctgtttatttagccgaacaagcaaacgcgttagccacacgatctgacctgattaaaactactgtactcggtgaaaaagacatggctgacttaggcatgaacgcttacttagcggtttcacaaggttctgtcaatgaagcacaactctcccttatcgaatatcgtaatcatcctaatccagatgccaagcccattgtgttagtcggcaaaggactgacttttgatgccggtggcatctcgttaaagccagctgaaggcatggatgaaatgaaatatgatatgggcggtgccgcttctgtctatggagtcatgaatgccattgctgaattaaaactgccattaaacgtgattggcgtgttagcaggttgtgaaaatttaccagacggtaatgcctatcgaccgggtgatattttaaccacaatgaaaggcttaacggttgaagtactcaataccgacgcggaagggcgcttagtgttatgtgatacgctcacttatgtagaacgctttgaacctgaactggtgattgatgtggcgaccttaactggcgcttgcgtagtagcactgggtgcacataacagcggtttaatctctactgatgataaattagccaaagatctcgaactcgccgcggctcaaagtaccgataaagcttggcgtttgccacttggtgaagaatatcaagaacagctgaaatctaactttgccgatttagcgaatattggtggtcgttggggcggtgccattactgctggcgcatttttatccaacttcaccgataaatatcgctgggcgcatttagatatcgcaggtactgcttggttacaaggcgcaaacaaaggagctacgggtcgccctgttcctttactggtacaattcttaattaaccaagcgacaggtaaataa

SEQ ID NO: 30740 - DNA, 972 bp, Pasteurella multocida
atgtttgaacaagaaaattggcagccttcagcctctattgagaatttgctagcacgagccaagattattgctgaaattcgtcgcttttttactgatcgtggtttattagaagtagaaacccctgtactcagtgaatttggggtcacagatgtgcatttatcgacgtttaacactacatttatttcacctacagctgaaaaatcgaaagcattgtggttatcaactagcccagaatatcatatgaagcgtttacttgctgctggtagtggtcctatttttcagttatgtcacgtgtttcgtaacgaagaagctgggcaacgtcacaatcctgaatttacgatgttggaatggtatcgtcctcattttgatatgtatcgtttaattaatgaagtggatgatctattgcagcaaattttggattgtaaaccaacagaaagtttaagttatcaatttgttttccaagaatatgtgggcttagatccactttctgcggaaaaagcggaattagtggcaaaggcaaagcaatatcatttacagcaggctgagcaagaagatcgtgataccttattgcaatttttatttagcactgttgttgagccgaatattggtaaagaaaatccggtcgcagtttatcatttccccgcgacacaagccgcacttgcacaaatcagctctgaagatcatcgtgttgcagaacgttttgagttttattacaaagggcttgaattagcgaatggtttccatgagttaacagatgtgaatgaacaattgcatcgctttgagcaagataatgtacaacgacaaaaaatgggtttgccgcaacgtcaaattgataaacgcttattaggggcattacaagcgggagtgccgaattgttctggtattgcattaggtgtggaccgcttattgatgattgccttaggcgcaaatgcaattcatgaagtcatggcatttggtatcgaaaacgcttaa

SEQ ID NO: 30741 - DNA, 2607 bp, Pasteurella multocida
atgtctgactttctacaatcttatcaacaacatgttgatgaacgtgcggcattaggcattgtgccgaaacctttagatgcagaacaaaccgcccaattaattgaactcctaaaaaacccacctgctgataaagctgactttcttttaaatttattcgaaacgcgtatccctgctggtgttgatgaagccgcctatgtgaaagcctcgtttctcgccgccgtcgcaaaacgtgatgtacagtctctactcatttccgcagaaaaagccgtgcaactattaggaacgatgcaaggtggctataatattgagccgcttcttcatgcgcttgatgatgaaacactcgccccaattgcggttgaagcactttctaccacgcttttaatgttcgataacttccacgatgtagctgagcgagcgaagaaaggcaatctatttgccaaacaagttttgacttcgtgggcaaatgcagattggtttttatctcgtccaaaattagcggaaaaactcactgttaccgtatttaaagtaacaggggaaaccaataccgacgatctgtcacctgcccaagatgcctggtcacgtccagatattccattacatgcattggcgatgttaaaaaatacccgtgatggcattgagcctgacgatgctggcaatgtcggaccaattaaacaattagaacaattaaaacaaaaaggttttccattggcttatgtcggcgatgttgtcgggacaggctcttcacgtaaatccgccaccaactctgtgctttggtttatgggggaagatattccttatattccaaataaacgtgctggcggtgtggtactgggtggcaaaattgcgccgattttcttcaacacaatggaagacgccggttcattaccaattgaagtggatgtcagtgaactcaacatgggggatgtgattgatatttatccataccaaggcaaaatttgtcgtcatgatactgacgaggttttagctgaatttagtttaaaaaccaatgtgctgttagatgaagtgcgtgcaggtggtcgtattccattaatcattggacgtggtctaacccataaagcacgttgtgaattaggtctgcctgaaagtgatatttttgccaaaccacaatgcagtacagaaagccaaaaaggttttacccttgcccaaaaaatggtggggcgcgcttgtggtgtggacggtattcgtccaggacaatactgtgagccacgcatgacctctgtcggttcacaagataccactggaccaatgactcgtgatgagttaaaagaccttgcttgtttgggtttctccgctgacttagtgatgcaatctttctgtcatacggcggcttatccaaaaccggttgacgtagtcacacatcacacactccctgatttcattatgaatcgtggcggggtttcattacgtcctggtgatggtgtcattcactcttggctaaaccgtatgttattacctgatacagttggtacaggtggtgactcgcatacgcgtttcccgattggaatttccttccctgcgggttctggcttagtggcatttgcagcggccacaggtgtcatgccattagatatgccggagtcagtattagtgcgctttaaaggcgaaatgcaaccgggaattaccttgcgcgatttggtgcatgcgatcccttattatgcgattaaacaaggtttgctcaccgtagagaaaaaaggcaagaaaaacattttctctggacgtattttagaaattgaaggcttagagaacttaaaagtcgaacaggcgtttgagctttctgatgcatcagcagaacgttctgccgcagcttgtacaattaaactggcgaaagaacccattattgaatatttaaattcaaatatcgtgttattgaaatatatgattgccgaaggctatggcgatgcgcgcacacttgagcgccggattaaaggcatggagcaatggctggctgatccacaactaatggaagccgatcctgatgctgaatatgcggcagtgattgaaattgacctcgctgaaatcaaagaaccgattttatgtgcaccaaatgatcccgatgacgcgcgtttattgtccgaagtccaaggcgataaaattgatgaagtctttatcggatcttgcatgacaaatataggtcacttccgtgcagcaggaaaattattagccaagttcaaaggcatgattccaactcgcctctggattgccccaccaaccaaaatggatgcggcattattaagtgaagaaggttattacagtatttatggtaaaagtggcgcacggattgagattccaggttgttcattatgcatgggtaaccaagcgcgtgttgctgataatgccacggtggtttctacttcaacgcgtaacttcccaaaccgtttaggacaaggtgcaaatgtttatcttgcatctgccgagctagccgcggtttcggcgattttaggtaaattaccaacgtcagaagaatacctcacctttgcagcagacttacaacaagacaaggacgacacttatcgttatatgaactttgaccaaatcaacagctatactaaaaaagcagataacgtgatttttcaaagtgcggtataa

SEQ ID NO: 30742 - DNA, 330 bp, Pasteurella multocida
atgtttggaaaaggcggtttaggcaatttaatgaaacaagcgcaacagatgcaagatcgtatgcaaaaaatgcaagaagagattgcgcagctagaagttactggggaatctggtgcgggcttggttaaaattactatcaatggtgcgcataattgtcgtcgcgtagaaatcgatcctagtttaatggaagacgataaagatatgcttgaggacttaattgccgcagcatttaatgatgcagtacgtcgtgcggaagaattacaaaaagagaaaatggcgtcagttactgccggtatggcgttaccaccaggctttaaaatgccgttttaa

SEQ ID NO: 30743 - DNA, 603 bp, Pasteurella multocida
atgcaaaccagcccattactcgaacatttgatcgaaagtttacgttgtttacccggtgttggaccaaaatctgctcaacgtatggcatatcacttattacaacgtaatcgtaatggaggcatggaacttgcccgcgctttaacggaagcgatgtcaaaaatcggacattgcagccattgtcgtacttttacggaagaagaggtgtgcacgatttgtaacaaccctcgccgtcagcattcaggactactttgtgtggttgagcagccgtctgatattcaagctattgaacaaacaggacaattttcagggcgttattttgtgttaatggggcatttatcaccattagatggaattggtcctaaagaaattggtttgcatttattacaaaaacgcttgcaagaagaaagctttcatgaagtgattttggctactaacccaaccgtcgaaggtgatgccacagcgaattacatcgcagagctttgtatgcaacaaaatattaaagtcacccgtattgcacatgggattccagtggggggggaattagaaatggtggatggtacaaccttgactcattcctttttaggacgtcgccaactcgggtaa

SEQ ID NO: 30744 - DNA, 1953 bp, Pasteurella multocida
atgcgattatttatagcggagaaacccagccttgcaagagccattgcggatgtgttacctaaacctcaccagcgaggtgacggctttattaagtgtggtgccgatgattatgtgacatggtgcatagggcatttactcgaacaagctgaacccgatgcctatgatcccaaatttaagcaatggcgcttagaacatctgccgattattcctgaaaaatggcaactcattccccgtaaagatgtacacaaacaattaactatcgttgaaaaattgattcatcaagcggatattttgattaacgcaggcgaccctgatcgtgaagggcagttattggtggatgaagtgtttagctatgctaatttaagtgtcgataaactgaatcagattcagcgttgcttaattagtgatctgaatccaagtgcggttgaaaaagccgtgaacaaactacaatcaaatcgcaattttatcccccttgctacttccgctttagcacgagctcgggcagattggctgtatggtattaacatgacacgcgcttataccttgcgaggtcggcaagctggttatcaaggtgtgttgtcagtgggacgtgtacaaacccctgtgttgggcttgattgtgcgtcgagatttagagatcgaaaacttcaaaccacaggacttttttgaagtacttgcccatattcaagcggaaacaccagaaaaaatcaccgcactttctgcgcaagagaaagcgaacattccacaatttaaagccttatggcaaccaagtaaggcgtgcgaagattatcaggacgaagaaggacgtgtgctttcgttagggttagtggaaaatgtagtcaaacggattgcgcaacaacctgcagaggtggtggagtatgtagataaacgcgaacatgaaagtgcgccgttgccttattctttgtccgcgttacaaattgatgcggcgaaacgttatggcttatcggcacaagaagtattggatatttgtcaacgtttgtatgaaacgcaccgtttgattacgtatccgcgttcggattgccgttatttaccagaagagcatttcggggaacgcacaaaagtctttcaggcgatttctcgccatatttcagactatcagcctttgcctgatattttaaatccagagcaaaaaaatcgttgctggaatgataaaaaagtagaggcacaccacgccattattccaacagcgaaaaatacccccgttaacctgaatcagcgtgaatggcaaatttaccatttaatcgcacggcagtatttaatgcaattttgtccggatgcagaatatcggaaaagtaaaataaccttaaatattgcggggggcacctttattgcgcaagcgcgtaatttacaagttgcgggctggaaacaacttttggggaaagaagacagtgatgagcagcaagaacctttattacctgtcgtgaaaaaagggcagattttattttgcgagaaaggggaaattgttagtaaaaaaacacaaccccctaaaccctttactgatgcgacattgctttcagcaatgaccgggattgcgcgttttgtacaagacaaagaattgaaaaaaattctgcgggaaacagatgggttagggacagaagcaacaagggctggcattattgaactcttatttaagcggggttttttatataaaaaaggacgcaatattcacagtactgaaactgggcgtattttaattcaagccttacccgatgtggcaacacagcctgatatgacggcacattgggaatcacaattgaccagtattagtcagaaagaaatgagttatcagcaatttatgtcaacgttgacgaactttttacctgagttgatgcgttatgtgaacttcgccgcgttacgccaattaagtcaagtggagaaacctcagtctttttcgaaaaagatgagcgcgaagtctaaaaagcgtcctacttag

SEQ ID NO: 30745 - DNA, 924 bp, Pasteurella multocida
atgatgttacaaggtgcaggcttagggtatcgtcgtgatctcgctgaagattttttattactgcccgacaacagtgttgtcaactttatggaagtggcgccagaaaattggatcaaaatgggaggggcggcgcgctataaatttgatcaagcggcagaacgatttccactcgccgtccatggactttcactctctttaggtggacaggcgcctttagataaagccttattacagggcattaaagcattaatgacacaatatcaagctgtctttttttctgagcatttaagctattgtgaatgtgacggacatctttatgatttgctcccgatgccatttacggaagaagccgtaaaacatgtggcacagcgtattcgtgaagtacaagattttctgggtatgcaaatttccttagaaaatacgtcctattatttgcattcaccaaccagtaccatgaacgaagtcgaatttctaaatgccatcgcccaagaggctaactgtggtattcacttagatgtcaataatatttatgtgaatggtgtgaaccatggcttgctcaatccttatgtttttttagatcatgttgatgttagccgtgtaaactatattcatattgcaggacacgatgaggaacatggcgccgcaaatccgatttccccttctgatgaagcctttaataaaataaaaggagaatatcgtcatctcccccaattattagtggacacacatggtgaggcggtaaaaagtaatgtctgggatttattagaatatgcttatcaacgtttaccgcatattccaccaacattacttgaacgtgattttaatttccctccgtttgccgagctttatgctgaagtcgaacatattgcgcaactgcaacaaaaacatgctaaactgacagtggaaaatcgccatgcagcctaa

SEQ ID NO: 30746 - DNA, 483 bp, Pasteurella multocida
atgacaaagaaaaaagtaaaagttggcacaaatacgatagccttaaataaacgtgcacgacacgattattttattgaagacgaaatggaagcgggtctggaattgcaaggctgggaagtgaagtcgatgcgtgctggaaaagccaacattagtgacagttatattatctttaaacaaggcgaagcttatttatttggtgcaacaattcagccacttaatgtcgcttcaacgcatattgtgtgtgatcccacacggacacgcaagctgttactcaagcaaaaagaactggcatcattatttgggaaagccaatcgtgatggctatactatcgttgctctctcactctattggaaaggcgcttgggctaaactgaaaattggtcttgccaaagggaaaaaacagcacgacaaacgtgaagatatcaaagaacgcgagtggaaagtcacgaaagatcgtattatgaaaaatgcacgccttggctaa

SEQ ID NO: 30747 - DNA, 267 bp, Pasteurella multocida
atgaaaaaaggtattcatccagaaaattaccgtactgtactattttatgactcaaatgcaaagcaaggttttttaatccgctcttgcgccagaaccacaacgaccatgaaatgggaagatggtcatgaatatcctgtctttatgtgtgatacctcctcagcatcacacccgtactatacaggtaaaacacgtcaaattgcgaatgaaggtcgtgcaagcgactttgtcaatcgctacggcaaatttggcacattaaaatcaaaataa

SEQ ID NO: 30748 - DNA, 1263 bp, Pasteurella multocida
atgttaaaaagaagtatgaacatcgctgattacgatccggttttatggcaggcaattcaagacgaaaatcgccgtcaagaagaacacattgaattaattgcatcagaaaactatgccagcccacgcgtgatggaagcacagggttctcaatttaccaataaatatgcggaaggttacccgggtaaacgttattatggtggttgtgaatatgcagatatcgttgagcaattagcgattgatcgtgcaaaagagttatttcatgcggattatgtgaacgtacaaccccactcgggttcgcaagctaacgcggcagtgtatggtgccttattacagccacatgacactattcttggtatgagccttgcacacgggggacacttaacgcacggtgcatcagtgagcttttcgggtaaaatctataatgcagtgcaatatggaattactgccgaaggtttaattgattatgaagatgtgcgtcaaaaagccttagagtgcaagccaaaaatgatcgtggcgggtttctctgcctattcgcaagtagtggattgggcgaaaatgcgtgaaatcgctgatgaagtgggagcgtatcttttcgtggatatggcgcacgtggcagggctgattgcagcaggtgtttacccaagtccgttaccacatgcacatgttgtgactactaccacacacaaaaccttagggggacctcgtggtggtttaattctatcggctgcgaaagatgaagatctttataaaaaattacaaagttctgttttccctgccaaccaaggtggtccgttagtgcatgtgatcgccgcaaaagcggtctgttttaaagaagcgcttgagcctgaatacaaagtgtatcaacaacaagtggtgaaaaatgcgaaagccatggtggacgtgtttaaacaacgtggttataacgtggtatccaatggcacagaaaaccatttattcttagtagatttagttagccacggtttaaccggtaaagcagcagatgctgcgttaggcagtgcaaacattaccgtcaacaaaaatgcggtaccaaacgatccacaaaaaccatttgtgacctcaggtatccgtgtgggcacaccatctatcacccgtcgtggctttaaagaagctgaatcggcagaattagccggttggatgtgtgatgtgttggatgcgatgggtaaagacaacgaagcacaagtgattgcacagacaaaagagaaagtcttagcaatttgtaaacgtcttcctgtttatgcttaa

SEQ ID NO: 30749 - DNA, 1158 bp, Pasteurella multocida
atgaaatacgaacttgataaaaccgatggcaacgcacgacgtggtcgtcttgtgtttgaacgtccacaaggtacctttacggtagaaacccctgcttttatgccagtaggcacctacggtacggtaaaaggcatgacgcctgaagaagtccgtgctacgggggcagagattctattaggtaacacattccatttatggttacgtcccggacaagaggtgatgcgtaagcacggtgatttacatgactttatgcaatggcatcgtccaattctcacagactcgggcggtttccaagtgttcagtttaggcaaattgcgtaaaattacggaagaaggggtaaaattccaaaacccaattaatggggaacgtattttcttgtcgccagaaaaatcaatggaaattcaatatgatctagggtcagatatcgtgatgattttcgacgaatgtaccccttaccctgccacctttgattatgcaaaaaaatccatggaaatgtcgttacgttgggcaaaacgtagccgtgatcgttttgatgagcttggtaataaaaatgcattatttggtatcattcaaggtggcgtttacgaagaattacgtaaagtgtcggttgaaggattagtcaacattggctttgatggttatgcggtcggcggtttagccgtcggtgaaccgaaagaagatatgcaccgtattttagaatacgtctgtccacaaattcccgctgataaaccacgttatttaatgggagtgggtaaaccagaagatttagtcgaaggggtgcgccgtggtatcgatatgttcgattgtgtgatgccaacccgtaatgcacgtaatgggcatttatttgtcagcgatggtattgtaaaaatccgtaatgccaaataccgtgaggataccagcccattagatccagaatgtgactgttatacctgtaaacattacaccaaggcgtacttgtatcacttagataagtgcggtgaaattttaggcgcaagattaaacacaattcataacttacgctattatcagcgcttaatggcgcaaattcgccaagctatcgaagaagatcgctttgaggcatttgtacaggaattctatgccaaaatgggcaaacctgtcccacctatgcagtctgaaataaaatcagatgaaggctaa

SEQ ID NO: 30750 - DNA, 1092 bp, Pasteurella multocida
atgcgtgtttctgacttttattttgatttacccgatgagctgattgctcgttacccaaaaccggatcgcaccgctagtcgcttattacaacttaacggcgaaaatggtgagattacccaccgcacttttgctgatatccttgatcaaattcatgaaggcgacttattaatttttaataacacgcgcgtgattcctgcaaggatgtttggacgtaaagccagtggcggtaaggttgaagtgttggttgagcggattttatccgacacacgctttttagcccatgtgcgctcctcaaaagcaccgaaagaaggggcagaactgtggttaggcgaagataagttaggtgaacatcatggggttaaaatgatcatggttgcgcgccatgataccttatttgaattagaaatcgcgcaaaaacagaccgcacttttagacgtgttacagcaaattgggcatatgccattgcccccttatattgatcgccctgacgaagaagcggataaagaacgttatcaaaccgtttataacaaagtccctggcgcggttgcggcaccaactgccggcttgcattttgacgatgctttattagcacaactcaaagccaaaggggttaactttgcttttgtgactttacatgttggcgcaggcacatttcaaccggtgcgcgtcgagcagattgaagatcacaaaatgcacgcagaatatgtggaagtaccacaagaagtgtgtgacgcgattattgccacgaaacaagcaggcaaacgtgtgattgctgtgggcaccacttcagttcgttccgtcgaaagtgcggcattagcgacggaagaaaaaggcgaacatgccttaattacgccttatttttccgatacgtcaatttttatttatccaggcaaaactttccgcgtggtggattgtttaattacgaacttccacttaccagaaagtacactgattatgctggtttccgcttttgctggctatcgccatactatgcaggcgtaccaaagtgcggtcgaaaatcgctatcgtttttttagttatggcgacgcgatgtttatcagcaaaaatcctcacgttaatgggcttgactga

SEQ ID NO: 30751 - DNA, 1371 bp, Pasteurella multocida
atgacaactttcactccagaactgctctctccagccggttcacttaaaaatatgcgctatgcctttgcctatggtgccgatgcggtgtatgccggacaaccacgttatagcttgcgtgtacgtaacaatgaatttaatcatgccaatttaaaaattggcattgatgaagcccacgccttaggcaaaaaattctatgtagtggtcaatattgcgccacataactccaagctgaaaacctttattcgtgatttagagccggtaattgccatgggacccgatgcgttaattatgtcggatccgggcttaattatgttagtgcgtgaacatttcccagatatggcgattcacctttcggtacaagccaatgcggtcaactgggcttcggtgaaattctggaaacaaatgggcttaacccgcgtgatcttatcccgtgagctttcgcttgatgaaattgccgaaattcgtcagcaagtgccagaaatggaaattgaagtgttcgtgcatggggcattatgcatggcgtattctggacgttgtttattatcaggctatattaataaacgtgatccaaaccaaggcacctgtaccaatgcgtgccgttgggaatacagtgtaaccgaagccaaagaagatgagatcggcaacattgtgaatgtgggtgaagaaattccagtgaaaaatgtagcaccgacacttggcgaaggcgacaccaccagtaaagtatttttattagcagaaagtcaacgccctgaagaacaaatgtctgcctttgaagatgagcatggtacttacatcatgaactcgaaagatctacgagcggtacaacatgtggaaaaactcaccgctcttggcgtacattcgttaaaaatcgaagggcgtaccaaatccttctattattgtgcgagaaccgcacaagtttaccgtaaagcaattgatgatgcggtagcaggcaagccgtttgatgaaagtttaatggataccttagaatctcttgcacaccgtggttataccgaagggttcttacgtcgtcatactcacgatgaataccaaaactacgattacggctactccatttcggagcgtcaacaatttgtcggtgaattcacgggtaaacgtaatgagcaaggcatggcagaagtggcagtcaaaaataaattcttactcggtgatgaagtggaaatgatgaccccgaaagggaacattgtgttcaagattgaacggatgctcaaccgtaaaaatgaaaatgtggaagccggtttaggcgatggacattttgtatttttagacgtgccagaagatgtgcaattagactacgcgctgctaatgcgtaatttggtgaatactaacacacgtcaaccacaccaaaaataa

SEQ ID NO: 30752 - DNA, 1599 bp, Pasteurella multocida
atgaaaaaattaacaaaactctctcttgccgttttagcgatgacgtccacagctgcgtttgcggctgcaccgaaaacctttgtgtattgttcggaagcctccccgtcttatttaagccctgtgttaggcaccgatggggcaactattgatgcctcaggtcaagcaatgtttaatgggctaactacgtttgaacgtggtaccactaatgtcattcctgccttagctgaaaaatgggatgtatctgaagatgggaaaacctatgtcttccatttacgtaaaggtgtgaaattccatagcaataaagattttaaaccaacacgtgattttaatgccgatgatgtggtgttctctttcaatcgtcaattagacccaaatcacccttatcacaaagtgtcaggtggtagctatgaatattttatcggtatggatatgcaaaatatcattgataaggttgaaaaagtcgatgactataccgtcaaaatcagcttaaaagtgccaaatgcgccatttttagcgaacttagcgatggattttgcttcgatttattcagcacagtatgccgatgccatggcaaaagccaaaacaccagaaaaattggatagtgcaccaattggtacaggaccatttgaatttgtttcttaccaaaaagactctgctgtacgctataaagcctttgaaaactattggcaaggcaaagcaaaaattgatcgcttagtgttttcgatcacgccagatgcttcagtgcgttatgccaaattacaaaagggtgaatgccatgcagcgccttatccaaatccagcggatattgctaaattaaaagcagatagcaatatcactttgttaactaaaccgggattaaatgtgggttatttaaactttaatgtacaaaaagccccgtttgataatgtgaaagtgcgtcaagcattgaactacgcagtcaacaaagacgcgatcattgaatcagtgtatcaaggtgcgggtcaagttgcgaaaaacccaattccaccaacaatgtggtcatataatgatgaagtgaaagattacgcctatgatccagaaaaagctaaagccttattaaaagaagccgggtttgaaaatggctttgaaacggatttatgggcaatgcctgtttcacgtccctataacccaaatgcccgtcgtatggcggaattggtgcaagctgactgggaaaaagtcggtgtgaaagcaaaaattgtgagctatgaatggggagaatacctcaaacgtatgcgtgccggcgatcaccaaactggtatgatggggtggacgggtgacaatggtgatccagataacttcttgaataccttattaagttgtgcggctgttgagtctgggtctaactatgcgaatttctgtcacaaagaatttaacgatttagtgacaaaagctgcccaagtcactgatccagcagagcgtactgcactttatcaacaagctcagttggtcttcaaagaacaagcaccttggattacgattgcacactccacaacctatttcccagtgcgtaaagaagttaaaggctatgtcatcgatccatttggtttacataacttctacgcggttgagctagagaagtaa

SEQ ID NO: 30753 - DNA, 1005 bp, Pasteurella multocida
atgtttcaatttattcttaaacgtcttttcatggttattccaacgtttattgcaataaccttaattacttttgctttagtgcatatgatccccggtgatccgattgaaattcgtatgggggaacgcggtttaacaccagaagtgcatgccgaaatgatgcaaaaattaggcttggatcgtcctttgcctgaacaatactttagctatgttaaaggggtcttacagggggatttaggcacctcatttcgtaataatgaacctgttttaaaagagttttttactcttttccctgcaaccgttgagttagctttttttgcattattgtggtctttaattttagggatatttttaggtgttattgcggcagtcaaaaaagagtcttggatttcacatacggtgacatctttgtcgctgacggggtattcgatgccgattttctggtggggattgattttaattctttatttttctactccgcttggtttacccgcttcaggacgcttacccgctgaatattggattgaagcggataccggttttatgctgattgatacttggaattctgatgaaccgggggccttcttagctgcgattaaatcactcattttgccctctattgtgcttggcacgattcctctcgcggtgattacacgtatgacgcgttcctcgatgttagaagtgttaggcgaagattatattcggacggcaaaagcgaaagggctaaataccacgcgtatcgtggtggtacacgcattacgtaatgcgttgattcccgtagtgaccgtggttggcttgattattggacaactgttatccggagcggtattaacggagaatattttctcatggccggggatcggtaagtggattattgatgcgattaactcgcgtgattatcctgttttacaaggttcggtgctgattattgccaccttaattattattgtcaatttaacagttgatgtattttatggcatcgtcaatccacgtattcgccatacttaa

SEQ ID NO: 30754 - DNA, 981 bp, Pasteurella multocida
atgcaagaacttgagagacaagcatctttgttggatgcagtaaatttgaaaaaatactatcccgttaaaaaagggatattgagtaagccgaagttagtgaaagcggtagatggggtttcatttaccttagagcgcggtaaaacattggcgatcgtgggggagtcaggttgtgggaaatctacacttggtcgcatgctgactatgattgaagccccaacagaaggtgaacttttctataaaggacaaaactttttagaaaatgacacggccacacaaaaattgcgtcgtaagaaaattcaaattgtgtttcaaaatccttatgcttctttaaatccacgcaaaaaaattggcacaattttagaagaacctttgttgatcaatacggatttgaatgccaaagaacgtaagcagcaagtgttggaaatgatggaaaaagtgggcttgaaaccagagttttacgatcgctatccacacatgttctcagggggacaacgtcaacgtatcgcgattgcgcgtgggttaatgttacgccctgatattgtggtggcggatgaaccggtttctgcgcttgatgtgtctgtccgtgcccaagtattaaacttgatgatggatctgcaagaagaaatgggattatcttatgtgtttatttcccacgatctttcggtggtggaacatattgccgatgaagtgatggttatgtatttagggcgttgtgttgaacaaggtgaaacgaaggcgatttttaaccatcctcgtcatccttacacgcaagccttactttcagctacaccgcgtttggaagctgaacatcgtcgcgaaaggattaaactgacaggtgagttgccgagtccattaagtccacctaaaggctgcgcttttcatgctcgttgtcgttttgctatggaaaaatgtgccctcgagaaaccagctttaaaacagtatgaagatggcagcaagattgcctgctttatgctagattaa

SEQ ID NO: 30755 - DNA, 1596 bp, Pasteurella multocida
gtgcggcacgttaaattagcaagagatagacgaagaagaaaattgcagattaagatcgcaattttttttagcattattttattcatcgttctcgttgtatcgttgggaaaaaaagaagaagggcaagattcaagtgcagatagccaaacacaaacagaaactcaaattgaaaagcaacctgccttatctacagccacggtagaatcgccttcttcggtacaagcggatagcaccctctctcctcccccatccgaggaatcagtagaaaagcaagcgataacagaacatcatactgagtcttctgctgtcagtatggatgaaaaaaacagtgacactcaagtagatgcatcgtcacaagaaacgacagcaaaacccgcagaaaatacactagatgcaacgtctttttatgatgatttagaagcaaaagatgatgaggttgatgaaatcaaacctgatatgctagatgaattggcagcctttcctgaacctgttcgtcatgcgctgagtgatttgtttgatgttatggatcaggcaatgcggattaaaaatcagttcagccacacggtggtaaaaggggattccttaaaagatgttttagagttgtctggcttagatgccagtgtaagcgagcgcttaattaaagcctatcctgaatttaaaaacttaaagccgggtcagcaattttattggatcttagataaccaaggcgaacttgaataccttaattggttggtttcagagagagaagaaaaaatctacgaaaaaacagcagatggtcaatatcagcgtgaaattttaaagaaacaaagtgtttggaaaaaagaggtgttaaaaggcagaattgacggttcttttaataccgcattaagaacattaggtttagatatccgccaaattaatcaacttgcgaatgcattacaatggcaaattaatttaaaacggctaaaaaaaggcgataaatttgcggtattagtgacacgtgaatatattgaagggaagctgacggggcaaggtaatgtggatggaatccatattatttcagctggcaaaagttattatgcgattcaagcgagtaatgggcgttattataatcgccaaggcgaaacgctaggcaaaggttttgctcgttatcctttacaacgtcaggctcgcgtttcttctcattttaatccctatcgacgccacccagtgactgggcgtattgcaccacataaaggcgtggattttgctatgcccgttggtacaccggtcattgcaccggcggatggtattgtggaaaaagtcgcgtatcaagcaaatggcgcaggacgttatattgtggtacgacatgggcgtgaatatcaaaccgtttatatgcacttaagccgtgctctagtcaaagcagggcaaaatgttaaacgtggtcaacgtattgctctttcgggaaatacagggcgttcgacaggaccgcatttacattatgaatttcatattaatggtcgcgcggttaatccattgactgtgaaattaccgggaacaagtagtggtatgggaactgctgaacgtaaacaattcttagtgaaagcgaaagaaattgagcggcagctcagactataa

SEQ ID NO: 30756 - DNA, 948 bp, Pasteurella multocida
atgcctgatataaaactctttactggtaatgcaacaccagaactagcaaaacgaatttctgaacgtttatatctctcattaggtgatgcgactgttggtcgtttcagtgatggagaaattcaagttcagatcaatgaaaacgtacgtggtagtgatgtgttcattattcaatctacttgtgccccaacaaacgataacctaatggagttgattgtcatggttgatgcgttacgtcgagcatctgctggtcgtattaccgcggtaattccttattttggttatgcacgccaagatcgtcgtgtccgctctgctcgtgtaccgattacagcaaaagtcgtggctgacttcctttctagtgtaggtgtcgatcgcgtgttaacttgtgatttacacgcggaacaaatccaaggtttttttgatgtgcctgttgataacgtctttggttcacctgtattagtgcatgatatgttaaagaaaatcgacatgcaaaatccgattgtcgtttcaccagatattggaggcgttgtacgtgcccgcgctatcgcaaaattactgaatgataccgatatggcaattattgataaacgtcgtccacgtgccaatgtagcacaagtcatgcatattatcggggatgttgcaggtcgtgattgtattcttgtggatgatatgattgatactggtgggacattatgtaaagcggctgaagccttaaaagaacgcggggctaaacgtgtttttgcctatgcgacccacgcagtattctctggctcggctgcgaaaaatcttgccagtgatgcattagatgaggtggtagtaacagacacgatcccactttcaccagaaattaaagcattaaacaaagtccgcgtattaaccctttcaggtatgttggctgaagctattcgtcgtatcagtaacgaagaatcaatttctgcaatgttcacctag

SEQ ID NO: 30757 - DNA, 1263 bp, Pasteurella multocida
ataaaaatctatttagttggaggtgctgtgcgagatcagctcctcaatcttgttgtgaaagatcgtgattgggtcgtagttggtgcaacgccagatgatttactatcacaaggctatcaacaagtcggcaaagactttcctgtttttctgcatccccaaacaaaagaagaatatgctctcgctagaacagaacgtaaagcgggtagcggctatactggcttcatttgtgatttttcgcctacaatttctttggaacaagatttaagtcgacgtgatttaactatcaatgcactcgctcaagatcttgacggaaaaatctatgatttttatggtggtcttacggatttaaaacaacgtcttttacgccacgtttcccccgcctttgcagaagatccgctacgcgtattacgtgtggcacgttttgctgctcgctaccatgctcttggcttcactattgcatctgaaacccgcgaattgatgcaacagttatcacaaagtggtgagctgtcaaacctaaccgcagaacgtgtctggttagaaacagaaaaagccttattagaaccgcatcctgaagtgtatttccaaacgctacaagaggtgggtgcattacaagtactgtttcctgaattagctgcattacagggcgtccccaatcccgcgaaataccatccggaaatagatacgtttgtgcatactatgctggtcctacaacaagcagtcttgttgacagaaaacacggacagtgacaaaagtgcggtacgttttgctgcaatttgtcatgatttaggcaaagccttaacaccaaaagaaatattgccacatcattatggacatgaaaaagctggtgtcatgccgacaagacgcttatgtcagcgctttaaattacctcacgcaattcaagattttgcagaactttgttgtgaatatcattcgcacatacacaaagcctttgaattacgtgcggagacaatattgaaattattcaatcgtctagatgtctggcgtaagccggagcgttttaaagcacttttgttagtctgtattgcagacacgcgtggtaggaccggatttgaacaagttgactatccacaacgtgaatttctctggcaactttatcaaagtgctctgcaggtcaacgtgcaagacatcatccaacaaggtttccagcagcaagccattcgtgatgaactcaatcgccgtcgtataatcgcgattaaacagacacgcgcggaaatcctcccgcgctttactaatccgtgttaa

SEQ ID NO: 30758 - DNA, 1263 bp, Pasteurella multocida
atggaactacttaatcaatatggtactttgctcgtttttattacggctgcatttggttttttcatggcctttggtattggtgcgaatgatgtatcaaatgcaatgggcacctctgttggctcaggtactattactgccaagcaagccattattattgcaatgatttttgaatccgccggggcttatttggcgggcggtgaagtgaccgaaaccattaaaagcggcatcattgatcccatgaaatttgtggacacaccagatattttagtcttagggatgatggcggcgctatttgcttctggattatggttattaattgcttcacgcatgggttggcctgtatctactacgcattcgattgtcggtgcggtggttggctttgcttgcgtcaccgtgggtaaagaggctgtagaatggagtacaattaaaaacattgtcggcagttggtttatcacaccggttattgcgggcattgtcgcttacggtatttttgccagcacgcaaaaattgattttcgatactgatgaacccttaaaaaatgcgcaaaaatatggtccttactacatggggatcaccgcctttattctatgtattgtgacattaacgaaagggctaaaacacattggtttacatttaaatggctttgaagtctttctgatttcattactgattggcattatttctatcgtggtgtgctatttttatttcagaagcccaaatttcatccaaaaagtacaacgtggtacctttggtggtgttgagaaagtattcagtattctaatgcttctgacagcttgtgctatggcattcgcacatggttctaatgatgtcgctaatgcgattggtccactttctgcggtcgtttcgattgtagaacatggtgggcaaattttgcccaaaacacaattggcttggtggatcttaccacttggtgcaatcggtattgtgatgggcttagtcgtattgggttataaagtgatggcaaccattggaacaggcatcacggatctcacgccgagtcgtggttttgcggcgcaatttgcgacagccatcaccgttgttgtggcgtcaggtactggattgccaatttcaaccacgcaaacattggtaggcgccgtattaggtgtcggttttgcacgtggtattgctgcactcaacctgaatgtgatccgcaatattattgcttcttggatcgtcactttacctgcaggtgcattttttgccattatcatttattatgtacttagctttattttccactaa

SEQ ID NO: 30759 - DNA, 1071 bp, Pasteurella multocida
atggggaatgaagtcgagttaaaattagctgtgacgcccaagtttgctgatttattacatcaagaattaacgaattttcgtattcttgcgcataacacaatctttttggcaaatacttattacgataccgcggatcgcgtcttagcaaaacacaaaatggggctacgtgtacggcaagaaaatcaacaatacacgctcacattaaaaacggatggtgaggttcacggcggtttgcatatccgccctgaatataatgttactttgcctgatgcgcagccaaacatatcgttattagttgaaaaatatgctttaacattgccgaattatgcacaatgggaattaaagcctgtatttagtacagactttgaacgtgagagttggttaatcgaatgtggtaacggaactcatattgaagtggcgtttgatcaaggtaaaattgtcgcgggagaaaaacagacaccgatttgtgaagttgaatttgaattaaagtcaggtcttcctattgatttacttcgttttgtccaaacgcttacattagaaaacgagatccgtttaagttcagcgtcaaaagcaaaaagaggttatcttttagcaaatccgacttccatgacagtaacgaactggttagagaagtggcgcgagtttctacaatttacacaaaacatgacaagtgccttggctaaattgagagcattatttcgcttagaacaagacttaattgaagaaacctttgcaattggagcagactattttgctgcagatttcttgcgtacagtagagcggattggcgcgttctttaatctctatcactattatgttgaacaggcaacgttgttagacagcgcgttaaatcaacaggtcggcgaggagaatcttgcgtgtgaacaaacatatttactggacttgttagacagtcatcacagtttattacaacaagtacgtgaattgattcgtttgcacagtgaaagtcaagataatcgccttgtgttagacaaattactgggcttgttgcaaacaggtcattatgtgaaacgtatgatccatttaacttttttaacgttgagtaattaa

SEQ ID NO: 30760 - DNA, 1380 bp, Pasteurella multocida
atggctaaggcacctaaaacagcatatgtgtgtaatgattgtggcgcagagttttctcgttggcagggacaatgtgcggcatgtaaagcttggaatacgattagtgaagtgcgtttagtgtcatctagcaatagcgcaaaaggcgatcgttttagtggctatgctggtgaaacgcgcgcgaagatccaaacccttgctgagatttcattacaggaaacaccgcgtttttccagtggttttcacgagttggatcgcgttttagggggcggtgtagtaccgggcagtgcaattttaattggtggtcatccgggcgcaggcaaaagtaccttattgttacaagtgatgtgtggtttagcacaaaatatgaccgcactttatgtgacaggggaggaatctttgcaacaggtggcaatgcgtgcaaaacgattaggcttacctacagataaattaaacatgctgtctgaaacgtcagttgaacaaatttgtcagctagcggatcaattaaaaccgcaaatcatcgtgattgactccattcaagtaatgcatttagcggatattcagtcttcgccagggagtgtggcacaagtacgtgaatgtgcctcttttttaacgcgttatgcgaaaactcgccaagtagcgattattatggtgggacatgtgacgaaagacggaaccttagcgggtcctaaagtccttgagcattgtatcgactgttcaattttgctcgaaggagaggcggattctcgttatcgtactctacgtagccataaaaatcgttttggtgctgtgaatgaactcggtgtgtttggcatgacagaacaagggttgcgtgaagtgaaaaatccatcagccatttttttgagtcggggcgaagagcaaacgccggggagttcagtgatggtgatttgggaaggaacacgccctttattagttgaaattcaggcgttagttgaccattccatgttagcaaatccgcgtcgtgttgctgtagggttagaacaaaaccgtttagccttgttattagcagtattacatcgtcatggtggcttacaaatgtcggatcaagatgtgtttgttaacgtagtgggcggtgttaaggtcacggaaaccagtgcagatttagcattgttattggcattaatttccagtttccgtaatcgcccattgccacaagatttagtagtttttggtgaagtggggttagcgggagaaattcgcccagtgccaagtgggcaagagcgtattggtgaggcagcgaaacatggctttaagcgcgcaattgtacctttcgcaaatagaccgaaaagtgcggtgccgaatatggatgttttcaccgttaagaaattgtcggatgccttggcaattttagagaatttctaa

SEQ ID NO: 30761 - DNA, 2793 bp, Pasteurella multocida
atgattaaacgaatttctgaaaaatttacccctaagcagtatctattggcatttttctttcttgtgggcatgctgtttggcgtgtatttgatcgttgcttggtcaagttattcgccattagataattcgtgggcgtcttcaagctatattcctactacgattaataaagcagggagattcggtgcttggtttattgatttattttttgtgttatttgggcacgttgggcatattattccctttcttatttttggtatttctttttacttctggcgtcgtaaaggcaaagtgccattcagcttttttcgcttaagtctttggcttttgggcttcagtatttttttatgtggcgtgtgtgttttatttaccttactgttttctaatacgccttactatttatctggtggtgtgttgggaggaagtttagtgacagcctttttccctatgttagattttgtggggttaatgctttctggcactttgttagcactacttggttttgtcctttgttcaggtacttctcttattcgttcgtgtatttatttttatgattggttgaccatgaaaaatcctacacaaacgcaagaggaagaaacgatttccaccacaccagtacaacaagaactggcattgcaagaagaaccgtcaatacaaagcataaatgaaggtgaacgtgtttttgttagcgaagcgccatcagccacaatggatgaagagaagtcattaatcaatattgaaaacttgattcaaattcaggggctcgaatctgcttctcaagcgaaagaaagcacgatcccaacagtacctctagatgatgttaatcaggtagaactcggcggttatgctgtcgaaccagaactcgctttgccaagtgtcagtgtggcttttgttgaagacactgcgctatcttcctctgaggcagaacatgaggatagcaagccattcactacacaaattcctcacaccgcaggagagccactcgttgcgactgagtttgcgatgcctaaagtttcgctatctccgttagatacaagtttatcggacaatagcgagatagcacgggaagacgaaagtgatcttgctcgtcaatttgccgcgcaagagcaacagcgccgtgaggaaatggctttgcgtgcaaaagccctcaatgcggaagaagcattgcaaacaatcttagcggaacctgaaattaggcaaaatagcacggcggatgtcagtgacagcacgacaccgcattataaaccttatggtgagtcactaattcatccagcgttacaacaaaaggtgacgacgcaggtaaaaccgactacccctatgcccagtttggatttgttagaacatcgcccgagtcaagcgcatcgcattacacaagaagaaattattgaaacctcacaacgaattgaacatcaattacgtaactttggggtgaaggcaacagtgaaagatgtgttagtgggacctgtggtgacacgttatgaacttgaattacaaccgggtgtcaaagcatcgaaagtgagcagtattgatacggatttagcgcgcgccttaatgttccgttcgattcgtgtggcggaggtgattccgggaaaaccttatatcggtattgaaacccctaatgttaatcgacaaatggtgacattacgtgaagtgctagacagtgatgtgttccgtcagtctaactctttgctttctatggcattaggtaaagatatcagcggtaaaccagtggtggtggatttagccaaaatgccacatttattggttgcaggctccaccggttcagggaaatctgttggggtaaataccatgattttaagtttgcttttccgggtgaaacccgaagaagtaaaatttatcatgattgatcctaaagtagtagaactctcgatttatgatggtattcctcacttgctgacggaagtggtgacagacatgaaaaaagccgcgaatgcattgcgttggtgtgttgatgaaatggagcgtcgttaccaattactgtcggcattaagagttcgtaatattgaaggctacaatgaaaaaattgaggaatatgaggcgatgaatatgccgattccgaatccaatttggcgacctggcgatactatggatacgttaccaccggcgttggaaaaactcagttatattgttgtcattgtagatgagtttgcagatttaatgatggtggcgggcaaacaagtcgaggagttgatcgcccgtttagcacaaaaagcccgagcgataggtattcacttgattttggcaacacaacgtccatcggttgatgtgattaccggtttgattaaagccaatatcccaagccgcattgcttttaccgtcgccagtaaaattgattcacgcaccattctcgatcaagtgggggctgaagccttattaggacgaggggatatgttatattctggtgcgggctcttctgatttagtacgggtgcatggtgcttttatgagtgatgatgaagtggcacgggtagtagatgactggaaagcacgtggtaaaccgaattatattgaaggcattttagacagcggggaggatgaggctacggagagtaatggcgccaattccgatgccggtgagctagacgatttatttgatgaagtggtggagtttgtaaccagtacaggaacgacgtcgacttcatatattcaacgcaaatttagagtaggctttaaccgggcggcccgaattatggatcaactcgaagaacagggcattgtttctgcgatgcaaaatggcaaacgtgaagtgcttgctagacgttcttcggacttttag

SEQ ID NO: 30762 - DNA, 1338 bp, Pasteurella multocida
atgtcgaatttaagttttgactttgcccaacaggcttttcaacctttagccgccagaatgcgtccgacgacattcgctcaatattgtgggcagtcgcatttaatcggtgagggaaaacctttacgtaaagcacttgatgcgggtcatgtgcattccatgatcttatggggaccgccaggtacgggcaaaacgactttagcagagattattgcacatcagattcatgctgacgttgaacgtatttctgccgttaccagtggtattaaagaaattcgtgaggcgattgaacgagcaaaagaaaatcgtttagctgaacgacgtacgatcctgtttgttgatgaagttcatcgtttcaataaaagtcaacaagatgcctttctgcctcatattgaagatggcaccattatctttattggggcgacaactgaaaatccttccttcgaattaaataatgccttactttcgcgagccaaagtatatattctaaaatcgttgagcacacaagaaatcaccgaggtgttaaagcaagcactgttagatgaagaacgcgggctaggcaaagtgcggtttgttttagaagagaatgtattagaatgtttagctgaatatgtgaacggtgatgcacgcttagccttaaatagtcttgagctgatggcggatatggcagaggaaacggaagcagggaaagctttgacactcagcttattaaaaaacgtgttaggtgaacgtcaagcgcgttttgataaacaaggtgatcggttttatgatgcaatttctgcgctacataaatcagtacgaggatctgcaccggatgccgcattatattggtatgctcggattttggcagcggggggggatccgctttatgtggcacgacgtttactcgcgattgcttctgaagatgtgggtaatgcggatccgcgcgcgatgcaagtggcacttgctgcttgggattgctttactcgagtcggtgcggcggaaggggagcgtgcgattgcacaagcgattgtttatctggcggttgcaccgaaaagcaacgcagtttatcgtgcatttaatcaagcgaaacaacacgttaaagaaacgccagattatgaagtaccagcacatttacgcaatgcgcctacccatttaatgaaaacattgggctatggtgaagcataccgttatgcgcatgatgaagaacatgcttatgctgcgggcgaaaattatttcccagaagcattgaaagacacacaatattattttccaactcatcgtgggatggaaattaaaatcaaagaaaagctcgattggcttagacaacaggatcaacaaagcaagaaaaaacgttattga

SEQ ID NO: 30763 - DNA, 1287 bp, Pasteurella multocida
atgatcgatccaaatctattgcgtaataatcttgaggaagtggctgaaaaattaaaagtaaaacgtaattttgtgctagatgttgccttattaagtgaattagaagaacaacgtaaaagcttgcaagtcaaaacagaatcacttcaagcagaacgtaatgcgcgttcaaaaaatatcggccaagcgaaagcacgtggtgaagatatttcagcattattaaacgaagtggaacatatgggcattgaattaagtaccacaaaagcacatttggatgaagtgttagctgaaattaaccagatcgttctcgccattccaaatttacctgctgatgaagttccgcttggcaaagatgagagcgaaaatctcgaagtgttccgttggggaacaccaaaaacctttgattttgatgtgaaagatcatgtgtcattaggtgaaggtttgaaagggctagattttgcggcaggagtaaaattaagtggctctcgttttgtggtgatgaaaggacagatcgccaaattacatcgtgcgctgtctcaatttatgttagacctccatactgagcaacatggttataccgaaacctatgtcccttatttagttaatcacgctactttatatggtaccgggcaattaccaaaatttggtgaggatttatttcacaccaatgcgttagaaggcgaacaaccttatgcattaattccaacagcagaagtacccgttacgaacttagttcgtgatgaaattctcgatgaagcggatttgcctttgaaaatgacagcgcatactccttgtttccgttctgaagcaggatcctatgggcgtgatacccgcggtttaattcgtatgcatcaatttgataaagtggagttggttcaaattgttgcacctgaaacttcaatgcaagtgttagaagaattgacaggacaagcagaaaaagtcttgcaattattagagttaccttatcgtaaagtcttattatgtacaggcgatatgggattcggctcatgcaagacgtatgacttagaagtatggttaccggctcaaaatacctatcgtgagatctcttcatgttcaaatatgtgggatttccaagctcgtcgcatgcaagcgcgttgccgttctaaaacagataagaaaacacgtttagtgcatactttaaacggctctggcttagcggttggacgcactttggtcgcgattttagaaaattaccaaaatgcagatggtaccattaccgttccaagcgtattacgtccatatatgggcgggttagcacagattggttag

SEQ ID NO: 30764 - DNA, 1047 bp, Pasteurella multocida
atgaaaaaattaactggcattttaactgctagcgtgatgatgctgggcgtaagcaactatgcaagcgcagctaacaatgaagtttacctttatacttggactgaatatgttcctgaaggtttattagatgaatttaccaaacaaacgggaattaaggtcattgtttcaagccttgagtcaaacgaaaccatgtatgccaaattaaaaactttggggaaagacggtggctatgatgtgattgcaccaactagctattttgtgtccaaaatggcacgtgaaggcatgctaaaagagcttgatcacagtaaattaccggtcattaaagagcttgatccaaatatgcttgatcgcccttacgataaaggcaataaatattcattaccacaactctttggtgcgactggcattgcttataataccaccaaccaagatccaagccatttccaatcttggggggatttatggaatgccgaattcaaagggaaagtacaaatgctcgatgaccctcgtgaactgtttaatattgctttattaaaaatggggaaagatcctaatactcaagatccagcagtattaaaagaagcctatgaggaattattaaaattacgtccaaatattctttcttttaactcggataaccctgccagtacttttatttcaggtgaaaccgatattggcttgctgtggaatggttccattcgtatcgccaaaaatgaaggggcaacggtagagatgatttatccaaaagaaggcactatgttatggatagataatcttgctatcccttccaatgcgaaaaatacggaaaatgcttataagctcattaactatttattgagtacagatgtatccgaaaaactgactttaaatatcggctatccaacctcaaaccttgaagcgttaaaacgcttaccaaaagaattaaccgatgatcatgcaacgttcttaacacaagaggttattgatagaagccaatggcaagtggacgtagataatgctatcgatttgtatgaagggtattatcaaaagctcaaagcagcaaaataa

SEQ ID NO: 30765 - DNA, 1077 bp, Pasteurella multocida
atgattaccctcaacaggagaatgatagagatgaaaaaatttgcaggtcttgtgactgcagggatcatgacattcggcttagccgcaaatgcacatgcaaccaatgacactgtttacctttatacttggacagaatacgttccagatggtttattagatgacttcacaaaagaaacgggcatcaaagttatcgtttcaagcttagaatcaaacgaaaccatgtacgccaaattaaagacacaaggcgaaaccagtggttatgatgtgattgcaccatcaaactattttgtgtctaaaatggcgcgtgaaggtatgttaaaagagctagaccacagcaaattacctgttatcaaagacttaaatccagattggttagacaagccttatgataaaggcaacaaatactccttgcctcagctattaggtgcaccgggtattgcatttaataccgatagctataaaggtgaaaactttactgcttggggtgatttatggaaacctgaatttaaagggaaagtccaattattagatgacgcacgcgaagtgtttaatattgcactgttaaaattgggtcaagatccaaatactacggatcccgcaatcattaaacaagcttatgaagagctgttaaaattacgtccaaacgtattgtcatttaactcagataacccagcgaactcattcatttcaggtgaggtggaagtgggtcaattatggaatggctcagtccgtattgcgaaaaaagaacaagcgccgttaaacatggttttcccgaaagaaggtcctgtactttgggtggataccttagctattccagctaactcgaaaaaccctgatggtgcacacaaattaattaactatttactaagtgcaaaagttgctgcacagttagcagaagaaattggttacccaacatcaaacttaaaagcacttgaattattgccaagcgaagtgacgcaagatccagcagtttatccaacggctgaaattctacaaaatagccactggcaagatgatgtaggtgatgcggttgaattatacgaaaactattatcaacaattaaaagcggctaaataa

SEQ ID NO: 30766 - DNA, 1239 bp, Pasteurella multocida
atgttaaaccaacagcaaacctataagctattagaacgctttttacactataccacctatgatacccagtcgaaaagcggggcgaaaatatccccgagctcagcgggacaattaaagcttgccaagcatttacaacaggaattattcgccctcggtttacaagatattgacatctctaaacattccgttgtgacagcttttcttccttccaatgtcaatccacattcgccaaccattggtttcattgcgcatttagatacagcaacacaatgtagcggtaaaaatgtgcaagccgaagtgattgaaaattaccgtggtggcgatattgcgctaggggtgggcgaggagtttattagccctgcgcattatcaatttttacatcaactgattgggaaaacgttagtggttgctgatggcaatactttactaggtgcggataataaagctggtattgcagaaattatgaccgcacttgcggtattaaaagaagaaaatttaccgcattgtaacattcgtgttgcctttacgccggatgaagaaattggtttggggatgcaattttttcctgtagaaaaatttccgtgcgattgggcttatactattgatggtggtgaagtcggtgaattagagtatgaaaactttaatgccgcgacggcgattgtgacgattgaaggtgtaaatatgcacacaggatcggcaaaagacaaaatgattaatgcgcttacgcttgcttgtgaatttcagcaaggttttccagcagaggaaacaccagagcagacagaagggaaacaggggttttaccatcttagtcactttaccggacatgtggaaaaagtggaattgcagtatttaattcgggatttcgacagggacggatttgagcaacgtaaaatttttattcagcagcttgttgaccggtttaatcaacaaaaacgtttaaaaaagccaatcacacttgaaattaaagacagttataagaacatgaatgaagtcgtgaaaaccgtgccacaatccgttgaattggcggatagcgcgatgcgagaatgtggcattgagccgattcataaagcgattcgtgggggtaccgatggcgcttggttagcggaacagggattagcttgcccaaatgtgtttacgggaggatataattttcacagtaaacatgagttaattactttagaagggatgcaaagtgccgtcaatgtgataacgacgattgtcagactggcgacaagctaa

SEQ ID NO: 30767 - DNA, 1119 bp, Pasteurella multocida
atgctaaaaaatagagatcttgttcacaaattcataacaaagcgatttacttctgaccgcgttttccgctatgttgttgccaccacaaaccgactcaaacacaatatagaggatacaactatgttaaaatcgactcttaaaaaagcggttagcgcgatgataatcagtgctgccttctctttctctgcctgggcaaatgaacctatcgtgattaaattctcacatgttgttgccaatgaaacaccaaaaggtcaaggcgcattgatgttccaaaaactcgtggaagagcgcttggcgggtaaagtgaaagtcgaggtatatccaaactcctctctctatggtgacggtaaagaaatggaagcgttattacttaataacgtacaaatgcttgcaccgtctttagcaaaatttgataaatacacgaaaaaaatccaaatctttgatcttccgttcttatttgacgatattgaagccgtccaacgttttgaacaaagcgaagccggtaaatccttattgaagtccatggaagagaaaggcattacaggtcttggttattggaataatgacttaaaacaactgtccgctaataaagaattacgtgagcctaaagatgcgcgtggcttgaaattccgtgtacaaaactccgaagtgttagatgcccaatttaaagcgttgaaagccgttccacgtaaaatggcgttcggtgaaatgtatcaaggtttacaaactggtgtagtaaatggtgcagaaaatccatattccaacatttactcacaaaaaattcatgaagtacaaaagttcattacagagtcaaaccacggattactttcttacatggttatcgttaataccaatttctggaacagtatccctgaagatattcgtgcagaattgagtaaaattcttgatgaagtgtctgttgaagtgaataaaaaatcacatgatcttaacttagcggacaaacaaaaaatcattgactctaaagcttctacgattattacgttgaccccagaacaacgtgaaaaatggcgtgatgcggttcgtcctgtttggaaacaatttgaaggcgaaattggtgcggatttaatccaagctgcagaagcctcaaataaaaagtaa

SEQ ID NO: 30768 - DNA, 1287 bp, Pasteurella multocida
atgtctgaattaactgcaaaactgacccttagcgatggacgtgaatatgacctacctgtacacaaaggctctcttggttatgatgcaatagatgtacaatctctggttaagaataaactgttcaccttcgatccaggctttatgtcaacagcctgttgtcgctctgaaattacttatatcgatggcgataatggtgttttattacatcgaggctaccctattgctgagctggctaaaaatgcagattaccttgaagttgcgcatttattgctttttggtgaaagaccgtctcctgaagaatacaaaaactttacgcaattagtccgtcgtcataccctcgttcacgaacaaatctctcgctttttccacggtttccgtcgtgactcacacccaatggcaatcatgtgtggggtaagtggtgctttagccgccttctaccatgactccttagatattaatgatattactcaccgtgaaatcaccgcaattcgtttacttgctaaaatgccaactttggcggcgatgtgctataaatactcgattggtcagcctttcatgttcccgcaaaatcatctctcttattccggtaatttcctttacatgatgtttgcgacgccttgtgaaccttacatcgttaacccggtattagagcgtgccatggatcgtattttcattttgcatgctgaccatgaacaaaatgcgtccacctcaaccgtgcgcaccgcagcctcttctggcgccaatccatttgcctgtattgcagcaggtattgcctcactttggggacctgctcatggtggtgctaatgaagcctgtatcaatatgttagaagaaattggtacagtcgatcgtattcctgaatttattgctcgtgcaaaagacaaaaatgatccattccgattaatgggctttggtcaccgtgtgtataaaaactatgacccgcgtgccaaagtcatgcgtcaaacttgtcatgaagttttaaaagagctcaatattcaaaatccgctctttgatgttgccatggaattagaacgtattgcactcagtgacccatatttcattgaccataagttgtatccaaatgtggatttctattctggtattattctcaaggctattggcattccaacatccatgtttacggtgatgttcgccttagccagaacggtaggttggattgcacattggaaagaaatgttcaaaccgggcaatatgaaaattgtccgccctcgccagctctacatgggtgaaaaagaacgttcttttgaagctatggacaagagttaa

SEQ ID NO: 30769 - DNA, 2796 bp, Pasteurella multocida
atgcaaaaaaatacacccattagcgagtggttaacttcaagtgctctcggtggtaccaatcagtcttacatcgaagaactctatgaagattaccttcgtgatcccgactctgtcgatgccagttggcaaactatttttaacgcccttccgaaatctcatactgccgttgagcaaccccattcccaagtccgtgattatttcaaacgtttagcccgcgataattctccaaatggtgtcagtgttattgatcccaatgtaagtgcaagattagtgaaattactggcttacgtcaacgcccatcgcaatcgtggtcatttgcatgcagaccttgatcctttaaatctttggcaacggatggacgcgccaaccctcgattataaataccatggttttacggaaagtgatctggatgaaacctttgatttagggggcgaagttgcgcaccgcaatcaaatttcgttacgagaattacaagatttattacaaaaaacctattgtggcacgattgggttagagttcatgcatgttaacgatgtagaagccagaacctggttgcaaaataagcttgagtcacgtgtaacgcaaggctttaacaaagaagaacaacttaaatttttagaagagttaacggcagcagacggactagagcgctatttaggggcgaaattcccgggtgcaaaacgtttttccttagaaggaagtgattcgtttattctcttgatgaaagaaattgttcgtcatggtaaacgtaatggcattgatgaaattgcgatggggatggcacaccgtgggcgtttgaatatgttggtcaacgtacttggtaaaaaaccatcagaattatttgatgagtttgcggggaaacacaatggtaatggaaccggtgatgtgaaatatcaccaaggtttttcctctgattttatgaccgatgatggcattgtacatttagtcctagcttttaacccttctcacttagaaattgtcagcccagtggtaattggctcggtgcgagcaagacaaaaacgcattaatgaccatgaaaaagccaaagtgttaccagtgactgtgcacggcgattcagcggtcattgggcaaggtgtggtgcaagaaacgttaaacatgtcaggcacccgtggttatagcgtgggtgggacaattcgcattgtgatcaacaaccaaattggttttactacttcaaatccgcatgatactcgttctaccgaatactgtactgacattgctaaaatgattgaagcgccagtgatccatgttaatggcgatgatcctgaagcggtagcctatgctgcacgtatggcggtggaataccgtactttatttaaacgggatattttcattgatttagtctcttatcgtcgtcatggacataatgaggcggatgaaccttcagcgactcaaccattaatgtatgaccgtattaaaaaacatccgacgccacgcaaagtgtatgcggatcgtttgattgcacaaggtgtgattaatgaagaagccgcgacagagcttgtgaataattaccgtgatgccttagatcgtggtgattgtgtggtcgcggaatggcgtgaaatggatttaaccactaaagattggacgaaatatttaagccgtgaatggtgtgaatacgaaagcaaatttgatgcagcacgtttcaaagggttagctcaaaaagtatgtgaatatcctgcgcagcatgaattacattcacgcgtcaataaaatttatgccgaccgcacattaatggcaaatggtgagaaattattggattggggtatggcagaaaccatggcgtatgccacgttgttagatgaaggctatcatgtgcgtttatctggtgaagatgccggacgtggtactttcttccatcgtcattccgttttacacaaccaaaaagatgcaaccctttacatcccattagcgaatttacatggttcacaagggcgctttgaagtgtgggattcagtcttaacagaaaatgccgtgttagcctttgaatatggttacgcgacaaccgatccaaaaaccttaaccatttgggaggcacaatttggcgatttcgctaactgtgcacaagtggtggtggatcagtttattagttctggtgaacagaaatggggcagaatgtgtggtttagtgatgttgttaccacatggctatgaaggacaaggaccagagcattcatccgcccgtttagagcgttatttacaactttgcgcacagcaaaatatgcaagtctgtgtgccgtcaacgccagcacagatttatcacttattacgccgtcaaatgatccgtaaagtacgtcgtccgttggttgtgatttcaccaaaatccttactgcgtcatccattagcagtatcgacgatggaagaattaattgatggcaaattccaaaatgttattcctgaagtcgatgcattggatccaaaacacgtcagacgagtcgtgatgtgttccggtaaagtgtattacgatttattagagcagcgtcgtaaaaataatcaaagtgatgttgcaattattcgtattgaacagctttatccttatcctcatgaggaaatgaaacagattttagcggattatagccatgtcacggattatgtgtggtgccaagaggaacctttgaatcaaggggcatggtattgtagccaacataattttgtgtcgtctattcctgaacatggcaagctacgttatgttggtcgtccagcttctgcttcaccggcggtggggtatatgtcgttacataatgaacagcaaaccgcattagtgaatgaggcgttagcctaa

SEQ ID NO: 30770 - DNA, 870 bp, Pasteurella multocida
atgtctattttaattaataaagataccaaagtgatttgccaaggctttactggcggacaaggcactttccactctgaacaagcattggcttacggtacgcaattggtcggtggtgtttcgccgggtaaaggcggcacaacccatttaggcttaccggtgtttaataccgtgcgtgatgcggttgacgccacgggtgctacggctagcgtgatttatgtcccggcaccaggttgtaaagatgcgattttggaagccattgatgcgggcattcagttagtgatttgtatcactgaagggatcccaaccctagatatgttacaagtaaaacaacgcttgaatcaaactggcgtgcgtatgattggtcctaactgtcctggcgtgattacgccagaagaatgtaagatcgggattatgccgggcaatattcacaaaaaaggtaaaatcggtattgtttcacgctccggtaccttgacctatgaagcggtcaaacaaaccactgatgaaggttttggacagtccacttgtgtgggaattggtggcgatccaatccctgggtcaaactttattgatattttgaaactgttccaagatgatccacaaaccgaagcgatcgtgatgatcggcgaaatcggtggttccgcagaagaagaagcggctgcttttattaaagactatgtgactaagcccgtcgtgagctatattgctggggtcaccgcaccaaaaggtaagcgtatgggacacgcaggcgcgattatcagtgggggcaaaggcaccgcagatgaaaaattcgccgcccttgaagctgctggtgtgaaaacggtacgcagtttagcggaaatcggcgcagcgttaaaagcactgttaaaatag

SEQ ID NO: 30771 - DNA, 645 bp, Pasteurella multocida
atgaaaattatcctattaggtgcaccgggtgcggggaaagggacacaagcgcaatttattatgaataaatttggcattccacaaatttcaacgggtgatatgttgcgtggtgcaatcaaagcagggacagacttaggtaaacaagcaaaaaccttaatggatgcgggtcaattagtgccagatgatttaatcatttcattagtgaaagaacgtgttgcacaagccgattgtgccaaaggtttcttattagacggcttcccacgcaccattccacaagcggatgcattaaaaacagtcggtatccaaattgactacgttttagagtttgatgtgcctgatgaagtgatcgtagaacgtatgagtggtcgccgtgtacaccaagcctcaggtcgtacttatcacgtcgtttacaacccaccaaaagtagaagggaaagatgacgtgactggcgaagacttaatcatccgtgccgatgataaacctgaaactgtattagatcgcttaaaagtgtatcactccaccacgaaaccattagtggactactaccaagcagaagcgaaagcgggtaacaccaagtacttccgcttagacgggacgaaaaaagtggaagaagtgagtcaagaattagatactattttagcgtaa

SEQ ID NO: 30772 - DNA, 1167 bp, Pasteurella multocida
atgaaagatttatcaaaaatgacctgccttgaagacttacgccgtgttgcgcaacgtaaagtgccaaaaatgttttatgactatgtagtttcaggatcttggagcgaaagcacattgcatgccaaccgtaatgattttcaagcaattaagctacgtcaacgtgttttagtggatatggaaggtcgctcactggaaagcacaatgattggtcaacaagtcaaaatgccattagccattgcgccaaccggctttactggcatggttcaccccgacggtgaaatccatgcggcgcgtgcggcagaaaaatttggcattcccttttctctatcgaccatgtccatctgttctattgaagatgtggcagagcatacgagcgcaccattttggtttcaactctatgtcatgcgtgatcgtgagttcatgcgcaatttgattaaacgtgcacaagcagccaaatgctctgcactgattctgacagccgatctgcaagtgctcggacagcgccatcgtgatatcaaaaatggcttatccgccccacctaaacccactttaagaaactggataaatcttgccaccaaattggaatggagcttaaaaatgctcggtacacaacgccgtactttccgtaatattgtcggtcatgccaaaaatgttggcgatttatcctcactcacttcatggacctcagaacaatttgatccgcgtttaagctgggatgatgtggcagaaattaaagcattatggggaggtaaactcatcattaaagggataatggaaccagaagatgccgaaatggcggtgaaatccggtgctgatgccattgtggtatccaaccatggtggtcgtcagctagatggtgcgttatcctcgattcaagccttgccaaatatagtgagtgccgtagggaacgagattgaagtctggctagacagtggcattacgagtggtcaagatatgctgaaagcatgggcgatgggtgcgcgtggtttcatgactggtaaagcctttttacatggtctcggggcgtatggggaagctggggtacatcgtttactggaaattttctataaagaaatggatgtatctatggcgtttactggtcatcgtaacttaaaagacgtgaccgaagcaattttggtgaaaggcacttaccctaccgcaaactga

SEQ ID NO: 30773 - DNA, 1296 bp, Pasteurella multocida
atgttgctaacacaattccaagccgaaattgcgcaacttccgcccacacaacatcagtttttaattggttttagtggtggtttggattccactgctctattactcttgtttgcaaaacttcgtgaaaaacaaccgcacttaatgctacgggcgattcatattcatcacggactaagtgctaacgcggatgcatgggtcacgcattgccagcaaatttgccaacaagtagccattccactcattgtagaacaggtcaaaattgatcagcacaaagggattgaagcgggagcaagagaagcacgctatcaagcaatccgccaacatcttctgcctaatgaaatgttcgccacagcacatcatcagcaagatcaaaccgaaacctttttccttgccttaaaacgaggtagtggcttggctggtctcggtgcgatgcaaaggaaaagtacactctattgtttacctatctgtcgtccattattaacctttacacgccaaatgttgttagattatgtcaagcaagcaggttgcccttgggtagaagatgagagcaatacagacagccgttatgagcgcaatttcttacgccatgaagtccttccacgcttacggcaacgctggccacattttgacaatgctgtgcagcgcagcgcacaacattgctttgagcaacaacaattactcaatgaactgctacacgccgaatttgcacaacattttgataaaaccgagcgcacttttcagctccgcgattttgctacacgctctcagttaaaacaaaatgcattactccgtttatggttggcgcaatgtgggctttctatgccgtctaaagtgcagttaacgcaattgattcaagatgtcattcttgctaaatcggatagccaaccccaatttcaactgggcgaatattgtgtccgtcgctatcaggatacactctacctgacaccccattttgctgatttatcatcactgcgcttaccaattcacattggcgaaacacttaccttacccgatcatttaggcacactttcactccaacaacaagctgggcaattgcaggtgatttggtctcatccacaacacaccttcacaagcatattgcctttaacagaagatcctatcgaagtacgttttcgctattccggtaaagtgcgtttaagcccaactagtgcgaataaagacatcaaaaaactctggcagcaacatgctgtcccagtatggttacgccaacgtattccacttattttctatgcggacaggttcaaaagtgcggtcggttatttcaatgctatctaa

SEQ ID NO: 30774 - DNA, 954 bp, Pasteurella multocida
atggcccaagaatatttagattttgaattacctatcgcagaactggaagcgaaaatcgaatctctgcgttctgtcgcaagtcaagacgatgaaattaatcttgatgatgaaattgcacgtttgcaaaagaaaagtgccgagttaaccaaaaaaacctttgccaatttagacgcatggcaagtgtcaaaaatggcacgtcatccaaatcgtccttatacacttgattatattgaacgtatttttactgaatttgaagaattagccggtgatcgcgcctttgccgatgataaagccattgtaggcggtttagcccgtttagacggcaaaccggttatggtcatcggtcaccaaaaaggacgcagtgtcaaagacaaagtcaaacgtaactttggtatgcctgcccctgaaggttaccgtaaagctttacgtttaatgcaaatggcggagcgttttaatttaccgattattacctttattgatacaccgggagcatacccaggtgtaggtgcagaagaacgtggtcagtccgaggccatcgctcgtaatttacgtgaaatgtctactttaaaagtaccagtgatttgtaccgttatcggtgaaggcggttcaggtggcgcgttagccattggtgtaggtgataaagtcaatatgttgcaatacagtacttattctgtgatttcacctgaaggttgtgcctctattttatggaaaagcgcagaaaaagcatctacagcagcggaagtcatgggattaacggccaatcgtctgaaagaattaaacttaattgacagtatcattgaagaaccgttaggtggtgcacatcgtgattttgacgcgatggcacataacttaaaacaacgtttattagacgatctcaaagaactggaaatgcttgatgaagataatctacttcatcgtcgttataatcgtttaatggactacggttactgttaa

SEQ ID NO: 30775 - DNA, 1572 bp, Pasteurella multocida
atgaacaacattcacaaccataaaattttaattttggacttcggttcacaatatacccagttgattgcccgccgtgtacgtgaaattggcgtgtactgcgaactttgggcatgggatgtttccgaagccgatattcgtgagtttaatccaactgggattattctttctggtggtcctgaaagtaccactgaagaaaacagcccacgagctcccgaatacgtattcaacgccggtgtacccgtattagggatctgttatggtatgcaaaccatggcgatgcaactaggtggtttaactgaaacttctactcaccgagaatttggttatgcatcagtgaatctaaaagcagcggacgcgttatttgctcaattaaatgatgatgtcacaagttcacagcccaaattagacgtttggatgagccatggcgataaagtgacgcgtttgccagatcatttccaagtcaccgcaatgacctcaacctgtccaattgcagctatgtcggatgaacgtcgtcgtttttatggtgtccaattccacccagaagtgactcatacaaaaagcgggcttgaattattaacgaattttgtggtgaagatctgtggttgtgaacgtaactggacaccagaaaatatcattgaagatgccgttgctcgtcttaaagcacaagtgggtgatgatgaagtgatcttaggattatctggtggcgttgactcttctgtcactgcactactcttacatcgtgcgattggtaaaaacttacactgtgttttcgtagataacggtttattacgtctcaacgaagcggaacaagtgatggagatgtttggcgataaatttggtttaaacattatccacgtaaaagcagaagatcgtttcttagatgcgttaaaaggcatcgatgagcccgaagcaaaacgtaaaatgattggtaaagtctttgtggatgtttttgatgatgaatcgaaaaaactcaccagcgtcaaatggttagcccaaggcacgatttatccagatgttattgagtctgcggcaagtaaaacaggtaaagcacatgtgattaaatcacaccataacgtcggtggtttacctgactacatgaagctaggacttgttgaaccacttcgtgaattatttaaagatgaagtacgtaaaattggtttagcattaggtttaccagccgaaatgttaaatcgtcacccattcccaggacctggtttaggtgtccgtgttttaggtgaaatcaaaaaagaatactgtgatttagtccgccttgctgatgcgatctttatggaagagttgcatgcttctggttggtactacaaagtcagccaagccttcacggtatttttaccagtaaaatccgtaggtgtcatgggtgatgggcgtaaatatgactgggtagtttccctccgtgcagtggaaacaatcgattttatgaccgcacattgggcacacctgccttatgatctcttaggtaaaatttccaatcgtattattaatgaagtcaatgggatttctcgcgttgtttatgacgttagcggtaagccgccagcaacaattgagtgggaataa

SEQ ID NO: 30776 - DNA, 270 bp, Pasteurella multocida
atgtctctaagtacagaaaaaaaagcagcgatcgttgctgaatttggtcgtgatgcaaaagatactggttcttcagaagtgcaaatcgcattattaactgcacaaatcaaccacttacaatctcactttgcaacgcacaaaaaagatcaccacggtcgtcgtggtttattgcgtatggtttctcgtcgtcgtaaacttttagattacttaaaacgtactaatcttgagctttacacttcaactatcgctcgtttaggtttacgtcgctaa

SEQ ID NO: 30777 - DNA, 2049 bp, Pasteurella multocida
atggcaaattcggcacgcgatattttggtcacttgcgccttaccttatgcaaatggtgcaattcatttagggcatttattagaacatattcaagcagatatttgggtgcgtttccaacgtatgcgtgggcataaagtgcattttatttgtgcagatgatgcgcatggcacaccaatcatgttaaatgcggataaattaggtattacaccagaagcattaattgctcgctcgaaagcggatcatgtggcggattttgaaggctttaatattagctatgataattatcattccactcacagcccagaaaatgaagccttaacagcagaaatgtataaaaaattacgtgctaatggctttattaaaagtcgtacgatttcacaattattcgatccagaaaaaggcatgtttttacctgatcgttttgttaaagggacttgcccaaaatgtaaagcagaagatcaatatggtgataactgtgaggtctgttcatccacttatagcccaacggaattaattaatccgcgttctgtggtttctggtgctactcccgtattaaaagaatcggagcatttcttctttgatttacctgcgtttgaaggcatgttaaaagcgtggatcaaatccggttcattacaacctgaaattgccaacaaaatgcaagaatggtttgagtcgggtttacaacaatgggatatttcccgtgatgcgccgtatttcggctttaaaattccggatacagaagataaatatttctatgtctggttagatgccccaattggatatatggcatcgtttaaaaatttgtgtgataaaacaggcttaaattttgacgatttctggaaaaaagacagctcggcagagctttatcacttcatcggtaaagatatcgtgtatttccacagtttattttggccggcgatgttagacggttgcgatttacgcaaaccaactaacgtgtttgcccatggttatgtgactgtaaatggggtgaaaatgtcaaaatctcgtggcacttttattcaagcgtccacctacttacgtcatttagcgccagaatatttacgttattactatgcggcaaaattgaataaccgtattgaagatttagacttaaatttggaagactttgtacaacgtttaaatgcggatgtggtgaataaatttgtcaatctggcttcacgcagtgccggttttatcacgaagcgttttgatggcaaattatcagctgagattgctgaacctgaattattggcagaatttgtggaaaaagccgcgcaaattgcgacttattatgaagaacgcgaattcggtaaagtcgtgcgtgaagtgatgcaattggcggataaagcgaataaatacattgatgacaaagcgccatgggtgatggcgaaagaagagggacgtgaggcggaattacaagctgtttgttcaatggcattgcaattattccgcgtcttagccatttatttaaaaccagtgattccacaaattattgcgcgtgcggaagccttcttacaggatgagttaacgtgggaaagcttaaatcgcccgctattaaatcacgcaattttaccgtttaaagcgttagcacagcgtttagacccaaaacagattgaggcaattgtgaacgaaaccaaagaacaatttgtagcccagcaggcattagagcaaaaaaattcagcaaaagcagaacccgctagccaagtggaaccaatcgcagagacgatcagcattgaagatttcgcgaaattagatttacgtgtggcgaaagtgatgaaatgtgaagcggtgccagaatcaaacaaactcttacgttttgagttagacttaggtgatcatacgcgtcaggtgttctctgggattaaagaagcatataacaatcctgcggaattagaagggcgttttgtggtggtgattgccaaccttgcaccacgtaaaatgcgttttggcgtatcagaagggatgattttaagtgcggggacaggtggagctgacttgttcttattgaatgccgatcaaggtgttaaacctggtatgcaggtaaaataa

SEQ ID NO: 30778 - DNA, 465 bp, Pasteurella multocida
atgaaattaacttctaaaggacgctatgcggtaacagctattcttgatattgcattaaattcaaacagaggcccagttagtttatctgatatttctgagcgacaacatatctcgctttcctacttagaacaattgtttgctaagttgcgtcgtcatgggctagtaaaaagtgtccgaggaccgggtggtggatatcagttaggtcttcccgcaaatcgaatttctgtcggtatggtcatcaatgccgtaaatgaaaatattgatgtcacacgttgtttaggacgcggtgattgtcaagaaggtactgaatgtttaacccattcgctgtggaaagagttgagccttcgtattgaagcgtttttaaatgaaattacccttgaggaactggttgagaaaaatcgtcaaaaacgtgcaaccattgagttccgaggtgactttgataatctgattattttagataattaa

SEQ ID NO: 30779 - DNA, 387 bp, Pasteurella multocida
atggcatacagtaataaagtgattgatcattatgaaaatccacgtaacgttggatctttagataaaaaagatgcaaacgtggggactggcatggtaggtgcacctgcttgtggtgatgtgatgcaacttcaaattaaagtcagtgaagaaggcattattgaagatgcaaaattcaaaacttacggttgtggttcagcgatcgcttcaagttctttaattacagaatgggtgaaaggcaaatcacttgatgaagcacaggcgattaaaaacagccaaatcgcagaagaattagaattaccacctgtgaaagttcactgttcaattttagctgaagatgcaatcaaagctgcgattgcagactacaaagcaaaaaaagaagcaaaataa

SEQ ID NO: 30780 - DNA, 741 bp, Pasteurella multocida
atgagcaagctaaaaaagactaagcatccttttccttgtttcagtatttggcaacaatttaaacgcaaactttaccgcacttttgcactatttctcgtgctgtttctttcaagtgtggtactgtttcgtttcgtacccgttccgttttctgcctatatgctacagcaaaaaataggctatctgtttgaagggaatttgagtagcacgatccattatcaatgggtccctcttgagcaaataagtcaatccatgcagttagccgtcattgctagcgaagatcaacgctttgcgacccattatggctttgattgggacgccattcaatctgctttacaacacaatcaacgcggaaaaagaatccgcggaggctcaaccatcagccagcaaacagctaaaaatctatacttgtggcatgggcaaagttggttgcgcaaagctattgagatgcctaccacgctcgtgcttgaaaccctttggtctaaaaaacgcattctggaagtctatcttaatattgctgaatttggaccgaatatttttggtgtagaagccgccagtcagcattattttcgcaaaccggctaaacagttaagcaatgctgaagccgcattactcgcggcagtacttccaaacccgattatcttcaaagtgaacaaacccagtgcttatgtgaaaaaaagacaacagcatattcagcgtcaaatggggttgttaggaaagcagcatttaagtcagttagattag

SEQ ID NO: 30781 - DNA, 444 bp, Pasteurella multocida
atgacaactcacgttgatacttcaaaaagctgtgatactcgaggcacattattactacgtactctcgcaatgccttctgatacgaatgccaatggtgatatttttggtggctggattatgtcacaaatggatatgggcggtgcgattttagcgaaagaaatcgcacatggtcgcgtcgtcactattgcagtcgacagcatgacctttatccgtcctattgcggtaggcgatgtggtttgctgttacggtaaatgtttaagtgtgggacgttcatctattaaaattaaagtagaagtgtgggtgaaaaaagtcgccagtgaaccgattggggaacgctattgtgtgactgaggcagtctttacgtttgttgctgtcgataaagaaggacgacctcgcgcggtaccacgagaaaataacccagaattaactcaagcactctcttaa

SEQ ID NO: 30782 - DNA, 555 bp, Pasteurella multocida
atgaaacaattattagaatttattccacttattttgttctttgcggtgtacaagctcgtgggcatccgcgaagccgcaattaccttgatcatcgcgaccctcattcaattactgattctaaaaatcaaatatggcaaagttgaaaaacaacaactgttcatggggatcgctgtggtattttttggtacattaacggcgtattttaatcaacttgaatacttaaaatggaaagtgaccattgtctatgccatttttgccttggttttacttgttagccaatatggctttaataaaaatctgataaaactaatgttaggcaaagaagatgcgcttgagttaccggaacaggtatggaatcgactcaatctcggttgggcacttttcttcttactctgcatgttaattaatctttatattagccaatatttatcggacgatttgtgggtggattttaagacgttcggtattctcggtatgactctcattgccacaataatcaccggcatctatatttaccgctatcttccgcaaaccaaaagcaacaataaggaatga

SEQ ID NO: 30783 - DNA, 615 bp, Pasteurella multocida
atgaaaaagacagtattagcattaggtgtgatggcagcattagtggcaggttcggcagtggcacatcaagcgggtagtgtgattgtgcgaggcggtccaattttagtagtgccaaacgcgtcgacgaatcatgatgggtttaagtttgatgtcaattccaacgcacaattaggcttaaccgccacttatatggcaacagataatcttggtgttgagttattagcggcgacaccattcagccatgagattacattaggcaataccttagttggtaaaacgaagcatttaccgccaagtttatatgcacaatattatttcttagacaaagatgcgaaagctcgtccttatgtgggggcgggtgttaactacaccacattctttagtgaaaaagcagtattaaatggcgtgactgatctgaaattaaaagattcttggggacctgcgttcaatgctggggtagatatccaagtcgcagataacttatttttaaatacggctatttggtatgcaaaaatcaaaagtaaagccacatttaaagttggtgatgtagagcataaagtcaatgtgaaattagatccaacggtgttctttgttggcttaggttatcgtttttaa

SEQ ID NO: 30784 - DNA, 918 bp, Pasteurella multocida
atgaaacacccgaataccattgatattaaagcgctacaatcttcttttcagatcatagggttacttggtaaacctcgccatgatgtgaccttacaaatgcataaaaatctttttcaatggttacttgagaaaggctatcaggtgctcgttgagcgaccaattggtgaacaacttggtttgagtgaaaattatttagcctctgtggatgagattggacaacaggctcaactggccattgtgattggtggcgatggtaatgtattaggtcgtgctcgaacccttgctaaatatgacattgcattaattggtatcaatagaggcaacttaggctttctcacggatatcgacccgaaaaatgcctattcacaactgcaagcctgtttagaagacggggactgttttgtagaagaacgcttcattttagaagccagtgtcgaacgaaatggaaaaatcattgcgcgcggaaatgcagtcaatgaagcggtagttcacccagctaaaattgcccacatgatcgattttcatgtttatatcaatgataaattcgccttctcacaacgttcagacggtttaattatttctacaccaacaggctcgactgcctactcactctctgctgggggacctattttaacgccacagctcaatgctattgcactggtgccgatgttccctcacaccctatcctctcgcccactggtgattgatggcgacagcaaaatttccattcgtttcgcagaatataatacctcacaattagaagtcggttgtgatagtcaagtggcgttagaattctcgccagatgacattgtacatattcaaaaaagtcctgataaactgcgtctgctacatttgaaaaattacaattactataaagtattgagttccaaattaggctggctacgcaattccgtttaa

SEQ ID NO: 30785 - DNA, 1221 bp, Pasteurella multocida
atgaaaagagcggttattactgggtttggtattatttcgagtattggcaacaataaagacgaagtattagcatcgttaaaagctggcaaatcaggtatcgaagtgatgcccgagtttgttgagattggcatgcgtagtcatgtggccggcacggttaaattaaatccaagtgagctgattgatcgtaaaatatatcgttttatgggggatgcggcagcttatgcttatctttcgatgaaagaggcgattgaagatgcaggtttgacagaagatcaagtatcgaacgatcgtactggcttggtgattggtgcgggaactggttcagcccataaccaattaatcgcctgtgatgcggtgcgtggtcctcgtggtgtgaaagcggtaggaccttatgcggtcactaaaacgatggcatccagtgtttcagcttgtttagcaacaccttacaaaattcgtggtgtgaactacagtattagttcagcttgtgcaacatcagcccattgtattggtcatgcgcttgagttaattcaattaggtaaacaagatattgtgtttgcgggtggcgcagaagaattatcttgggaatgtgcaactgagtttgatgcgatgggtgcggtatcgacaaaatacaacgataccccagaaaaagcgtcacgcgcttatgatgcgaaccgtgatggtttcgtcatcgcaggtggtggtgcagtggttgttgttgaagaattagagcatgctcttgcacgtggtgcgaaaatttatgctgaaatcgttggctatggcgctacatcagacggttatgacatggtggcgccaagtggtgaaggcgcggagcgttgtatgagacaagccatggcgacggttgatacaccaattgattacattaacgtccatggtacttctacaccagtaggagatgtgaaagagttaggtgcgattaaaaatgtttttggtgataaagtgccagctatctcatcaacgaaatcgatgaccggtcactctttaggtgcagcgggtgcgcacgaagcgatttacacgttattaatgttagacaatgattttattgcgccaagtatcaatatcgaaactctcgatgagaatgcaaaaggctgtaacattgtgaccgaaactgttgaaaatgccggcttgaaaactgtgatgtcaaatagctttggttttggtggaacaaacgcagcgttaattttcaaaaagtatcaagcataa

SEQ ID NO: 30786 - DNA, 1197 bp, Pasteurella multocida
atgacacaatataacagagaaatttttgaccaagtcatgatccaaaactatgttcccgcacaatttattcctgtgcgaggcaaggggagtcatgtctgggatcaacaaggcaaagactatatcgattttaccagtggcattgctgttaacagtttggggcattgcgccgatgaaatcgttgacgtattaaaacaacaaagtgaaaagttatggcattcgagtaactggtttacgagtgaacctactttggcattagccacaaaattagtcgaaaaaacgtttgccgaacgggtgatgtttgttaactctggcgcagaagcaaatgaagctgctctcaaattggcgcgtcgttatgcggtagatcattttggttatcaaaaaagtaaaatcattgcctttaaacaaagttttcatggacgtacgctgtttaccgtgagcgtggggggacaagccaagtattctgacggctttggtccaaagcctgcggatattgtgcatgtgccgtttaatgatttagcagcggtgcaagcggtgatggatgaaaatacttgtgcggtgattgttgagccaattcagggcgaaagtgggattctgccggcgagtcaagattttctgcaaggtttgcgtgaattgtgtgaccaacataatgcgttgctgattttcgatgaagtccaaactggcgtgggacgaactggctatttatatgcttatatgaaatatgaagtggtgcccgatattttgacttctgccaaagcactgggtaatgggtttccaattggtgccatgttgacaacgcatgagatcgccaaaagttttgcacctggcgtgcatggcaccacctttggtggcaatcctctcgcttgtgccgtggcagaaaaagtgattgatatcatttcagcaccaccattcttgcaaaaaattcagcgcacttctgaaaaatttatgcaaaagctgcaagaaattaatcagcaatgtggcttatttaaagaaatccgtggcgaaggtttgttaattggtgcagagcttatcgagcaatatcacggaagagcgagcgaatttgtcaaaaaagcagcagataatggcttaatgattttagtggcgggtcctaatgtgttgcgttttgccccagcattaaatattagtgaagaggcgttagcattgggtttcgaaagattggcgaaaacgttgcatatataa

SEQ ID NO: 30787 - DNA, 993 bp, Pasteurella multocida
atgacaaagcaacataatttaatgagtattgatgacatccaaaaactcattcatcgtgatatgcaaaaaaccaatgaaacaattctcgctcagcttaactctgatgtcacgttaattaatcaattgggttattatatcatccaaagtggtggaaaacgtatccgtccgatgattgcgattttggctgcacgtgcactgggatttcatggtgaacaaccgattacttgtgccacttttattgaatttattcataccgcgactttattacatgatgatgtagtagatgaatctgcattacgacgaggtaatcccactgctaacgcggaatttggtaatgcggcaagtgtgttagtgggggattttatttatactcgcgctttccaattaatgacgcaattggactctttacgtattctcaaagtgatgtcagatgcaaccaatgtcattgcagaaggtgaagtgcaacaattaatgaatgtcaacgatccgaatacgacggaagaaaactatatgcaagtcatttatggcaagactgcgcgtctattcgaagctgcgacgcattgtgccgcgatacttgctcatgcgacggaagcccaagaaaatgctttacgcgaatatggttgttatctaggcacagcttttcaattagtcgatgatattttagattatagtgcagatgcacaagcactcggcaaaaatattggtgatgatttagcggaaggtaaaccaacattaccgttattgcacgccatgcatcacggcaatccagcacaagcaaaattgattcgcgaagcgattgagcaagggggtaagcgtgatattttagaggatgtactgacaattatgacagaacataaatccctcgactatgcgatgatgcgcgctaaacaagaggcacaaaaagccgttgatgcgattgcattattgcctgaaaatgaatataaacaagcgttaatttcattagcttacttatccgtcgatcgcgcttattaa

SEQ ID NO: 30788 - DNA, 312 bp, Pasteurella multocida
atgtacgcagtttttcaaagtggcggtaaacaacaccgagtaagcgaaggacaagtagttcgtttagaaaaacttgaagttgcaactggtgaaacagttgagtttgactcagtgttaatgatcgttaacggtgaagatgttaaaattggtgccccagttgttgctggtggtaaagtggtggcagaagttgttgcacacggtcgtggcgataaagtaaaaatcgttaagttccgtcgtcgtaaacatagccgtaaacaacaaggtcatcgtcagtggttcacagaagtgaaaatcactgggattcaagcataa

SEQ ID NO: 30789 - DNA, 258 bp, Pasteurella multocida
atggcaactaaaaaagctggtggttcaactcgtaacggtcgtgattctgaagctaaacgccttggtgttaaacgtttcggcggagaatctgtattagcgggtagcattatcgttcgtcaacgtggtacgaagttccacgcaggttcaaacgtaggtatgggacgtgaccatactttatttgcgacagctgacggtaaagtcaaatttgaagttaaaggcgagaaaaatcgcaaatatgtcagcatcatcgctgaataa

SEQ ID NO: 30790 - DNA, 1173 bp, Pasteurella multocida
atgaaatttattgatgaagcactaattcgtgttgaagcgggtgatggtggtaacggctgtgtgagcttccgacgtgaaaaatatatccctaaaggcggaccagatggtggcgatggaggggatgggggggacgtgtatttagttgccgatgaaaacctcaataccttaattgactatcgctttgaaaaacgctttgctgcgggacgtggcgaaaacggacgcagtgctggttgtactggacaccgtggcaatgatattactttaagagtgcctgtggggactcgtgcgattgataacgatacgaaagaagtcttaggtgacttaactaaacatggtgccaaaatgcttgtggcgaaaggcggttaccatggcttaggcaacacacgttttaaatcctccgttaaccgtgcacctagacaaaaaaccaatggcacacccggagaaaagcgtgatttgcaattagagttaatgttgttagccgatgtcggtatgctaggtttaccgaatgctggaaaatctacatttattcgagccgtttcagcggcgaaacccaaagtagcggattatccttttacgacattagtaccgagtttaggcgtcgtgcgtgttgatgaaaaccacagttttgtggtggcagatatcccgggattaattgagggagcggctgaaggcgctggtttaggtgtgcgtttcttaaaacatttagagcgctgtcgcgtcttaattcatttagttgatattgcacctattgatgagagtgatcctgcagagaatatctcgatcattgaatcagaattatttcaatacagtgaagccctggcggataagccacgttggttagtgtttaataaaattgacaccatgagtgatgaagaggcacacgagcgtgcgcaagcgattactgaacgcttaggctgggatgacgactattacctcatttctgcagtaacaggcaaaaatgtacagccactttgtcgtgatattatggactttattgaagcaaatccacgtcacgaagttgagcaaacagcggacgaggcagaagtgaaatttaaatgggatgattaccaccaagcacaattagcggatcatcagttcgaggatgaagacgaggattgggatgattggtcagaagaagacgaagaaggggtagaaaccatttacaagccgtaa

SEQ ID NO: 30791 - DNA, 285 bp, Pasteurella multocida
atggcaaaacaagacgcagattgtattacattggatctgtttgctaatactcgcaaagttggacgcccaaaaacaaatccactgagtcgtgaacaacaaattcgtatcaataaacgtaatcagttaaaacgggataaatccatcgggttaaaacgggtcgaacttaaattacacacggatttagttgagcaactagaagatttagcggcaaatttgcatgttagtcgatcagaattgattgtaacgattttacaagattattttaatattcaagaagataggtag

SEQ ID NO: 30792 - DNA, 789 bp, Pasteurella multocida
atgtctgagaacaatttacttcactttcaatttcatcagttaaaacaagaaattaatgcgccgactttcgtttttattcatggtttatttggtgatatgaataatttaggcattatcgccagagcctttagtgaaaaatatcccattttacgtgtcgatttacgcaaccacggacaaagctttcaccacgaagagatgaattatacgctcatggcagaagatctcgccaatgtcattcatacccttcagctcgaaaaagtcattttaattgggcattccatgggaggaaaaactgccatgaaaatgaccgcactttatccccatctcgtcgaaaaattgattgtcattgatattgcgccagtcaagtatggtcaccatgggcatgacgctgtttttgcggggctatttgccaccaaacaagcaaaaccgaaaacacgacaagaagcaaaacactatttagcacaatatattcctgaggaagcgatccaacaattcatgctgaaatcctttgatgccaatgccaaagaatatttccgttttaacctcagcgcattacatgccaattatcctcacatcatggattggcaaccttgtcactgtaccgtacctaccctctttatccgtggcggacaatcaaactatatcaaaacagaagacacacaacctattctcgcacaatttccacaagccaccgcctttactataaatggttgtggacactgggttcacgcggaaaaacctgagtttgtcatacgcgcaattgaaagatttttaatatcaaacaaatag

SEQ ID NO: 30793 - DNA, 3342 bp, Pasteurella multocida
atgaaaaaaacacatttagttaaaaaggccttttttgccctgagcttatgttttatgttcaacgcatacacattcgctcaacttcctacaccaaatgatattcaagcccaattaaaagttgccaaaagtgcagagcaaaatgataccaatagtaaaactgtggtacagaatttagaagaaaccttggcattgttggcaaaaattgacaagcagaaagcggatattaaagacttagaggcgcgtattgatggggctgcagagcaaacgacaaaagcgcaaaaacgtttagaaacgctgaaaagtacgccagcaccttccgcaacacaatttgagaaattgtctttggctgatttacaagccaagttattgagtacgcaacaagcattacaacaaattcaagcagatgcaacaggactgaatactgaattggtcacgcttcgcaccgcgccagaacgtgcccaagtgacactcaatgcgaatttaacccgtgtacaagaaattaataagttattagcgaatgcggataccataccaagtggaaaagtgaagctagaaacggaattagccttattagaattgcaaaacagttttaataaattgttattgcaaggcaataatgtcttaaccacgttatatacgctcgagctagaagataagaacttagaagttgcgcagttgcaagaacagattaagaatttacaggatgcgattaaccagaaatatttaaaagaatcgcaacagcaagtggagcaactgaccaaatcgcaattggaaaataaaggcactacacatcctgaagtagcaagtcaattagagcagaatgtgcgattaagccaggcgctagtgcaacaaaccaccgaaatgaatacgttatcgcaagataatttacgtattaaaaatgtgctgaataacttacaacagacacaacgcaatattgaagatcaaattagtgcgttgcaaggttcactggtgttgtcacgtattattaataaacaaaaagagttgttaccacaagatgaaatgattgctgggttatcgaaacgcatcacggatctgcgtgttcgtatctttgatctgactgagatgcgggataatctttatgatccgcagagctatattgcagcgcttgaaaagaaacaacaagtcgcgtttagtgcgcaagaaaaagccagcttagattcgattttacaagagcgccgtaagttattatctgacatcattagtttgcttaataaccagctcaatttggtgattaatattgagcttaaccaaaagcaagttgcgttaattagtgatcaactacaaagtaaattgcagcaacaaagcttctgggtaaaaagtaatgcaccgatggatgtagattgggtcaaacaatttttacctgcggttcaagtgcaagtaacggagattattaagcaaattgatttttccaattggcgtgaggatttagtacctgcggcattaatcattgcactattactggtatttactttcttgattcaattacagaaagcaaaaattaaacaacgtttaaccaatattaatcaaaaaattaatacactcacttcggatagccaatggcacactcccgaagccattttatggacgttggtgttatgtttacctagcactttcatttttactgcattgctagtgtttatggtgtatttgtgttttgcagaaccattgaatttagcaagttgggttgtcagcatgggcggctattggtgtttcttcgcctttatgttatcgctgttacgtccaaatgggattgcctatcgccattttagtatgccaaaagaaagtgtcgatcgcttttatcgtgtttttggtcgctctgtttggatttccgcgttatggattaatgcctcgctctttacacatttagaaacggggattactaacgatgtgattgggcaagtgatgacaatttcagtgttgtttatttctttactgattattggtccacgtattcaagatgccgtgaaatcgtatgaaaattcatcggaggataacactaaatcaattcatatggtgttaaaaatagggcgttttttccttgttgcagcaccgattatcctgattgtgcttgttgtgatgggctactactatacggcactgaatttgatggaacatttaatgtcctcttattttgtggttgtcacttggttagtattaaaaaatgtgattcaccgtggtttaacggtatcctcgcgtcgtttatcttacaatcgtttgaaagaaaaaatcgagcaacaggcgcagccaaaagtcaatacggaagaagaattgaatattggactggagttacagcaaagcgaaagtttaggtattgcccaagtcaaagatcaagtattacgtgtcactgatttgctgttaacggtcattttattaggcatgttatattgggtttggtctgatttggttactgtcgcctattacttacagggtgtcacactatggcaacaaagtgtcactaccgcagcgggaacagtgatggagtccattactttattgaatctgttgttggcagtagtgattttaattgccatgtatgctttagtgcgtaatattggcggtttgcttgaagtattagtgttttcacgggtgagcttttcccaaggcacgccttataccattacgaccttagccacttatttcattattgcgattggcgcgggcgtcgccttttcgactttagggatgtcatggtcgaaattacaatggttatttgctgccttgtctgtgggtctaggttttggtttgcaagaaatctttgctaactttgtgtcaggtttgatcattttatttgagcgtccagtgcgcattggtgatgtgattacgattggtgaatattccggtaccgtatcacgtattcgtattcgttcgactacgttaattgattttgaccgtaaagaagtgattgtgccaaataaagcgtttgtaacagaacgtttagtcaactgggcacttaatgattcggttacgcgtgtggtgattcgtgttggagtaggctatggttcagatctggagttaaccaaacgtttattactgcaagcggcgacagaatgtgatcgtgtattgaaagatccagaaccggtagtgtacttcttaaactttggggcaagctcattggatcatgaactacgtttatacgtaggcaaattggcggatcggaatccgacagtcgattgcttaaaccgtcgtattaacagcttatttgaagaaaataatattgaaatttcatttaaccagttggatgtcttcattaaaaatcaggtaaccaacgaagaaattaaactgaatcaacaatgttttccaacgcaaaaacaggaaggataa

SEQ ID NO: 30794 - DNA, 1074 bp, Pasteurella multocida
atggcaggaaatacaattgggcaactttttcaggtaacaacatttggtgaatcacatgggattgcgctcggctgtattgtggatggtgtgccacccgggctgagtttatctgaggcagacattcaacctgatttagatcgccgtaaacctggtacatcgcgttataccacaccgcgtcgtgaagatgacgaagtgcagattttatcgggtgtgtttgaaggtaaaaccacggggacgagtatcgggatgatcatcaaaaatgcggatcaacgttcgcaagattatggtgacattaaagatcgttttcgtcccggacacgctgattttacctaccaacaaaaatacgggatacgcgattatcgtggcggtgggcgttcttccgcacgagaaacagccatgcgagttgccgcaggtgccatcgcgaaaaaatatttgcgtgagcattttggcgtagaggtgagaggctttttggctcaaattggtgatgtggcgattgccccgcaagtgattgagcaaattgattggcaacaagtcaacagtaatccgttcttttgtccggatccgagtgcggtggaaaaatttgatgaattaattcgtcagctgaaaaaagagggtgattcgattggggcaaaattaacggtagtggcagaaaatgtgccagttggcttgggtgaacccgtgtttgatcgtttagatgcggatctggctcacgccttgatgggcattaatgcggtgaaagcagtggagattggtgatggctttgcggtggttaatcagcgtggttcagcacatcgcgatgaaatgacaccggaaggctttttgtctaatcatgcgggtggtattctgggcggtattagctcaggtcaaccgattgtcgcgacaattgctttaaaaccaacttcaagcatcacaattccggggcgttcagtcaatcttgccaatgagcctgtcgaggtgattacgaaaggacgtcatgatccttgtgtggggattcgtgccgtaccgattgctgaagcgatggttgcgattgtcttactcgatcacttattaagacataaagcgcaaaatagataa

SEQ ID NO: 30795 - DNA, 2145 bp, Pasteurella multocida
atgagttatcaagtcttggcacgaaaatggcgaccaaaaacctttagtgacgtggttgggcaaacccatattttaaccgcgctttctaatgggttgaaagaaaatcgcctgcatcatgcctatctcttttctggaacgcgtggtgtagggaaaacgtcgatagctcgtttatttgcgaaaggcttaaattgcgttcatggtgtgacagccgaaccttgtggtgaatgtgaacattgtaaagcaattgaacagggaaactttattgatctgattgaaattgacgcagcatcacgtacgaaagtcgaagatacgcgtgagttattggataatgtacaatacaaaccagtacaaggacgctataaggtttatctaatcgacgaagtccatatgctttcccgtcattcgtttaacgctttactgaaaaccttagaagaaccaccggagtatgtcaaattcttactggcaaccactgatccgcaaaaactgcctattacgattttatcccgttgtatgcagtttcatttaaaggcgttggaacagcaacaaatcgcacagcatcttgaatttattcttacccaagagaaaatcccctttgagtttcttgcgttagaaaaattagccaaagctgcacagggcagtattcgtgatagcttaagtttaacggatcaagcgattgcaatgagtaatggcaacattaccttaaatgtggtgcatgagatgttaggcttgcttgatgatgatcaagctttagacattatccatgctttgcaacaagggcagggtgagtcagtgatgaaaggggtacaagccgttgcggaaaaagggggagattgggacgaattattgcgtgatatcggcgagaatttgcataaaattgccatgcaacagttattgcctagttcacagctggatgacacgagtcgaatcggttttctagccagtcatatttcaccagaagatgtgcagtttttctatcaagttatgctcacgggacgtaaagaactgccgtatgcgccaaatcgtcgtattggggttgaaatgacgttattgcgggcattagcctttcatcctaaattcgttgctgtggcaccaacgcatgcaacgctcgtctctgagcaagatataggcggttcatcaacgcgtcatattgaagtcccgatcgtttcacaaaatataaaatcgcaatataaaagccaagtgaaatcaacagtcgcagcaccggcacaggttagccctcctgttgaggaaaaggtgcacacacacacagaagaaacggaaacgtattcgcctgcatttgatgctttagctcagattgataaattagatcatttaactatcacgccacagaaagaaaaaaaaaagcatagttcatcaacagaagcgttagcaccacgggtttccttatcaagtgatacctcctcttctacgttaacatcattactggtgattgaaagtaaaccgcgtgatacaagtttcataaaaaataaggcttccgctttatcaacactatctgcgccagaaacggcgctatcctcagcctctcctttaaatacgcctgtattacaagcaacacagcatactgaacctgaaggagaagacgaagatgacatcatcgatgatacgcttttggcggaaacttatcgttgggaatggcgtaatccagaattggctaaaacacaagaggggattaagccttctgctttaaaacagcgtttagaacaagaaattacgcctgaattgcgcgcgaaagtgattgatatcgcacgtaaacaagatttttggacagattgtgtagagtcacttgatatccagaatttaaccaaagaattagccttaaactgtattttactttcacatgatggggaagtgtttcatcttggcgtgcgtgacaacaaagcgcacttacacaccacgaatgcacaacagcagttacagcaagcattgagccaattacaacagcaagctatgaatgtgctgatctcgccgacggactctgacaacttgacaccaacagaatggtatcggcaaacctataaagcgttgcgtgaaaaagcgcaacaagcgttacagcaagatgagaaattgcagctttttttacatgaatttagtgcagaaatcgagctttcgacagtaaaaccaatttaa

SEQ ID NO: 30796 - DNA, 1326 bp, Pasteurella multocida
atgaatatttatacctatatttgttttttatccgcgatctccatttttattgggtttgtcacccggaaactcagcgataaaatccaatacaccatcgccatcaccgccacctccattatcgtttctgttctcttcctcattttcggtcacctttcttggtttaaattagatatcattgccacacaagtcatggaacaactcgatttcaaaagttttctgctcaatggtatcctcggtttcttattatttgccggtgcattaggtataaaattacccgttttaaaaaaccaaaaatgggaaatcacggtgtttgcgctcttttccacacttgcctctacctttattatcggcgtcttgctttacagtgttgcttatctcattggtctaccaattgacctgatctattgcattttatttggcgctttaatttcgccaacagaccctatcgctgtactggcaattattaaaaatttaaaagcaccaaaacgcctttccatgcaagtcgaaggcgagtccttgtttaatgacggagttggtttggtaatttttactacgatttttgctgtcgcgtttggcgggcacgccccaacattagcaggcattacggaattattcttacaagaagctgttggcggaattttgtttggtctcgtgattggcttcgtagcacatttattgatttcatccacagacgatggaagtttggaaattctattgactctgacgattcctaccgctggttttatgctcgcgaatatgttgcatgtttctggcgctctcgccatggtcgtagcaggtattttaatcggcaactggacacgacacacggggttttccaaacaaagccaactctaccttgatcatttttgggaaatgattgatcacttcttaaattccctcctgttcttattgatcggcttagcactgcttttagtcgatttcggtgctcaaggctttattttattgatactcgcgattccaatttgtttaatcggacgctatatcagcgtgtggatgcctttcaaagtgatgcaacgttttcgctcctataatccttatacactacgtattctaacatggggtggactacgtggtggtttgtcacttgctatggcattatcgattccgaaaggcatgttatatcttgagcatattgggatggatgtccgagatttattactggtaatgacttatgcggtagtcaccttctcaattctagtacagggttctacgattgaaacgatgatcaaaaaatccaaagaaagtattctacatcaacgaggttatgtcggattgcacccgaacaagacaagttctgaagactaa

SEQ ID NO: 30797 - DNA, 2253 bp, Pasteurella multocida
atgaatataatcaactacgaaggcattgaacaaaccccattacgcgagtttactgaaaaagcctatctcaactactccatgtacgtcattatggatcgcgcattgccttttattggcgacggcttaaaaccggtacaacgtcgtattatttatgccatgtctgaacttggcttaaatgctgcggcaaaatataaaaaatcggcgcggactgtcggtgatgtgctcggtaaatttcacccacatggtgattcagcttgttatgaagccatggtcttgatggcacaacccttttcttatcgttacccattagtggatggacaaggtaactggggcgcacctgatgatccgaaatcctttgctgcgatgcgttatactgaatcgcggctcgccaaaattgctgatattttattatctgagttagggcaagggacagtggactatcaaccgaattttgatggtacattagaagaaccccaatatttaccagctcgactgccacatattttattgaatggtacaaccggtattgctgtgggtatggcgaccgatattccacctcataatatcaatgagcttgctgaagccgctgtgatgctaattgataacccaaaagcgagcttggatgatctgttaactgtggtacaaggtccagactacccaacagaagcggaaatcatctcatcgaaagaggatattcgtaaactctatgaacaaggtcgtggatcggtaagaatgcgcgcagtgtggaaaaaagaagacggcgaaatcattattactgctctaccacatcaagcctcaccatcaaaagtcattgcacaaattgccgaacaaatgagtgctaaaaaattgccgatggttgaagatattcgcgatgaggcggatcacgaaaacccaattcggattgtgttgataccccgttctaaccgtgtggatgtggatgctttaatggcacacttatttgctaccaccgatcttgaaaaaagttatcgtgtcaacatgaacatgattggtttagataatagacctgcggtgaaaaatctggtgcaaattctgacggaatggctacagttccgtcgtaccactgtaacgcgtcgcttgcaatatcgtctcaataaagtattagatcgtctgcatattttacaaggtttactgattgcttatctgaatattgacgaagtaatccacgttattcgtcatgaagatgagcctaaagccgcgttaatcgatcgtttcggattaagtgaaacacaagcagaagcgattttgaatttacgcttacgccacttagccaaattagaagaaaacgaattacaagcggaaaaagatcgtctagaagaagaacgtgacagtttacagctgatcttagggtctgaacgccgtttaaatacgctaatcaaaaaagaaattcagcaagacgctcaaacttatgcgagtccgcgtttgtcaccattagtccaacgcgcagaagccaaagcaatctccgaaagcgacatgacgcctgctgagcctgtcaccgttattctgtctgaaatgggttgggtacgttgtgccaaagggcatgatatcgatgtgcaaaatctcagctataaagccggtgataaatacttatcccatgcttatggtaagagtaatcaagccgccgtatttatcgacagcacaggacgaagttacgctttagatccgttaagtttaccttctgctcgctcacaaggcgaaccgctcacaggcaaactcagcttgcctgcaggtgctagtgttgagcatgtgttaatggaacaagacaagcaagcactcctgatggcatctgatgctggctatggatttatttgtcaatttgatgatctgattgcgcggaataaagccggtaaagccctgatttcattacctgagaatgccaaagtcttaacccctctgcgaatagataatgaaaatgcccgtttggttgccttaacctcggcaggcagaatgttgattttcccagtgaaagatttgccttctttagcgaaggggaaaggcaataaaattgtgacgattcctgccgcacatgcgaaggcacgaacagagctattagttcggttatttttaattaacgaacaaaccagcctcgttttccatgctggcaaacggaaaatcacgttaaagcctgaagattggcagaaattcagtgcagagcgtggacgtaaaggcacgcaattaccacgtggtttgcacagtcatgcagatattgaattgctcacaccagacagtgagtag

SEQ ID NO: 30798 - DNA, 1899 bp, Pasteurella multocida
atgacaagcaattattccgcacaagaaattactgttctaaaagatttggagccagtgcaacttcgccccggcatgtataccgataccacccgtcccaaccatttaggtcaagaagtcattgacaacagtgttgatgaggcattagctggctatgcaaataaaattgaagtggtcctacacaaagatcaatccttggaagtcattgataacgggcgaggcatgcctgtggatattcatcccgtagaaaagctatcgggtgttgaagtgattttgaccaaattacatgctggtggaaaattctcaaataaaaactatgaattctccggtggtttgcatggtgtaggtatttctgtggtcaatgcgctttctgaacgggttgacgtgacagtaaaacgcaatggtgaggtctataaaatcgcctttgaaaacggtcgaaaagtcgaagaattagaggttattggtacttgtggcagacgtaacacagggacaacggtacatttcaaacccaatccgaagtattttgacagcgataaattttcggtttcgcgtttacgccatttattgcgtgctaaagcagtcctctgctccggcttagaaattaagttcattgacaaaatcaatcaaactgaagactgttggtgctacgaagatgggctcgcggactatttaagtgaagcagtgaatggtcttgaaaccctaccggaaacgccatttattggtgattttaaaggcgatacagaagcggtcagttgggcattattatggcttccggaaggcggtgacctattgagcgaaagctatgtcaacttaatcccaacgatccaaggcggtacccacgtcaatggactacgtcaaggcttactggacgccatgcgtgagttctgtgaatttcgtaatctactaccaagaggtgttaaactcagcgccgacgatatctgggagcgttgcgcctatgtcctttcgctgaaaatgcaagatccgcaatttgctggacaaaccaaagagcgcctatcttcgcgccaaagtgcggtatttgttgctggcgttgttaaagatgccttcagcttatggttgaatcaacatgtacaacaagccgaacttttggctgaaatggcaattagctctgcacaacgtcgtttacgcgccgccaaaaaagtcgtacgtaaaaaattagtgagtggtcctgccttacccgggaaattagcggattgtagccaacaagatttagacaaaaccgaattatttttagtggaaggggattctgccggtggttctgctaaacaagcacgtgatcgcgaataccaagcaattttgccgttacgagggaaaattctcaatacttgggaagtctcttctgagcaagttctctcttcaagtgaaatccatgatattgcagtggcacttgggattgatcctgacaacgaagacttatctcaactgcgctatggtaaagtatgcattcttgccgatgccgactccgatgggctacatattgcgaccctactttgtgccttatttttacgccacttcccgaaattggtacaaaagggacatgtttatgttgcgatgccaccgctttaccgtattgacttaggtaaagacgtcttttacgcccttgatgaaagcgaaaaagacgccattttagatcgcttaaaaggcaaaaaaggtaaaccgaacgtacaacgttttaaagggttaggtgaaatgaacccactacaattacgcgaaactacgatggatcccaatacgcgccggttagtgcaattgacctatgctcttgaacaagaagaacaagccgcaacccttgaactgatggatatgctcctcgccaaaaagcgcgcagaagatcgtaaaaattggttgcaaacaaaaggggatcaggtggatttagccgtataa

SEQ ID NO: 30799 - DNA, 1005 bp, Pasteurella multocida
atgtctagattaaaaacttccttttttttcaccgcactttccacactgtcactatccgtctttgctcaaacgcaagcggtcaatgtgtatacttatgattccttcacttctgaatggggggcaggtccgaaagtaaaaaaagcatttgaaacccatttcccacaatgccaagtgaattttactgcgtttggtgattctggcactatgtttaatcgcttacgtttagaagggaaaaaaacaaaagcggatgtggttgtagggttagataactacaaccttgaggaggcagaaaaaagcggcttatttgttcaacataaagtcgatttaacaccgctgtcactaccggttgagtggaaaaatcaaacttttttaccttatgattttgggcagtttgcctttatttatgacaaaaccaaagtgcaacagccaccaaaaagcttaaaagaattggtagaacgtgatgatttaaaagtcatttatcaagatccacgtactagcagtgtaggacgtggcttactcatttggatgaaccatgtttataccgagaatgaagtggcacaagcttggcaaaaattagccaaacatacggtgactgtggggaaaggttggtctgatacttatggcgcgtttttgaaaggcgaagctgatgttgtcttgagctataacacctctccgttatatcacatggtgtttgaacaaaaagatcagtatctcgccaccgaattcgaggaagggggcgtattacaaattgaaacggcagcacgtgtagcacaacatgataatcactgtgcggatcatttcttggcatttttaattcatccagaagcacaagggcatttagtcaagaataatgtgatgttaccggtgattaataccaatattgaaccgcactttgatgcccttaaagccacccaaatgaacacgaaagtgctcgatacctcaaaagtaaatgccgaacaagtcaaaaaatggattgctgtttggcaaacgaccctaacccaataa

SEQ ID NO: 30800 - DNA, 1011 bp, Pasteurella multocida
atgacaacggcaacggcatttgagattcgtacactgactcctcacccgaccttagaatattggtctgtgtgtaaaattgaagccctgtttgagaccccatttttagatttggtttatcgggctgcgcaagtgcaccgagaaaactttaatcctaaagccattcaattatccactttaatgtcgattaaaacggggggatgtccagaggattgtggctactgtccgcagtcagcacgttatcatactggagtagaaaagcagcaattactcgatgtggaagaaattgttgaaaaagccaaaattgccaaagcacgtggtgcagggcgcttttgtatgggggctgcatggcgtggaccgaaaccgaaagacattgaaaaagttaccgcaatcattaaagcggtgaaagaactgggcttagaaacctgtggtacctttggtttattgcaagatgggatggcagaagatttaaaagaagcgggtttggattattataaccataatctcgatacagccccagaacactacggtaatgtgattggtacccgtcaatttgatgatcgtattaatacgttaggtaaagtgcgtaaagccggcttaaaagtgtgctgtggcgggattattggcatgaatgaaacccgtaaagaaagagcaggattaattgctagcttagctaatttagacccgcaacccgaatcggtgccgattaatcaattagtgaaagtggaaggtacccctttagccgatgcggcagaattagactggacagaatttgtgcgcactattgcggtggcgcgtattactatgccgaaaagctatgtacgtttatcagcagggcgtcaaggcatgtcggaagaaatgcaagccatgtgctttatggctggcgcgaattcaatcttctatggcgataaattactcgtgacgggtaacccagaagaagacggcgatcagcgcttaatggcgaaattagatttagaaccagaaacagaagagaatcgttaccgtgcggaataa

SEQ ID NO: 30801 - DNA, 1047 bp, Pasteurella multocida
atgaaaaagacaatcgtagcattagcagtcgcagcagtagcagcaacttcagcaaacgcagcaacagtttacaatcaagacggtacaaaagttgatgtaaatggttctgtacgtttactcctcaaaaaagaaaaagataaacgtggtgatttaatggataatggttcacgcgtttctttcaaagcatctcatgacttaggtgaagggttaagtgcgttagcatatgcagaacttcgttttagtaaagatgtgaaaaacaaagatggtgaagtgattaaacaaccaattggtaataatgtccatgctaaacgtctttacgcaggtttcgcttatgaaggtgtaggtacattaacatttggtaatcaattaactatcggtgatgatgttggtgtgtctgactatacatacttcttaggtggtatcaacaatcttctttctagtggcgaaaaagcgattaactttaaatcagcagaatttaatggtttaacatttggcggtgcttacgttttctctgatgattttgataaaaacggattacgtgatggtcgtggtttcgttgtagcgggtttatataacagaaaaatcggtgatgttggtttcgcgtttgaagcaggctatagccaaaaatatgtgaaacaagaagtagcttcagtattaccaccacctcctggctcagtaacagtttacaaagatgaaaaagagaaagcattcatggttggtgcggagttatcatatgctggtttagcacttggtgttgactacgcacaatctaaagtgactaacgtggatggtaaaaaacgtgcacttgaagtgggcttaaactatgatattaatgataaagcaaaagtttacactgatttcatttgggcaaaagaaggtccaaaaggtgcgactacaagagatcgttctatcatcttaggtgcgggctacaagcttcacaaacaagttgaaacctttgttgaaggtggctggggcagagagaaagatgctaatggcgtaacaacaaaagacaatgttgttggtgttggtttacgcgtacacttctaa

SEQ ID NO: 30802 - DNA, 1053 bp, Pasteurella multocida
atgaaaaaaacacttattgcattagcgatcagctcatttgcagtgacttctgtcagtgcagcaaccgttttcgataaagaaggaaccaaagtggatgtaagcggttctgttcgtttacttttacaacgtgaaaccaatcatcgtaccgacttaaaagataaaggatcacgtgtgacctttgatgtcactcatcagttaggtgagggattaagtgcattaggacaagttgaagtgcgttttagcgataaaggaattggtgatcagactaaaatttctcgtttatttgctggttttaatcacgaagctgtaggtaaattaacgttcggtaaacagttaacgattggtgatgatatcggtttatctgattacacgtacaacttaggtggtgtcaataaattagtcaccagtggtgaaaaagtcatccatttcaaatcagcagattttgcaggtttccgttttggtgcagactatgtatttgatgaagatccgtctaaaacagaagcagtaaatgaaaagaatattaataacaacgcttatgtgttaggtgtactttataaccgaactgtgggtgatctgggttttgctttagaagccggatacagcagcaaaaaaatcggtgatgccatgctatctgttaatcagaaagcttggacagtaggcggtgagttaagttaccaagattttgcagtggcagtagattactcccaagttaaaagcggtgacgttagtacgattctatggcgtggacaaaaacatccgggtcaacctaatcaagatgatagtttccacaaagttcgcgaagtcgaattaggtttgaaatatcaatttattccagagtcaaaaatctatacggactttatctggggtaaagccgtgacagcttatgatcgcacagtgagattacgtgcgtatatcgcgggtgtggactataaattccataaaaatgtggtcacttatttagaaggtggcgtatttagatacaaacatgacaatgatttagatccaactttgagagataaaaaattgggtgtaggtttacgcgtgttcttctaa

SEQ ID NO: 30803 - DNA, 2154 bp, Pasteurella multocida
atgaataattggtttaatgcaaaaattatcgcaacgatccccatttttattgcgataaatattgcggctttcgctatttggcttctggatatttccgaacaaagcatgccgcttattttaggcattattgctggcggattagtagacttagataatcgtttaactgggcgattaaaaaatatcttctataccttacttgccttctctatttcctcactagtggtgcaaattagcattggtcatggttttcaatttacgctgttgatgactgccatgacgtttatgtttaccatggtcggtgcaataggacagcgctatagcaccattgcctttggcactttagttatcgccctttacacaacgctttcttacttgccagaaactatttggtttatcaaccccattatgattttatgtgggacattgctttacagcatgatcactttagttgtgcatttgttttttcctaatcgtccagtacaagaaagtatcgcgaaatccttcttagccttgggacactatcttgacgcgaaatcacaattttttgatcccgatgaaattgaacaactggcgaataaagaagtgaatttagccatgaaagacagtgcgcttattgaggcatttaatgccaccagaattgctctgttctatcgtattcgaggtcaaaaccgccatagccgcacacaaaaaatgatccgttattattttgcggcacaagacattcatgagcgcgcgaactccagtctatttaattatcatactatggcggaacagctcaaaaacacggatctcatttttcgtattcaacgcttattcgaattacaagcccaagcctgtcgcgaaatcggtttaagtttacagcaaaataaagagtaccattacaataataaagtcgaaaaagcgattgtagggctaaatcaatcttttgaattgtatgcaaaaacccatctagaaaatgaacaagtggtgctaaatcttaagaccttgattgaaaacctgcaagctgttgaatggcaacttagtcatcttgatcaagaaacacaccaagctgaacgtgcatctaccgctaaaattcatacagaacaagttcgtggtttacgtaatatcctgtatgcaatgaaaagtcactgccattttaattctcaactgtttcgacatgctgttcgcttatctatcgtcgtttttaccgcttgttctattgttgaattttttcaattagagcgaggttattggattttattaacctccgtttttgtctgtcagcccaattattccgctactaaactgcgccttcgtcaacgtattattgggacaattctaggcgtcattatcggttccttactgccttatattaatccaacactggaactgcaacttggtttgattgtggcaaccagtactttatttttcttttttagaacgaataactacagtttctcgactttctttatcacattacaagtactcatcagctttgatgtaatgggttttgatattcatgaagcgatgtattcaagggtaatagatacattcattggcgcctttattgcttggtttgctgtgtcttatttatggccagattggcgttacttacaactcgataaagtcagtcgtcaagcggtaaaaagcaatgccaaatacttactttatgtgattagccaactgcaatttggtaaaggagataacctgaaataccgtattgtacgtcgccacgcccatgaaaatgccaccgccctgagtaccaccatttcaaatatgaataatgaaccaaacaaataccaagcacatttgcaaaaaggttttgagttactgaagattaattattctttattgagctatatttccgcattaggcgcttatcgtagtaatatgaaggcattacaacaaaataccgaatttctggcaggattttatccaattgccaagaaaattatttatgtattggagcatattgaaaaactcagacccgaggtgttccaaaaaatgcaagaaaggattgagagtgatttaaagcacgcgaacgctgagcaagccggtcatctatttcaaccgcagtttagcgtgccgattcagcaattgaatatgattagtcagatcttgccttcactttaccatacgtttcaacaaatcaacttaaacctcaaacaaaattaa

SEQ ID NO: 30804 - DNA, 930 bp, Pasteurella multocida
atgagtatccgaattcttcccgactctgaaattaaagcggccgccagttcatttcatgcaccggcactcctgtttgcaaacccgaaaaatctctatcaacgtcgtattgcacgtttcacttcgctttcaaatgcacatccattggaagactatcttcactttgcaagccaagttgccgaagcacaattagcagtcttgcaacaacaaccaattgcacaagacccgcgtttaagcgcagaaaaactctctgccgaagatcttgctaaacaaccacttaacgctcaacgctggcagcgcgatcctgtttggcaaaccttattaatggcaattttggcggaaatgaaacccaaagccaatgagacgattctcaatacgattgaaaccttagagaaatactcaaaagcggaacgagatagcatcgcggataaactcttagctcaagaatttgagcaaattagcagtgctcaagccgttttcatttgggcggcactttccctttactggcttcaattagtacaacaaattccgcattcaagtcataaagaaagcggagagagccttcatgtttgcccaatttgtgcctctgcacctgtcactagcgtgattcattttggcgctgaacaaggcttacgttacttacattgtgccttgtgtgaaactgagtggaatatggttcgttcaaaatgtacgaattgtgaccaaacgggtaaattagattattggtctcttgattctgaaatagcggcagtgaaagcagaaagttgcggtgattgtcatagctacttaaaagcactataccaagaacgtgatcctaaagtagaagccgtagccgatgatcttgctagcattttcctagatgtggaaatggaagaaaaaggcttacaacgcagtggcttaaatcctttcctcttcccaaacccagaagcctaa

SEQ ID NO: 30805 - DNA, 2181 bp, Pasteurella multocida
atggatatttcagcattattagatgggttaaatgataaacaacgtgatgcggttgccgcgccactcggcaattacttggtgttggcgggggccgggagtggtaaaacacgtgttttaacacatcgtattgcttggttaattgcagtagaacaggtttctgaagggagtatcatggcagtaaccttcaccaataaagccgcggctgaaatgcgtcatcgtatcgaaagcaccttagctaatcatgcttctcaacgtttatttggtatgtgggtgggcacgttccacagcattgcccaccgcttattgcgtgcccatcatcttgatgccaacttaccccaagatttccaaattctcgatgcggatgatcaactgcgtttagtgaagcgcctactcaaattacataattttgatgagaaaatttttattcctaagcaagtctgctggtatatcaataataaaaaagatgacgggttaagagcgcaccaaattgatgacaataatgatcgacatgagcgggaatggataaaaatttatcagatttatcaagatacttgtgatcgtgctggtttagtggattttgcggaattgttattacgtgcttacgaattatggctgaaaaagcctgtgattttacagcgttatcaacaacgttttcagcacattttggtcgatgagttccaagatactaataagatccaatatgcttgggtaaaattgcttgcgggggaacaaggcaaggtgatgatcgtgggagatgatgatcaatcgatttatggttggcgcggggcaaaaattgaaaatatccaacgctttttagatgatttttccaatgcgcaaaccatccgtcttgaacaaaattatcgttccacggggaatattttggcaagtgccaaccagcttatttccaataacagcaatcgtcttggtaaaaatttgtggacggacggagaaaaaggtgagccagtaggaatctatgcggcttttaatgaattagatgaagccttatttgtttcctcacaaattaaacaatggatagaaaatggcggtaagctaaaagattgtgccattttataccgcagtaatagccaatcccgtgtgattgaagaggcgttaattcgttctcaattaccttatcgtatttatggcggcatgcgtttcttcgagcgtcaagagattaaagatgcccttgcttatttacgtcttattgccaatcgtcaagacgacgccgcgtttgaacgggtggtcaatacgccacctcgtagtattggtgaacgaacgttagatatgctgcgtagtgtgacccgcgaacgtgaagtgactttgtggcaagccacccaattagccattcatgaaaatttactgacggcgagagcagcaaccgcactacaacgctttttagagttgattaattccttacagcaagataccagtgaaatgcccttatttgcgcaaaccgattttgtgattaagcattctggtttatatgccatgtatcaacaggaaaagggggaaaagggcgaagtgcggatcgaaaacttagaagagttagtgactgccacaaaagaatttattaagccagatgaggcagaacagttatctgatttaacggcctttttaactcatgcctccttagaagcaggggaggaacaagcctcaccgcatcaagactatgttgaaatgatgacattgcactctgcaaagggattggaattccctcgggtatttatggtgggggttgaagaagggctatttccaagtttccgatcttttgaagaaccggggcgtttagaagaagagcgtcgcttagcttatgttgggatcacgcgcgcaaaacaaaagttgacgatttgctatgcggaaagtcgccgtttatatgccaaagaagaacgtcatcttccttcccgttttattgctgaattacctacggaatgtattcaagaaatccgcttacgtggtacggtgacacgtgccatgaatcagcagaaagtcggatcggttgcaccgagtttacaggaaagtgaatggaaaatggggcaaaaagtgctacatagcaaatttgggcaaggtacgatcattaatgtggaaggggcggagaataatactcgcttacaaattgcattccaaaatcaagggattaaatggctgattgcccatttagccaaattagaaaaaattcgttaa

SEQ ID NO: 30806 - DNA, 1404 bp, Pasteurella multocida
atggcaaaaaagaacgcccaaattccaagtaaacctcttgaacaaggcattgttccgccacattctttagaagcagaacagtctgttttaggcggtattttgattcacccagctcattgggatagcattagtgacatgctcattgccgatgatttctatttagctgcccatcgtgtcattttccaagaaatggaaaatttactccgtcaagggaagccaattgatctgatcaacctctacgaatttttacgcgaaaagaatctcagtgaagatgttggtggctttgcgtatttagctgaattatccaaaaacacaccaagtgtatccaatattgtttcgtatgccgctatcgtgcgtgatcgtgctattttgcgtgatttgattagtgtcagtaatgatgtggcgcaaagctgttacacgacaaaagggatggaggtgaaagatattctggatgaggcagaacgaaaagtctttgccatttcggagaaacgcaccacttcaaacgaaggaccgcaaaatatctgtgcgattttagaaaaaaccattgatcgtattgaattgttaagtaaaaccgaagggcataatggtatcacaggtgtcagtaccggttttgatgcgctcgataagaaaaccgccggtttacagccttccgatctcatcattgtggcagctcgtccttcaatgggtaaaacgacttttgcaatgaatttatgtgaaaatgcagcactcaaaagtgataaaccagttttagtgttcagtttagagatgccggcagaacaaattatgatgcgttctcttgcttcattatcgcgtgtggatcaaaccaaaattcgtactggacaagggttagatcaaagtgactggtcgaagattgggagtacaatggggctgttcgctaataaacccaacttatatattgatgattcatccggcttaaccccaacggaattacgttcacgtgcaagacgagtatatcgtgaaaacggcggcttaagtttgattatggtggactatttgcaattaatgcgggcaccgggatttgccgataaccgtaccttagagattgctgaaatttcgcgttcactaaaagccttagcaaaagaattagaagtgccagtgattgccttatcccagttaaaccgtacccttgaaaatcgtgctgataaacgtccagtgaattctgatttgcgtgaatctggttccattgaacaagatgcggacttaattatgtttatttatcgtgatgaagtgtataacgaaaactcggaagataaaggcgtggcagaaattattattggcaaacagcgtaatggtccgattggacgcgtgagattggcgtttagaggacaattctcacgctttgataacttagccgaacaacgagatataagagacgattattaa

SEQ ID NO: 30807 - DNA, 1083 bp, Pasteurella multocida
atgaatatgaaacctgccacagcaaaaatcagttctgtggcattaaaacacaacattcaaacgattaaacaaaaagccccgcaaagtaaaattattgctgttgtgaaagccaacgcctatggtcatggtgttgtgtttgtgtccgctgccgtagaagagttggtcgattgttttggcgtcgcccgtttagaagaagccttaagtttacgctcaaatgggattacgaaacctattttgctcttagaaggttttttttgcgataaagatttaccggtgattgcgataaataatattcaaactgtggtgcataacgtcgaacaattggaagcgttaaaagcagctaaagttcctaatccgattaaagtctggctaaaaattgataccggtatgcaccgtttaggggtagcactagaagacgttgagtatttttaccaagcgctccgcgattcagagaatgttgatccacagattggttttgtcagccattttagtcgcgcggatgaattggaatgtgactataccaagttacaattgacacgttttttaaatgctacgcaaaataaagcgggcgaaaaaagtattgctgcctcaggtgggatcttattttgggaaagttcccatttagactggattcgtccgggcattattatgtatgggatttcaccgattaatgtaccagcacaagaatatgatttaacccctgtgatgaccttaacctcctctcttattgcaattaaacagcataaaaaaggggagccagtaggatatggcgggatttgggtcagcgataaagacacgaaaattggtgtggttgccattggttatggcgatggttatccgcgtgacataccaacaggcacaccggtttacctcaatggtcgtcgtgtgcccattgtgggacgtgtctcgatggatatgttgacagtcgatctcggtgcagaagcacaagacaaagttggcgatgaagtcattctttggggcaaagaattgcccattgaagaaatcgcggatattagtggggtgattagttatgaattgattacaaaattaacgccacgtgttttaacggaatatattgattaa

SEQ ID NO: 30808 - DNA, 1956 bp, Pasteurella multocida
atgaagagaaaaaaagagatgactcaaaaacaaatgactaaaaatcccccccaacatgaaaaagaaaatgaactcaacacctttcaaaataaaattgatagtctaaaaacaactttaaacaaagacattatttctcaacaaactttattggcaaaacaggacagtaaacatccgctatccgcatcccttgaaaacgaaaataaacttttattaaaacaactccaattggttctgcaagaatttgaaaaaatatatacctataatcaagcattagaagcaaagctagaaaaagataagcaaacaacatcaataacagatttatataatgaagtcgctaaaagtgatttagggttagtcaaagaaaccaacagcgtaaatccattagtcagtattatcatgacatctcacaatacagcgcaatttatcgaagcttctattaattcattattgttacaaacatataaaaacatagaaattattattgtagatgatgatagctcggataatacatttgaaattgcctcgagaatagcgaatacaacaagcaaagtcagagtatttagattaaattcaaacctaggaacttactttgcgaaaaatacaggcatattaaaatctaaaggtgacattattttctttcaagatagtgatgatgtatgtcatcatgaaagaatagaaagatgtgtaaatatattattagctaataaagaaactattgctgttcgttgtgcatactcaagactagcaccagaaacacaacatatcattaaagtcaataatatggattatagattaggttttataaccttgggtatgcacagaaaagtatttcaagaaattggtttcttcaattgtacgactaaaggctcagatgatgagttttttcatagaattgcgaaatattatggaaaagaaaaaataaaaaatttactcttgccgttatactacaacacaatgagagaaaactctttatttactgatatggttgaatggatagacaatcataacataatacagaaaatgtctgataccagacaacattatgcaaccctgtttcaagcgatgcataacgaaactgcctcacatgatttcaaaaatctttttcaattccctcgtatttacgatgccttaccagtaccacaagaaatgagtaagttgtccaatcctaagattcctgtttatatcaatatttgttctattccctcaagaatagcgcaattacgacgtattatcggcatactaaaaaatcaatgtgatcattttcatatttatcttgatggctatgtagaaatccctgacttcataaaaaatttaggtaataaagcaaccgttgttcattgcaaagataaagataactccattagagataatggcaaattcattttactggaagagttgattgaaaaaaatcaagatggatattatataacctgtgatgatgacattatctatccaagcgattacatcaatacgatgatcaagaagctgaatgaatacgatgataaagcggttattggtttacacggcattctctttccaagtagaatgaccaaatatttttcggcggatagactggtatatagcttctataaacctctggaaaaagacaaagcggtcaatgtattaggtacaggaactgttagctttagagtcagtctctttaatcaattttctctttctgactttacccattcaggcatggctgatatctatttctctctcttgtgtaagaaaaataatattcttcagatttgtatttcaagaccagcaaactggctaacggaagataatagagacagcgaaacactctatcatcaatatcgagacaatgatgagcaacaaactcagctgatcatggaaaacggtccatggggatattcaagtatttatccattagtcaaaaatcatcctaaatttactgaccttatcccctgtttacctttttattttttataa

SEQ ID NO: 30809 - DNA, 1650 bp, Pasteurella multocida
atgaaaaacatcaatcctacaacaacaaacgcgtggaaagccttacaacaacatcataaaacgcaaagtgcggtgacaattcaacaactttttgcgcaagaaaaagatcgttttacggattattccttgtcttttaacaatgaagtgttagtggacttctccaaaaacaatgtgacaaaagaaaccttaggattattgcgccagttagcgcaagaatgtgcattgtctgaggcagtggacgcgatgtttagtggggcaaaaatcaataaaacggaagatcgcgccgtattacataccgcacttcgtaatcgttctaattcgcctgtgttggttgatgggaaagatgtgatgccagaagtgaatgcggttttagccaaaatgaaagatttttgccatcgtgtgatttctggtgaatggaaaggttatactggtaaagcgattacagatgtggtgaacatcggaattggtgggtctgatttaggaccttatatggtaacagaagccttacgtccttataaaaatcatttgaatctacatttcgtgtctaacgtagatggtacacatattgcggagaccttaaagaaagttaatccagaaaccacgctatttttggttgcgtcaaaaacctttaccacacaagaaactatgaccaatgcgcattctgcgcgtaattggttcttagccacggcaaaagacgaaagtcatgtggcaaaacactttgcagcactgtccacaaacagtaaagccgttgctgaatttggtattgatacgaataatatgtttgaattttgggattgggtagggggtcgttattcattatggtcagcgattggtttatctattgccctttcaatcggttttgagcattttgaagcgcttttagcgggtgcacacgaaatggataaacatttccgtactgccccaattgagcaaaatattccgaccacattagcgttaattggtttgtggaataccaatttcttaggtgcacaaaccgaagcgattctaccttatgatcaatatttacaccgttttgcagcgtatttccaacaaggcaatatggaatccaatgggaaatatgttgatcgtaatggcgaagtgatcgataactaccaaacgggaccaattatttggggcgaacctggtaccaatggtcaacatgcgttctatcaattaattcaccaaggcactaccttgattccttgtgatttcatcgcgccagcacaaacccataatccattagcggatcatcatgaaaaattactttcaaacttctttgcacaaaccgaagcgttggcttttggtaaaacgaaagaagaggtagaagcagaattcgtgaaagcaggtaaatctttagatgaggtgaaagaggttgtgccatttaaagtgtttacgggaaataaaccaaccaactcgattttggtccaaaaaattacaccatttactttaggtgctctcattgcaatgtacgaacacaagatttttgtacaaggggtaatgtttaatatttatagctttgaccaatggggcgttgagttgggcaaacagcttgcgaatcgtattttgccagagctagcaaaccgcgaaacaattacaactcatgacagttcaactaatggcttaattaaccaatataaacaatggcgttaa

SEQ ID NO: 30810 - DNA, 1671 bp, Pasteurella multocida
atgtcatcacaatttgtttatacgatgcatcgcgtgggcaaaatcgtaccaccaaagcgtcatattctaaaagatatttccttgagctttttcccgggtgcaaaaatcggcgtactaggtctgaatggtgcgggtaaatccactttattacgcattatggcaggcatcgataaagaaatcgaaggggaagcgcgtccacaaccggggatcaaaatcggttatttaccacaagaacctaaactcgatccacaacaaaccgtgcgagaagccattgaagaagccgttggcgaggtgaaaaatgcgctcacgcgtttagatgaagtgtatgccctttatgccgatcctgatgcggatttcgacaaactagctgcagaacaagctgaattagaagcgattatccaagcacatgacggtcataatctcgataaccaactcgaacgtgcggcagatgccttacgcttaccagaatgggatgccaaaattgagcatttatcagggggtgaacgtcgccgtgtggcactgtgccgtttattactcgaaaaaccggatatgttgttattagacgagccaaccaaccacttagatgcagaatcagtggcgtggttagaacgtttcttacatgactatgaaggcaccgtagtggcaattactcacgaccgttacttcttagataacgtggcaggctggatcttagaacttgaccgtggtgaagggattccttgggaaggtaactactcttcttggttagaacaaaaagaaaaacgtttagcccaagaacaagcggcagagtctgctcgtcaaaaatccattgaaaaagaattagaatgggtacgccaaaatccaaaaggtcgtcaagcgaaaagtaaagcgcgtatggcacgttttgaagaattaaacaatggtgaatatcaaaaacgtaacgaaacgaacgaactctttattccaccgggtccacgtttaggggataaagtgatcgaggtacaaaacctcactaaaacttacggcgatcgcaccttgattgataatctttcctttagcattccaaagggggcaatcgtggggattatcggtccaaacggtgcgggtaaatccactttattccgtatgctatccggtcaagaacaaccagactcaggcacgattaccttaggggaaaccgtggtattggcttcggtagatcagttccgtgatgcgatggacgataaaaaaaccgtgtgggaagaagtctctaacggacaagatattttacgcattggtaattttgaaattccaagccgtgcttatgtgggacgctttaactttaaaggggttgatcaacaaaaacgtgtgggcgaattgtctgggggtgaacgcggtcgtttacaccttgccaaacttttacaagctggcggtaacgtgttgttattagacgaaccaactaacgatcttgacgtagaaacgctacgtgcgttagaaaatgcgatcttagaattcccgggctgcgcgatggtcatctcgcacgaccgttggttcttagaccgtatcgccacacatattttagattacggtgatgaagggaaagtcactttctacgaaggtaacttctctgactatgaggaatggaagaagaaaacctttggtgcagaagccacccagccacaccgcatgaaatacaaacgtattgcaaaataa

SEQ ID NO: 30811 - DNA, 780 bp, Pasteurella multocida
atgaatactcaaattatccaacttgaagatacaaaattagaagtgaacaacctcaattttcactatggtgatttccatgcgttaaaaaatatcaatatgcgtattgcgaaacacaaagtgacggcgtttattgggccttctggctgtggtaaatcgaccttgcttcgttcgtttaatcgtatttttgagctgtatccaaaccaatacgccaccggtgaaatcaaattagacggtgaaaatttattaacttcaccaatggatatttcactgattcgcgccaaagtcggtatggtattccaaaaacctacccctttcccgatgtctatttatgacaatgtggcatttgggatccgtttattcgagaaattaagcaaagctgatctgaatgatcgcgtggaatgggcattaagcaaagcggcgttatggaatgaggtgaaagacaaattaaatcaaagtggcgacagcttatcgggcggtcaacaacaacgcttatgcattgcgcgtggcattgcgattaaaccagaagtgttactgttagatgaaccttgttccgcactcgatcctatttcaacagccaaaatcgaagaattgatttcagaactcaagcacgattataccgtggtgatggttactcataatatgcaacaagccgcgcgttgttctgattacaccgcgtttatgtatttaggtgaattgattgagtttgatgaaaccgccaaaatctttgacaaaccacgtctgcaacgcacagaagactatatcaaaggacgcatgggataa

SEQ ID NO: 30812 - DNA, 963 bp, Pasteurella multocida
atgctaagacgcaaaacccaagcggaaacgaaccgcttaaatcatcatattattgaacttctttttaggcaaactacacgttttttcgccatatttgtgtttttactgcttgctgcagtgatgacatctttggtctttggcagttgggattcgttctcaacatttggtttttcttttttatggcacaatgattggaatcctgttcaagaaagctacggtgccattattcctattgtaggtaccttaattacctctttcttagctctcattatcgccgtgcctatttctttcggtattgcgattttcttaactgaattagcaccagagtggttacgacgtcctgtgggtactgccattgaaatgctcgccgcaattccgtctattatttacggcatgtggggacttttcatttttgtaccacttttccaagaacacatccaaccgtctttaatcgaatggtttggcgatctccctgtattcagttatttattttctggtgcgccttttggtattggtttattcaccgccggactggtgctagctattatgattattcccttcatcgctgccgtaatgcgcgatgtattcactatcgttcccgccattttgaaagagtccgcttatggactgggatcaaccacgtgggaagtgatgtggaaagtggtgttaccttatactaaaactggcgttgttggcggcattatgctcggtttaggtcgtgcactgggcgaaaccatggcggtcacgtttgtgattggcaatgccttccatttaccggaatccttgttttccccatccacttcgatcgcctccgccatcgcgaatgagtttaatgaagccagtggattgcaaaaatccgctttaatggaattaggcttaattctcttcttaatcaccaccgtcgtgctatccatttcacgtttattaattatgcgtattgagaaaaaagaaggacggaaataa

SEQ ID NO: 30813 - DNA, 1920 bp, Pasteurella multocida
atggtaaaaaatttagtcctttggattgtggtagctgtggtaatgatgaccgcataccaaggctttaattcaagctcgtcaggaaataccactgactataccaccttcattacagatttaggtaacgatcaaattcgtcaagcccgttttgattacaatgaaatttttgttaccaaaaccgatggcagcaaatatacgacagtcatgccgttaaatgacgataaattactcaatgatttgctcaataagaaagttaaggtagaaggaaccttaccagaaaaacgggggttattctcacaaatcttaatttcttggttcccaatgcttttactcatcggggtttggttcttctttatgcgtcagatgcaaggcggtggcagtaaagccatgagctttggtaaaagccgtgctcgaatgatgacgcaagagcaaattaaaaccacgtttgctgatgttgcgggttgtgatgaagccaaagaagaagtgggcgaaattgttgatttcttacgtgatccaggtaagttccaaaaacttggcggtaaaatccctaaagggattttaatggtaggaccaccgggtacgggtaaaaccttattagctaaagcgatcgccggtgaagcgaaagtacctttctttactatttcaggttcagatttcgttgaaatgttcgtgggagtcggtgcgtcgcgtgtccgtgatatgtttgaacaagcgaagaaaaatgcaccttgtttaatttttatcgatgaaattgatgccgttggtcgtcaacgtggtgccggtttaggtggtggacacgatgaacgtgaacaaacgttaaaccaaatgttggtggaaatggatggctttgaggggaatgaaggcgttatcgtgattgcggcgacgaaccgtccagatgtgcttgacccagcattaacccgtccgggtcgttttgaccgtcaagtggtcgtgggcttgcctgatgtgcgtggtcgtgaacaaatcttaaaagtacatatgcgtcgtgttccgattgcacctgacgtcgatgcgatgacacttgcgcggggtacaccagggtattcgggggcggatttagccaacttagtcaacgaagccgcgttattcgcagcacgtactaataaacgtttggttactatgcttgaatttgaaaaagcaaaagacaaaatcaatatgggaccggagcgccgtaccatgatcatgacggagaagcagaaagaatcgacggcttatcatgaagcgggacacgccattgtcggttatctcgtgccagaacatgatcctgtacataaagtcacgattattccgcgtggacgtgcattaggggtgactttcttcttacctgaaggtgatcaagtcagtatcagccaaaaacagttagaaagtaaactttctacattgtatgcgggacgtttggcggaagatctgatttacggtgaagagaatatttcaaccggtgcctcaaacgatattaaagtggcaactaatattgcccgtaacatggtaacccaatggggattctcagaaaaattaggtccaattctttattcagaagatgatggtgaagtattcttagggcgttcaatggcgaaagcaaaacacatgtcagatgaaaccgcacatcttattgatgaggaagtccgtaccattgtgacacgtaactatgaacgtgcaagacagattctgattgataatatggatattttacatgccatgaaagatgcgttagtgaaatatgaaaccattgaagaagaacagattgagcagctgatgaagcgtcaacctgttacaccgccatcgggttgggatgaaaatgaaccgactacgcaaaacaatgcagggacaaaagcctctccagaaccgaaaagtgcggtagaaacggaacaagattccgatcatcaatcgccttcggataaataa

SEQ ID NO: 30814 - DNA, 828 bp, Pasteurella multocida
atgaaattatacgcaaacaataaagtattagacttatctacgccccaaatcatggggattttaaatttcacaccggattccttttcagacagtggtcaattctttgcgttagacaaagccctttttcatgtggagaaaatgttaaatgctggggcaactatcatcgatattggtggtgagtcaacgcgtcctatggcagaagaagtgacgcttgaacaagaattagatcgtgttattcctgtggtggaagcggtgcgccagaactttgattgctggatttctgtggatacctcgaaagcggaagtgatgaaagaagccgctcgagtaggaatggatctgatcaatgatattcgtgcactacgtgagccaaatgcattactcactgcggcgcaactggatttaccagtatgtattatgcatatgcaaggagaaccccgtactatgcagcagaatccgtattatgaggatgttgtggctgaagttttcgcctttttacaaacgcgttctgcagaatgtataagcgcgggtattcgacaagaaaatattatttgggatatgggctttggttttggtaaaaccgttgtacataactataaattattgcaaaacttagcgcacttttgtgctgcaggctttcccgtattagcgggcttatcccgaaaatcgatgattgggaatgtgttagataaagcggtagaagaccgtgttgttgggagtgttgctggtgcgttaattgcaatggtgcatggtgcagcaattgtacgtgtgcatgatgttgaacacacagcggatgcgctcaaaatttggcaagcaacaaagaatgcttaa

SEQ ID NO: 30815 - DNA, 1335 bp, Pasteurella multocida
atggcagaacgtaagtattttggtacagatggtgtccgcggcaaagtgggaacattcccaattacccctgattttgctttaaaattgggttgggctgccggcaaagtcttggcgacgcaagggtcaagaaccgtattaattggtaaagatacccgtatttcagggtatatgttggaatcagcacttgaagcgggtttagcggcggcagggctctcagcggcgttcaccggaccgatgccaactccggctattgcttatttaacacgcacatttcgtgcagaagcggggattgtcatctcggcatcgcacaacccttattatgataatggcattaagtttttttctgcccaagggacaaaattaccagatgatgtagaagaagcgattgaagctatgctggatgaaccgatggattgtgtcgaatctgcggagcttggtcgagcaagccggattaatgatgcggtaggacgttatattgagttttgtaaaggaacgtttcccgctcacctgagtttagaaaactataaaattgttgtggattgtgctcatggtgcaacctatcacattgcaccgaatgtaatgcgtgaactgggcgcagaagtgatagaaatcggtgctaagccaaatgggctgaatattaatgagaaatgtggtgccaccgatatcaaagcactgcaagagaaagtgcttgaagtgaaagccgatgtgggacttgcctatgatggtgatggagaccgtttaattatggttgaccatttaggcaataaagtcgatggtgatcaagttttatttattattgcgcgtgaagctttacgtgcaggtcatttaaaaggtggtgtggtgggcaccttaatgagtaatatgagtcttgaacttgcgttaaaacagttaggcattccgtttgttcgtgccaatgtgggtgaccgttatgtgttggagaaaatgcaagaaaaaggctggttattgggaggggaaaactccgggcatattattattttagataaaaacaccactggagatggcattattgcttccttagccgtattaagtgcgatggtacagcataacttatctttaaatgagttagccagtgctgtgccgcttttcccacaagtgttaattaatgtacgttttgctgggggagataatccactcgaaagcgctgcggtaaaagcagttgccgcagaggttgaaaaacgtttggcaggcaaagggcgcattttattacgtaagtcgggtactgaacctttaattcgagtcatggtagaatgtgaagatggtgcattagctcaacaatgtgcagaacagattgcggatgttgtgcgagctaactaa

SEQ ID NO: 30816 - DNA, 252 bp, Pasteurella multocida
atgttatgtgcgatttataaaagtacaagaaaaatggggacatatctttatgtggcaaaacgtgatcaatttgatgtggttcctgaggtattaagaaatgcttttggtccccctgtttttgtgatgatgtttaatctcgctggcgagaaagcattagttaatgcggagaaagccgaagtccgtaaacaaattgaaacacaaggtttttatttacaaatgccaaaagaggatgactggctatttaagttgtag

SEQ ID NO: 30817 - DNA, 684 bp, Pasteurella multocida
gtgattgaaacacaacatttatacaaaagattcggtcaagtgaccgcacttgaagacatcaacattcaaattaaagaaggcgaatttgttgcaatcatgggtgcctcaggttcaggcaaaacgacgttaatgaatattctcactggtttagacactgccagtgaaggaaaagtgatcctagatggtgtcgatgccgcacaacttgatgaaatcggcagacaacgattccgggcggagaagatcggtctggtctttcagcaattccacttaatcccttatttaactgccttggaaaacgtcatgttagcacaacattatcacagtgtaattgatgaagatgcagccaaggcggtgttacaacaagtcggtctggcgcatcgtttcgaccacagaccaagccaactgtctggcggagaacaacaacgtgtgtgtattgcgcgcgccttagttaatcagccgccggtgatttttgccgatgagccgacaggaaacctagatgaaaaaaatgagcaactggtgctcgatttactcgtcacattaaaccaacaaggacgtacagtcgtgatggtcacccataatcctgagctaagtaaactggccgaccgcactattttcttacagcatggtaaattcctacgagaagcctcaaatgaaaacaagcgtattgttaaccgcactttttaa

SEQ ID NO: 30818 - DNA, 1905 bp, Pasteurella multocida
atgttttacgttaatcaacttcgatatttagtgctcattttcagcgtgtttttctgtaccttcacacaagctaaagacaattatgccgagtggattcaagacattgaacaccgtttagacaaaacggtgcatctatatcaacaaggtcaagctgacgaagcacgtacggaagtgcaaatggcgtattttgaagtgttcgagaacttagaaggtccgattcgtattaatttctcagcacaaaaaagttaccaaatggaagcgacgtttgctgaaattcgcaaaatgattggtgaaggagtttcattagaagcaatacaaacaaaaatcaatggtctcaaatccgaactgcaagaagtattacctgtattagcggacggacaccaactcaatgcctctgcccaacatgacgtgtatagcaatcaaactattgcccaacactggcaacaaagttttaaaattattgatgatctgcttgcccaagcgatcagtgcttatgaacagggcgaatttgctcaagcgaaaaaatgggttcagcaagcacaatacgatggttttaaaaatgctgaaatggaaatggctattcgtcaaaatcgttctgcctccatttcagctagcattaatcaacaattttatgatctcattcgtcttagcgaaaaaccggatcaactcaataacttaggctaccaaatcacgttgttgttacaagagattgaagaacagctaccaaatcttccgactacgcgtgaaacacaagtggtgcaagcacaagtcaactcaacagacaatacacccgatcaagactggcagaaagtaacgaatgagattaatcaacgcattcaacaagcgatgaacttatatcaacaaggtgaacagaaaaaagcaatgcttgctgtacaagatacctattttgatgtcttcgaaagtagtgggatggaaaacaaaataggcgcacgggacagcaatatgaaagctgaactcgaaggctatttcacccgtttagtaagtttgatcaaagccaatgcctcctccgatcaactacaacaacaagcaaatcagctcgctcaaggcttaagcaaaagtgtcgagatgttacaaggaggaaaacaaagtcattggtcaatgttcctctatagcctgttaattattctacgtgaagggttagaagccttgctcattgttgctgcgattgtgacttatctgatcaaaaaccaacatcaagataagcttcccgttattcgccaatctgtctatgttgccttgatcgctagcctgattaccgccgtgatttttcaattcgtgtttgctaatgcaggcgccagtcgagagctgctagaaggttttacaatgatgatcgctgtagtgatgttatttatgatgagctactggctattatccaaagtagaagcgcaaaattggcaacgttatttagaaggcaaattgtctagcgcactcacaacgggttcattgattgggctatggctcaccagttttctcgctgtctatcgtgaaggggcggaaacggtgttgttctactacgcgttggttgctgatgccacaagtgcggtcagttatctctaccttttcgcagggttggtagtgggtatagtcattctcaccgtctgttatttgattatgcgctataccgtggtgaagctgccattaaaacccttctttatgtttactggcacctttatgtatctgatggcctttgtttttgccggcaagagcgtattagagttaattgaaggtaaactttttgaaccaactttaattgtgggtgctcccgagatcagttggttaggtatttatccttacctagaaaccttgataccacaagtgatattacttattgctgccctttttgccttgttctatatgaaatatcagaaccgcaaagcagtttag

SEQ ID NO: 30819 - DNA, 891 bp, Pasteurella multocida
atgacagcgcaaagtggcgtattattagagcattgcaaagctgcaatttatttagaagcaaacatcacggatctgacggtgattcctgaagcaagtcgtcaattctgtgacaaattagcacaattacaacaaacctatcctgatgctagactcggcgcggttgttgcctttggcgatagggtgtggaaacaattagcaggagagaacagtgcaaaagagctcaaaccttttgtgacattaggtaaaggtgatgcctccgcacctgccacccaatgggatctgttgattcatattcaatctttacgtcctgatgtgaatttttctgtcgccttagccgcgatgaactgctttggtaaagcgattcaggttgagcaagaaattcatggttttcgctgggtagaagaacgtgattttactggttttattgatggtacagaaaatccacaagcagcaaaacgcgcagaagtcgcactcattgcacaaggtgacgatacggatggaagttatgtctttacacaacgctatgagcataatttaaccaaatgggaaaagcttactactgcgaagcaggaaatggtaattgggcggactaagccggacagtattgagttagaaaataaagtggatacctcacatgtagggcgaactgatctaaaagaaaatggcgtgggattaaaaattttacgtcatagtttaccttatggtaaagccagtgagaaacacggtttattctttgttgcttactgtgcaaccctgtataacattgagcaacagttactcaatatgtttggtgaaaaagacggtaaaaccgatcgtttactaggctttactaaagcagtaaccgggagctattattttgcgccgtcgttagagaaattaaaaactctctaa

SEQ ID NO: 30820 - DNA, 2328 bp, Pasteurella multocida
atgccaaaatccaacaaaaccaatgtaagccgaaaaaaatcttcttggcccctcttatgtgccaaagtgagttttacattaatctgtatgttggcgttttatggattgtatttagattggcaaatacgctctaaaatggatgggcagatctggcgactccccgcagaagtctatagccgtattgaacgtatcagtcttgaagaacaactgagctttgaacaagtcaaacaacgtttattagacaatgattatcgtcaaaccaccctagtagcagcccctggcgattttaaagtggaaggtgacaccctcgttttgctacgacgcgcgtttccctttcctgtacaaccagaagcacagcgtgtctttcgtctacgttttaaacacaatcaattggcagtaattgaagatttaatcaaccaacgtaccattcctgagtttcgtttagcgccaaaattaatcgctatgctacagtcagagaaagaagagcgtttagcgatcccactccataactatccacgtttattaatcgatgcattattacttaccgaagatcgtcgcttttaccaacatgaaggaatcagtttactcggcattgcacgtgcgatgatcaccaatattcaagcaggtcatactgtacaaggtggcagtaccttaacgcaacaattagtcaaaaacctgtttttaagtaacaaacgaaccctaagccgtaaagtcaatgaagccttgatggccgtgattttagattggcgttacgataaaaatcgtattttagaaacctatttaaatgaaatttatttaggacaaaatggcgatactcaaattcatggctttgaactggctagccacttttattttgggcgctcaaccaacgaaattagtttggatcaaatcgccttattagttggcatggtcaaaggtccttctctttataatccttggcggaatccgaacaccgcattagagcgccgtaatgtggtactgcgtttactcctcgatcatcaagtaattgggcatgaactgtatcaaatgttagtccagcgtccattaggcgtacaagaacgtggtcaaattacgcgcaagtaccctgccttcattcagaccttacaagctgaattacgtgagcaattaggcgaaaacaaagccacgaatttattaggagcacggattttttcaaccttagatcctaaacaacaaacccatgcagaaaatgcagtagtcagtgcgacatctaccttacaagcgaaacacaaaaacccccatttacaatctgcgatggtaattgctgattatcgtttaggcgaagtgcgggccattgttggtggtttacaaacacaatatgcgggctttaatcgtgccttaagcgccaaacgccaaattggctctttagtaaaacccgccatttatttgaccgcactttcagtacctgacaagttccgtcttaatacagcgattcaaaatcaaccgattaccattcaaattaaaggcagcccaccgtggcaaccgcgtaactatgatcgcaaatacagcggttccgtgatgttaatggatgccttagctcgttccttaaacatcccaacagtaaatattgggatgcaagtgggattagagaaagtgattgaaacacaaaagaaaatgggttgggataaagtacaaatccccaaagtacccgccactttattgggcgcttatgcgatttccccttacgaagtcacgcatttatatcaagtgatcgccaatcaaggacaaaaaatcccgttggcgaccattgacagcatcacagaccaacaaggaaatctcttatatcaacgccgcttagaacctgagcaagtggtaccggctgaagccagttatcaaacactgtatgctatgcaacaaaccgtaacgcgaggcactgcgcgcagtttacaaaaccaatttagtcacttacatcttgccggaaaaacaggcactaccaatgatgcacgtgatacctggtttgtgggcattgatggtgaaaacatcgtgacggtttggttagggcgtgatgataatggcgaaaccaaactaactggcgcttctggtgccttgcaaatttatcaaaattatttacagcgtcatccggcaactgtacttcacttaccttctcttaacagtattcaatgggtaggtattaatgattatggtagttgggattgttcaagcgcacgtcaaattcccgtttggataaatcatgctcagtctttttgccaagcacctgaaatcagcaaacaagaaagcgtatgggatgtgttatcgccgggtgctccatcaaaccaaccggcaccagtagaagatgccattgctaactga

SEQ ID NO: 30821 - DNA, 2595 bp, Pasteurella multocida
atgctttttccttattttcccttaagtgagcttgatgtcagtgcagtacgaactcagaaagaaaatttaaagcaattcgagttaacgcaatttgcacactatgaaatctatgatctgattactaaccgtacgcaattttgtgatcatctcttgcgggatctttggctacgatttggcttagtcaaggataacacactcaccttgatcgcggtggggggatatggtcgtgaagaaatgtttcctttgtccgatttggatttcttgatcttaacaagcgagcaagtagaggcgcaaactgaacaaaaaattcgtcaattcgtgcaatttttatgggattgtggttttgatgttgggcatgcggtgcggaccttatcagagtgtgaacaagctggacgtgacaatattacggttgcaacgaacttattagaagcgcgttatttagaggggaatttctcacaatttcagcagttggacaacgtattgcaaaaagccgatttttggccacgtgaggcatttttccaagccaaatatcaagagcgagttgaacgttatcaacgttatcataataccagctataacttagagcctgatattaaacacagtccgggcggattacgtgatcttcacttgttatattggatcgccttacgtcatactggggcgaaaaatctaacggatattttgaattcgggctttatatatcctcaagaatatgcgcagttactggaaagtcagcaatttttgtttaaagtgcgctttgcattgcatttaattttaaaacgttatgacaaccgcttgttatttgaacgtcaaattcgtgtcgcagagttacttgaatttgtcggaccgggtaatcaaggtgtggaaaaaatgatgaaatcatttttccaagcgctacaaacgatctccttactcagtgatttgctagtcaaacattatcgcgagcactttttacaaaccaatgaacccgtacaagtcagattattagataaggagttccagtgtgtaaataatgccatttgtttacgccaagcaaatttgtttgtagaacaacccgaacaaatcctaagcttattttttcatttaacgcaagatcatcagcttgatattcattcttctacgttacgtcagttacatcttgcccttgaacagcgcagcggttatttgtctgaattgccggtagcaagagagcgcttcttacgtttattcaatcaacctggtgcaatcgcgagagcactggttcctatgcataaatacggcgtattaaaagcctacttaccccagtggcaccatattgaaggcttaatgcaatttgatttatttcattgttataccgtagatgaacatattgtgcgaaccttgctgaaactagaatattttcttgaggcagaaagtgtggtcccccatccgatttgtagtcagattttttcgcgcttaaccgaccgaacattactctatattgcagccttattccatgatattgcgaaaggacgtggcggtgatcatgccgaattaggggctgttgatgttgctcagtttgcgcagcaacatggttttgatcaacgcgaaattcacacactgacttggttggttgagcagcatctactcatgtcggttactgcgcaacggcgcgatattcatgatcccgaagtggtattacattttgcggaagccgtacaaaataacgtgcgtttagattatttaacctgtttaacggtagcggatatttgtgcgacaaatgaaacgttatggaacagttggaaacgtacattaattgctaccctctatcaatttactacgcaacaatttgcacaaggtatggattgcctcttggatcatgcggagaaaattgaaaatcatcgccagcaagccttgacattattaacgcaaaatagcctgttaagtgcggtacaaattgaagaaatttggcagcactgtcctgaagagtactttttacgtaataccccgaaacaaattgcttggcatacagaattactggcagataaccaaacagaattattggttaaaatcagtaatcgtttttcagaagggggaaccgagatttttgtgtattgccaagatcaaccgaacttgtttcataaagtggtgacgacgattggcgcgaagaagttcagtattcatgatgcacaaatcatcaccagtcatgatggttatgtatttgatagttttattattaccgaattagatggcaagttagtgaaatttgatcgtcgtcgtagcttagaaaaagccttaatgcaggcactgaatacgagcaaattgccaacatttcgtgcgactgacaaccctaaattacaacatttccatgtcaaaacagaggtgcgctttttaaaagaacagcgaactgatcaaacggaaatggaattgtttgctttagatcagacaggtttacttgccaaagtgagtcaggtgtttagtgagttaaaactgaatttgttgaatgccaaaattacgactattggcgaaaaggcagaggatttctttattctgacaaacagtgaagatcgcgccttaacggctgaacagcgacaatgcttaacgcagcgtttacatgaagtactcgaaccaaaatag

SEQ ID NO: 30822 - DNA, 1074 bp, Pasteurella multocida
atgctattgagtttaattgtgacatttttgggggcatttctgacattattatttatgcgcccgattgcccaaaaaataggtttagtggataaaccgaattttcgtaagcgccatcagggtgcgattcctctaattggtggtgtgtcgttgtttgttgggaatctctgcttctatttattagagtgggaacaaatgcgcttaccaacactttatttatttagtatttttgtgttgcttgtgatcggtatgattgatgaccgttttgacatcagcccttttttgcgtgccggtattcaagcaatattagctatattaatgattgatctcggtaatctttatttagatcatttggggcaaattctcggtccatttcagctgacacttggatccattggcttaattattacagtgctagccactatagctgcaattaatgcctttaatatgattgatgggattgatggtttactaggcggattatcgagtgtggcttttgtgtctattggcattttattaattaaggataatcagcttgacttggcttattggagctttgccttaattattgccattctgccttattttatgatgaatttaggcattccttttgggcagaaatttaaagtatttatgggcgatgcgggcagtactttaattggctttacgattatttggattttactgctcagtacgcaaggtaaagggcatccaatgaatcctgtgacagcattatggataatcgcgatcccacttattgatatgattgcgattatgtatcgccgtttacgtaaaggcaaaagcccattccgtccagaccgtttacatgtacatcatttaatgatgcgtgccggtttaacatctcgtcaagctttcttattaattactttcgcagcggcaatttgtgccacgattggtattttaggagagattttttatattaatgaatggctgatgtttgccggatttattctattattttttatgtattcttattcaattacacgtgcgtggcgtattacacgttggattagacgaatgagaagacgcgcaaaacgtattcataataagggttaa

SEQ ID NO: 30823 - DNA, 909 bp, Pasteurella multocida
atgtacgaagggcttctcattgttttatgtccactttttgtcggttatctcataaaaacacaaaacaaaatactcttaacctcaattaatcacatcctgatgatactactttatattattttattcatcatgggattttcattaggacaattagatgatctggcaaaaaagttacctgtcattgcgatttccgccgctacttttgccattctgatccaatcattcaatttggtgggactcatcgcttatgatcggttttcccctaaaccattaaaaaaagtcacaggtgaaatgccctctcgttggaaactcttatttgattcaggaaaactttgtgcgatggtacttcttggtgccttcatcggctatgtaataaaaggtaaattcagtctacctgaacacgccagtacttacgtcttagtttgtcttattttttccgttggcatccaattaaggaataatggcattgctttacgtgatgtacttttcaataagcgaggattgataactggggtaattttcattatcacatccttactgggtgggctactcgctgcaatactattaaaattacccctcacccaaggtctggcaattgcgtctgggtttggttggtactctctgtccagtgtcctcattaacgatgcatggggaccgatgtttggtagtatcgccttttttaacgacctctcacgtgaaatcgttagcttatttctcatcccatttttaatgcaaaatcaccgctcttctgcagtcggcatttcaggcgcgacagctttagattgtacattaccgatcatccaaaaagcaggggggattgaagttgtcccattggcgatcagttttggctttataacaaatatcttgccgccaattctcttggtctttttttcctcttttccaatttag

SEQ ID NO: 30824 - DNA, 1563 bp, Pasteurella multocida
atgcatttacggcaattagacgtgttgggatttcgaggtattcaccgtttatctatccattttagtgcggatatggtgttaatcggtgaaaatatgtggggaaaatccagtttactctctgcattaagtttgatttttaacccagaaaaagcactttatcaatttacattgcgtgattttcatattccagctgaacaaactgagccggtacgccaccttatcttattatttacttttgcggaaagtgaaaaaaacgaagacagtatggagtatcacttaccttatttacaacatcatttgctcgtcgaccatctagatggttatcaacgcctttatttacgggttgaaggacagatcaatgcaaacaatgaagtgaatacgacttatgcatttcttaatgaaaagggcgagccaattgtggttgatgatatcaataacttggtattttcattaattgctcgtcatcctgtttaccgtttccgtgatgctcgattaaatcgcgcacatcattccttccgatttattcgtactgaagtccaagatgagactcaagatgaaattcgtgcggtttctgatctgttatgctattacttcttgaatcataaaaatatgacggaaattaaacaggatacgacgttactctggcataaagcgaagtcactgtgcactaaattaaaacaagatgaaacgcatcggctacgcaagaagctgtttttttcgttagccagtttatttgttcgcaatcaacgtattcatttcggtcgttttacgcgtccgattatcctctttgaagatcccgatgcgagattgcacccaagaatggtagcgattatgtgggagcttgtcagttatttgccggtacaacggattacaaccacgaattcggttgaattactttcacaagtcaatttaaatgcgatttgccgtttagtgcgtacaccagaaaaaatcaattgttttcaattacgccgaaaagatctagggaaagaagattttagacggttaactttccatattcatcataatcgcagtttagcgttattttcacgcatgtggattttagttgaaggagaaagtgaggtttggattttatccgagttagccaaattattagagattaatcttgaaatggagggcattcggattgttgaatttgcccaaagtggtttaaaaccgttattaaaatatgtacaagcgatgggcattcaatggtatgtgttaacagacggtgacgaggcggggaaaaaatacggtgaaatcgtcgaagatatgcttgatgaagaaatggtcagggcagatagaattaccattttacccaaacgtgatattgaacactttttttatgctaatggctttgcggatgtcttcattcgcctcgcacagtggcaaattaaatcccattcctatcctatgagtaaaattattcaacgcgcgattcaacgtacttcaaagcccgatctggcgatagcattatctaatgagataaaaaagcgtggcagtcaagctattccgttgttgtttaaacgcttgttttccaaagtattaagtttagcgcgaacgtag

SEQ ID NO: 30825 - DNA, 1791 bp, Pasteurella multocida
gtgaatccatcttttttagctgaaaaagccctttcctggcaagaactacgcccagaacttcaattaactgaattaccccattcatcattagatttctttgctttgcagcagcgagcaagtgcggctgtgaatcaatttttacacaatcctcatcgccacctatgcgtgttaaaagctgatgagcaaggggaatatgcgcatttactggaacagtttgtcgccagtcagcaacaacatgatgatagagtacatggtgtgcaataccttgttgagcaaggtgactctttttcatttccacgcatttttatggaagttgcacaaaatcagaatgataattttgccgccaaaagaaaggttgcgagtgcgttatacgttgatcaatttcaattactgggatcaatacgtattcatccgagttcgcaagaaattcagttaaatcccggcttagtgcatcaactcaatgggggagtgttaattttaggtgttggttcccttatcaaccaatttgatttgtggattcgtttaaaacaactgcttttaacacagcgttttgattggtattccgcacatccatttaaagctttaccttgtgatattccaagttatcctttgtcattaaaagtgattttactcggtaaccgagaagaattagcgacattggcagaattggatgcagatttgtatgatctagcagattattctgaaattgaaagctattatgctattgaaagtgctgaacaacgcatgaaatgggcagaatatgtgcaatcaatggcgagctatcaccaattaccccaattaaccttagacggtctgaacaagctttatcaactcttagtgcgtgaaagcgaagatcgcgcatttgtttctatctctccattgaaattaaaagccattttatcaggtagcgcgattttaaaacaaaaagacaccaatgcgttgttaagtgcggtggattttgagcaattttttcaacagaaagaaatgcaacaaagctttttaaaagaacatacctattcggatattttgcatgaacaagtgtatgttgccaccgaaggggatatcgtagggcaaattaatgggctttccgtaattgaatatcctggtacaccaatggcatttggtgagccttctcgtattagttgtattgtccaatttggggatggtgaggtggtggatgttgaacgtaaaagtgaattggcgggcaatattcacggcaaaagtattatgattgcacaagcctgtttagcacatactttgggtttcccttctcaattgcctttttctgcttctttggtctttgagcaatcctatggcgaaattgatggcgatagcgcatctttagcaagtttttgtgttttagccagtgcattagcggattatccattacctcaatctatcgctattacaggggcgatcgatcaattcgggctagtccattcagtagggggcgtgaatgccaaaattgaaggattcttctctatctgcgcacgtcgtggtttaactggacagcaaggcgtgatggtaccgagcacggtgattcatcaactgagtttaagtgaagacgtcgtcaatgccgtgaaggctggacagttctttatttatcctgttgaagatgtgtatcaagcttgtcatattttatttcaacgggatttggttgaggaaacgggaaaagtttacagcgaagtggacttgccgctttctcgcttgatcgcaatacgaatagaacaacgggcagagcagcaattgtataaaacgagtgtttgggattggttgctgcgtaaacgataa

SEQ ID NO: 30826 - DNA, 975 bp, Pasteurella multocida
atgaacgcaaccttaaatgtcgctattgcggcagaattcgaattaagcgagaaaattgctgaaacactagaagaaagtcagctaaatattagtcaattatcaattgttgaaatttatcctttcaatgaagaacaagggatacgttttcataataaaagtgtggtacaacttaaaccagaagaggtggaatggtcatcaatccattatcttttctttgctggcgatattcagcaagtcgctcatctcgcgaaagcagcagaaatgggctgcgtggtgattgatatgaaagggatttgtgccagcttgcaagacgtccctgtggtgataccgggagtaaatcaggaaaaattggtagatttacgtcagcgtaatattgtgtccttagccgatccacaagtgacacaacttgcattagccatcgccccgttgatgtcaaatcacgaaatcaaagacattgccgtaacctcgttattgcctgcatcttatactaacggagaaacggtaagtaaattagcgggacaaacagcgcgattgttaaatggcattccacttgatgaaggcgaacaacgtttagcttttgatgtttttcctacgcccgcatcgcatttaaatacacaaattcacaagatctttccacaattagataatgtcgtatttcattctatccaagtgcccgttttctacgggatgggacaaatggtgagcgtattatcggattatgcattagctcctcaatcttgcttagcgagctgggctgacaatccgttgatgacttatcatgcagaaaaatattgcaccccagtgacgaatggcgaacaggaaatggcagaagagcaagcagcaaaattacatataagtgggttaagtgcggtggaaaatggtctacaattttggtcggttgcagatgaacagcgctttaatcttgctttattgagtgttacgcttgcagagttaatttactcgcaaggttattaa

SEQ ID NO: 30827 - DNA, 1095 bp, Pasteurella multocida
gtgtcaattaaattatggtttcgtgtcagtggtttgctactgagcctgattctggtggggtgtgcaaataagccaccgattacaccgttagccacaggcagtcaattttctaaagcacgtcaggtggaaaatttttcagattatgtcatttttttaaaacgcaaagcgcgtgctgaaggcgtctctgaacaaacgctcaatgatcataatgatatccagtatatttccagagcgattgagcttgatagacaacaggcaggtcgagtgcaaaaacgtgatcctaatgcgcctgttcgttccaatccacatggcacaacccattatctgaatcgggtgttaacacaacgtaaggtggatgtggcgacctcccgttattgggaacaacaagcccaattggaaaaggcaagtcaacgttttggtgtgcaaaaagaatacctcatgtccttatggggtatggaaagcagttttgggcattatcaagggcaatatgatgtattgtctgtattggctaccttagcctttgaaggacgccgagaaagcttgtttagccgtgaatttgtttctgccatgaaaatgttagaacgtcgtgatatcccacgtcaaaaaatgttaggttcatgggcgggagcgatgggacaaactcaatttatgccaagttcttatttacgctatgccgccgatggtaatcacgacggcgaaaaagacatttggaaaaaccacgatgatgtgtttgcctcaattgccagttatttgagtacagtgggttgggataaacaattaccatggggggtagaagtgcagttgaccaaaccgctcgatatcgccttgtcaggtattgaacatcagaaaaaacgccctttaaccgcttggcaacatttaggcgtcgcactcaagtcaaataatcaacaaaatcaagaaaaactaaccgcacttgctggtgcagatttatggcttgtgcaacctgatcgtgaagttggacgtgcctttttagtgtcaaataattaccgcatattactcgattggaatcgctcaaattattttgcgctgagcattggcatgtttgctgatcgcattaaacatcagttaggtttgtaa

SEQ ID NO: 30828 - DNA, 1974 bp, Pasteurella multocida
atgcttgctaccttaaaagaattaaaacaacacaaggtgatcagtgaaggggattactactttgcgcaattgatcgcggataagcaaccagatgaactgccgcgggaacagaaaaatttagccatattgcttgccgcactttgtagttacagctatcaacaaggcaatacttgcttgtttctagagaaagggctggaatctaattattttaatttggcttatcgaacagcagagcagcattatcttcatattattcaagaaaaaattgcttttctaccgattgaatgttggcaatcaagcttggcggatcatatagcgtttacagcaacgccgctggaaaaagtcgcccctttagtgtttcagtttaatgcgctttatttttatcgtatctggcaagatgaataccgagttgctcattatcttcaacgtgcagtacagcggggggctgagacagcgcctattgcttatgagcaaatccaagcgatcttaatgcactattttcctgccgtacagcaaattgaaggggtgaattggcaaaaagtagcagtagcgaccgcgttaaaacaaccattttgtttgattacaggtggtccaggaacagggaaaaccactactgtcgcacgtttactcttggcgttacagacactttctgcgtgtcagcttaagattaagttagttgcacctacaggcaaagcggcagcacgcttgacggagtcaattaatggtgcgttaacgcgtttagcacaagaaaatatggcgatcagtgccgatttaattgcctctattccgactacagcgcagaccttacatcgtttattgggcatacgtttttttgaagaaacacccacttttcatccaaacaatccattgccattggatgtattggtggtcgatgaggcgtctatgattgacttgccattaatggcgaaattattacaggcactcaaaccgaataccaaattaattttgcttggagatgaaaatcaattgtctcctgtggaagcaggggaaatgttgggggcgttgtctgaattttctcaacacgcctatagtcctgcgttaacccagtatttaaaagcagtggcggatattgagttaatttcgtcagatcaaggttccccgttgcgtgatcatttatgccgtttgcatcatagtcatcgtttttcgggggattctggaattgggcaattagcgcaggcgattaatcaaggcaatgttgaggtaagttggaacgcatttacccattttaatgatatcgaaatggtggattttgatcaggttgccttattaaaaggagataacccgagtttatatagccaagcgtgtgcagcattagtggtaaaaagtgcggttgaaaaatacacagattatttagtgaaactgaaagcattacaacaacagtcacctatactgaatgaacaacaagtgggagaaatttttgtcttgtttaatgcggttcgtttcttaacagcattacgcgttggagagctaggggtagaacagctaaatcagaaaatcgcgcaacgcttacaacaaaaaggcttacttgattttaaacacgaacgcgattggtatttaggtaaaccaattatgatccagcaaaatgatcgccatattggcttatataatggcgacattggcttatttttaggacaaggtaaagtctggtttgagcagggacaagggcattataaaactgtgctcgctagccgtgtgccaaactatgagaccgcgtttgtgatgacggtacataaatcacaagggtctgagtttgcgcacacgtgtttggtattaccgaccgaacctaacccgattttatcacgtgaattgatttatacaggcgtgacacgtgcgaaacagcaattaaccgttttttcaagtgccgaaatttggaaaagtgcggtgaaaaatccagtaaaaagacaaagtggcttgaaccaattgttagttgaattatttaacaaatctgattag

SEQ ID NO: 30829 - DNA, 429 bp, Pasteurella multocida
atgaaaacttttgtagcaaagccagaaacggttaaacgcgactggtatgtagtagatgcgacaggtaaaactttaggtcgtttagcgactgaattagcacgtcgccttcgtggtaaacataaagcggaatacacgccacacgttgatacgggtgattacatcatcgtcattaacgcagagaaagttgctgtaaccggtaacaaagaaagcgataaactttaccactggcacactggctatgtaggtggcatcaaacaagcgactttcaaagaaatgatcgcacgccgtcctgaagcagtgattgaaattgcggtaaaaggtatgttgccaaaaggtccattaggtcgcgcaatgtatcgtaaattgaaagtgtatgcaggttctgaacataaccacgctgcacagcaaccacaagttttagatatttaa

SEQ ID NO: 30830 - DNA, 393 bp, Pasteurella multocida
atggcagagaatcaaaactacggcacaggtcgccgcaaaagctcttcagctcgtgtatttattaaaccgggcagtggtaaaatcactatcaaccaacgtgatttagacgtgtatttcggtcgtgaaacagcacgtatgatcgttcgtcaaccgttagagttggttgaaatgactgaaaaattagacctatacgttactgttaaaggtggcggtatttctggtcaagcgggtgcaatccgtcacggtatcactcgtgcattaatcgaatatgatgagagtttacgctctgtattacgcgcagctggtttcgttactcgcgatgcacgtcaagttgaacgtaaaaaagtgggtttacgcaaagcgcgtcgtcgtccacaattctcaaaacgttaa

SEQ ID NO: 30831 - DNA, 639 bp, Pasteurella multocida
atgacaagcgctgcaaataaacgttcaataatgacacttttttcagataaaacagatatttattgccaccaagtaaggattgttttggctgaaaagggtgttgcttatgaaacggaagttgtagatcctcaagtcgtatcagaagatttaatggaattaaatccgtatggcacgttgccgacattagttgatcgtgatttagtgttatttaattcacgtattattatggaatatcttgatgagcgtttccctcatccacctttgatgcctgtttatccagtggcacgtgggaaaagccgtttattaatgttacgtattgagcaagattggtacccagtattagcaaaagctgaaaaaggcactgacgcagaacgtgctgtcgcattaaaacaattaagagaagagattttagcgattgcgcctattttcacgcagatgccttattttatgagcgaagagtttagtttagtagattgttatatcgccccattattatggcgtatgcaagaactgggtgtggatttcagtggggcgggtagcaaagcaattaaagcttacatggcacgtgtttttgaacgcgattcatttatgcaatctttaggcgtgtcggctccgaaaaacttaatggatgagaaataa

SEQ ID NO: 30832 - DNA, 1680 bp, Pasteurella multocida
atgagtcatccagttgaaaatgttgtcgcagctgaaaatacagaaaaacgtcccaccaattttattcgtcaaatcattgatgaagatttagcatccggcaaacataccggtgtccaaacacgttttccacctgaacccaatggctatttgcatattggtcatgccaaatcaatttgcttaaattttggtatcgctgaagattatcaagggttgtgtaatttacgtttcgatgatacgaatcccgtcaaagaagatgtggaatatgtggattcgattaaacaagatgtagaatggttaggtttcaagtgggaaggagagcctcgttatgcctccgactattttgatcaactctatggctatgcgattgagttaatcgaaaaagggttagcttatgtggatgaactttcgccagaagaaatgcgtgaataccgtggtacgttaacggaaccgggtaaaaatagcccttatcgtgatcgttctattgaagaaaacctcgcgttatttgagaaaatgaagaacggagaaattgcagaaggcaaagcctgtttacgtgcgaaaattgatatggcgtctccgtttattgtcatgcgcgatccagtaatttatcggattaaatttgcgacccatcaccaaacaggtgataaatggtgcatttacccaatgtatgattttactcattgtatctctgatgccattgagcgcattactcattcgctttgtacattggaattccaagataatcgtcgtttgtatgactgggtattagaaaatatttcgattgcgcgtccattgccgcaccagtatgagttttcacgtttaaatttagaatcgaccctcacttctaaacgtaaattattacaactggtgaatgaaggtattgtcgatggctggaatgacccacgtatgccaacgatttcgggcttacgtcgtcgtggttatacgccagcttcattgcgtgagttttgtcgtcgtattggcgtcactaaacaagataatatggtggaattcagtgcactagaagcttgcattcgtgaagacttaaatgagaatgcgccacgagcaatggcggtgattaatccacttaaaattgtgattgagaatttcagtggcaaagaaatgctgactgcaccaaaccaccctaatcgtgatgaactaggtgtacgcgaattaccctttacgcgtgaactatatattgatcaagcggatttccgtgaagaagcaaataaacaatataaacgcttagtgcttggtaaagaagtgcgtttacgtaatgcttatgtgattaaagccgaacgtgttgaaaaagatgcagaggagaatatcacaaccgtttattgtacttatgaccctgacacgctagggaaaaatccagcagatggacgtaaagtgaaaggcgtgattcaatgggtgtctgcggaagattatttaccagctgaatttcgtcaatatgggcgtttatttacggtggcaaacccaggagccgcagaggatattcaccaagtactgaacccagattcattggtgattaaacaaggtgtggtggagaagagtttagccaatgcacagccagaaaaagcttaccaatttgagcgtgaaggttattattgtgcagacagcaaagatagccgcccagatcatttggtcttcaatttaaccgtgagtttaaaagaaggcttctaa

SEQ ID NO: 30833 - DNA, 1845 bp, Pasteurella multocida
atgcaaaattatcctctgttatcattaattaattcacctgaagatttacgtttattaagtaaagaacaacttccccaaatctgtcaggaattacgtgcatatttattagagtctgttagtcaaagtagtggacatttggcatcaggcttgggcacagtagaattaaccgttgccttacactatgtctataaaaccccctttgatcaactgatttgggatgttggtcatcaagcctatccacataaaatcttaaccggtcgtcgtgatcaaatgtccaccattcgtcagaaaaatggtattcatccttttccatggcgtgaagaaagcgaatttgatgtgttaagtgttgggcattcttctacctcaattagtgcaggcttaggcattgccgttgccgcacaacgtgaaaatgcgggacgtaaaacagtttgtgtgattggtgatggcgccattactgcaggaatggcgtttgaagcaatgaatcatgctggtgccttgcataccgatatgctggtgattttgaatgataacgaaatgtccatttcagaaaatgtcggggcgctcaacaatcatctcgcccgcttattaacgggatcattttattcttccatccgtgaagggggtaaaaaaatcctctctggtatgccaccgattaaagaatttgtcaaaaagactgaagaacatgtgaaaggctttgtttctcctgtgggtaccatgttcgagcaactagggttcaactatattggtccgattgatggtcataacattgaagaacttatcagcacattgaaaaatatgcgcgccttaaaaggtccccaatttttacatatcatgaccaaaaaagggaaaggctacgctccggcagaaaaagacccaattggctttcatggtgtacctaaatttgatcatttaagtggtcaattacctaaatcaaatacaacgccaacctattcaaaaatttttggtgattggctgtgtgaaatggcagaaaacgatcctaaactgatcggcattacgccggctatgcgtgaaggctcagggatggtcgagttttctaaccgttttccacaacaatattttgatgttgccattgctgaacaacatgccgtcacgtttgccgctggcttggcgattgggggttataaacccgtagtagcaatttattccacctttttacagcgtgcctacgatcaagtcattcatgacgtggctattcaaaatctgccggttttatttgctattgatcgggctggtgtggtcggtgcagatggtcagactcatcaaggcgcttttgatattagctttctgcgctgtatcccaaatatggtgatcatgacacctagcgacgaaaatgagtgtcgtcaaatgctttatactggttacaaactcaatcaacctgctgccgtacgttatccacgtggtaatgccattggtgttgaactcaccccattaacgatgttagcactcggtaaatccaacctgattcgtgagggcgaaaaaattgcgattttaaattttggcactttattacctaccgccatcaacgtggcagaaaaattaaatgcgacagtaatcgatatgcgttttgttaaacctattgatgttgagcgtatccatcaaattgcacaaacacacgacctgattgtgactttagaagaaaacgtcattcaaggtggggctggcagtgccgttgccgaagtcttacattctcaacaacatcaaacaaaattattacaacttggtttacctgatttctttatcccacaagggacacaacaagaaattttagcggacttacatttagacgaagccggtatcgaaacacaaataaaaaattttttataa

SEQ ID NO: 30834 - DNA, 888 bp, Pasteurella multocida
atgtaccaactttcacaagacttaccccaactccaacaacgtattaatacttttttagcgcaacaattgaatgtggacagcagcccctctcctcttgccgaagccatgcgttacggtgtgctccttggtggtaaacgtatccgtcctttcctagtgtatgcaacaggacgaatgctcggcgcagacttaaaccaactcgattatgccgcggcgagtgtagaagccgttcatgcctattcattaattcacgacgatctccctgcgatggatgatgatcatttacgtcgtggacaaccaacttgccatattgcttttgatcacgccaccgcgattttagccggtgacgcgttgcaagcctttgcttttgaaatattaactcaagcacctgcattgcaagcagagcaaaaacttgcgttggtacaaacgctaagtcaagcagctggtgtaaaaggaatgtgtttggggcaaagtctcgatctgatttctgagcaaaaacacattagcttaatcgaattagaacaaattcaccgcaataaaacgggggcaatgctttccgcagcgattcagcttgggcgaatttgttctccgcattttaaaaatgatacgctagcacagcaattacaacggtattcggaagccattggcttagcctttcaagtacaagacgatattttagatattgaaggcgagagtgacattattggtaaaaccgtgggttctgatttattagcagataaaagcacctaccccaaattattaggcttagcgggtgccaaacaaaaagcgcaagaactgtatcaaaacgcaatcgcggaattagaaagtattccttttgatacaagtgcacttcgtgctatcgctgaatttgtggtaaatagaaaaagttaa

SEQ ID NO: 30835 - DNA, 621 bp, Pasteurella multocida
atgttaagtttgttcagaattatcattcatgtgtgttgtttaggtccagttgcttggctagcttgggttttgctcagtggtgatgaaagccagctcggtgcagacccaattaaagaaattcaacattttttaggctttagtgcgctcactattttgttgatcatgttcatcttgggcaaggtgttctatttattaaaacagccacaacttcaagtgctacgtcgtgcattaggcttatgggcatggttttatgttgtcttacatgtttatgcttatttggcgttagagttaggctatgacttttccttatttgtgcaagagttagtaaacagaggttatctgattattggggctattgcctttttgattttgaccttgatggcgctcagttcatggtcttatttaaaactgaaaatgggcaaatggtggttttacctgcatcaattaggctattatgcgttgcttttgggggcaatccattacgtttggtcggtcaaaaatgtgacattttcttctatgttatatttgattttgtctatcatgatactgtgtgacgccttatacggtttgttcataaaaagaaaaggacgaagcacaagcgctcatactggaaaagattga

SEQ ID NO: 30836 - DNA, 1989 bp, Pasteurella multocida
atgaatacgataaaaagtgggaaaccctctccgttggggtgttcaaaacaaacggaagaagggcaagacggctataacttcgcgcttttttctcaagctgcgcgacgagttgagttgtgtttgttcagcgaagggcaagagcgacgggttgatttacaaccaagtgatgatgggatttggcatatttggttgagcgatgtgtctgttgggacagaatatgcttatcgaatttcgggtaaaactgaccgcactttagcaaactcgaataagttgatgcttgatccctatgcgaaagcggttgtgggcaaaccggatctgagtacaccggaaaaacgtgcttggtttgatcttaatgaccctcgagataacgcacatcttgcgccgaaggcagttattatagatgaggcttttgattggcaaggagataagccactacgaaccccttgggcacaaacagtgatttatgaaatgcatgtcaaaggctttagccaactacgtgaagatttacctgaagccttgcgagggacttatgcgggtttagcacatcctaatatgattgcgtatttgcaagacttaggcgtgacagcagtcgagctattaccagttcaatatcaagcggatgaagtgcatttacaagaaaaaggtttagccaattattgggggtataacccattagcgatgtttgcgctagaacctcgttatagctcacagcacagcagtatgggagcattgcatgagtttaaaacgatggttaaagcattacatcaagcgggtatcgaagtaattttggatgtcgtgtttaaccatacggctgagtcagaaaagtatttcccgacgttcagtcagcgtggcattgatgatgaaacttactattggcaagacgcacaaggatattatcacaattggacgggctgcggtaatacacttaatttgtcacagccgatcacgcgtcgttgggtgctagattgtttatgctattgggttgaggcttgccatgtagacggttttcgttttgatttaggttcagtacttgggcgtgagggagaagggggctttaacccacaagcacaattatttgccgatattcaagcagaacctcgcttacaaggctgcaaattgattgctgaaccttgggatattggtgattttggctatcaaatgggtaacttccccgcttattttgctgaatggaatgatcgttttcgtgatgatgtgacgcgtttttggttgtggaagagtggtgaaagtggtgcatttgcacaacgtttagcggggtcaagtgatttattccaacaaacccgccaagtacacaattcgattaatttcattaccgcacatgacggttttactttacgtgatttagtcagttataacgagaaacacaattgggcaaatggtgaaaataaccgagatgggcgtaatcacaattacagttataaccacggtgttgaagggatcgacaatgtgccaagtgcggtagaaaatgggcgtattttaagtagcattgccttattgatgaatttactcttggcaaatggcacgccgatgctccttgcgggggacgaatttggcaattctcagtttggtaataataatgcctattgccaagataatgaaattgcttggcttaaatggcaagattttaatcctgtattatttaatgcgactaagcaaacgattgcattgcgaaaacaaatagcgagtttacaacaagactgttggtggtctgaggtaaatgtgcaatggctcaatacaaaaggggagccaatgacaatcgcggattggcataatcaagaaagcaaagccttacaagtgcttttagataacaaatggctttttttgattaatgcgaaacaaaaattacaaactttttcgttaccagaaggtgattgggaagttatgtattgtgcaacaaacttaaccactcaaggcggttttatcgagttggatgatgtcacttttggtgtgttgcaacagttaaataagtag

SEQ ID NO: 30837 - DNA, 1005 bp, Pasteurella multocida
atggcaacaattaaagatgtcgcaaaaatggctggggtgtccaccaccacagtttcgcatgtaattaataaaacccgctttgttgcagctgaaacagaaaaactggtattgcaagcaattcaagaactcaactattcccctagtgcggtcgcacgtagcttaaaagtcaatacgacaaaatcgattggcatgattgtcaccagtagtgaagccccttattttgcagaaatcattcacgcggtggaagaacattgctatcgccaaggttactcactgtttttatgtaatacacaaaataacgtggaaaaaattaaaaaccaccttgaaatgctgattaaaaaacgcgtcgatggcatcttagtcatgtgtgcagaatatactcaagattcactcgatttattagcgaatttcacctctttgccactggtcgtgatggactggggaccagacaataaacatactgatatcattcaagatcatagttttgagggcggttatcttgccacaaaatatttaattgatcacgggcataaagatatcggtattattgcaggtgagcttacgaaaacgacagccaaaacacgctatgaaggtttcattaaagcgatgaatgaagcagggctaaagattaaccctgattgggtgatggagggattctttgagcctgaggatggttatgagtgcatgaataaaatcttggcacaagacactctcccgacggctgtcttttgctgtaatgatgttatggcgttaggggcaatttccgcaatcggtgaaaaaggtttacgtgtgccagaagatatttcaattattggttatgataatattcacgcttcacgcttttactccccgcctttaaccaccatacaccaatcaaaatcccgtttaggtgctcgtgcggtgactttattattcgaacgcattaatgaaaaatctgaagagcgtgccgtcatcgaaatgcatcctgaacttgtcatccgtaaatcagtcaaatctcgcctttaa

SEQ ID NO: 30838 - DNA, 888 bp, Pasteurella multocida
atgaatattttaattaccggtgcaacaggattaattggctcccacctaacttcgcaactcatcaaacacgcacatggggtcaccgcattggttcgagatcctaaagccgccaaacagaagttacccgcttctgtcacactcatttcttctcttgcacaatatacaacgctagataccttcgatgcggttattaatctcgctggcgaacctatttttgaaaaacgttggacagcccaacaaaaacaacgtttagtagaaagccgcgtcaatttaacggcacagttagtacaacgaatcaatgccagtcgcaccccacctcatacttttatttcaggctcagccactggttattatggacataacgcagaagaaatcatcacggaaaacgcgccagcaacagatacgtttccaagccaactgtgccaacgttgggaatcagaagcgttatgcgccaaaacacgagtttgtttattgcgtacggggattgtcctgagtaaaacaggcggggctttagcgaaaatgctccccctctatcgtttagggcttgggggaaagttaggttccggtaagcaatattgggcatggatcgcactcgacgacatggtgaagggcattttatttttattagaaaatcaccaatgtcagggcgcctttaatttggtttctcctaatccagttcgtcatgttgaattcaacaacactttagcgaacatccttaagcgacctgcatttgccactgtgcctgaattgcttctccgctttttcctcggcgaacgcacacagttacttttagatagccaaaaaattgtgcccgaaaaacttctcgctcaaggatttgtctttgattaccctgaattaaaatccgcacttcaagcaatactcaaataa

SEQ ID NO: 30839 - DNA, 1692 bp, Pasteurella multocida
atgattgctagcggtgcagatacccaatctgatgctttagttcgccaatcagcaaaagtacaatttggtgactatcaagctaatggcattatggcggcagcgaaaaagcttggacgtaatccgcgtgaattcgcacaacaagttatcgaacaacttgatttaagcgaaatagctgaaaaaatcgaaatcgcgggtcctggttttattaatcttttcttagataaaaattggttagctgaacaaatcagccttgccgtcaacgatgacaaactcggtatccaagccacagaaacacaaaccgttgttgccgattattcctcaccaaatgttgccaaagaaatgcatgtgggtcacttacgctccactatcattggtgatgctgtcgtacgaacactcgaatttttaggtaataaagtgattcgtgctaaccatgtgggtgactggggaacccaattcggtatgttgattgcttacctagaaaaagttgaaaatgaaagtgccagtgaaatggaactgagcgatttagaagctttctatcgtgcggcgaaagaacattatgactcggaccccgtttttgcggaaaaagcgcgtaactatgtggtgaaattacaaagtggtgatgaatattgtcgcactatgtggaaaaaattagttgatatcaccatgcaacagaatcaacacaattatgaccgcttaaatgtcacattgaccgaaaaggatgtcatgggagaaagtttatacaatcccatgttgtccgatatcgtcgcggatctgaaacaacaaggtcttgccgttgaagacgaaggggcattcgtggtttaccttgatgagtttaaaaataaagaaggggaaccaatgggggtgattgtccagaaaaaagatggcggatttctgtacaccaccacagatattgcggcagccaaataccgctatgaaacgttaaaagcggatcgcgcactggtattttcagatacacgtcaaagccaacatatgcaacaggcttggttaatcacacgtaaagcaggttatgtgccagacagcttccaattagaacataaaaactttgggatgatgttaggcaaagacggaaagcctttcaaaacacgtactgggggaacggtaaaactggcagatttactcgacgaagcagttgaacgtgccacccaattaattcaggaaaaaagcaccgcactttccgcacaagaaaaagcggcggtcattgaagcggttgcgattggttctgtcaaatatgctgacctctctaaaaatcgaaccacagattatgtgtttgattgggataatatgctcagctttgaagggaataccgcaccgtatatgcaatatgcctatacacgtattcgctctatcttcaatcgtagtgaactaaatgaacaggatcttagcgaaagtcctgttgtgctcagcaatgaaaaagagcgcttgttggcgattaaattgttgcaatttgaagaagcaatccaaattgttgccaaagaaggcacacctcatgtgttgtgtacctatttatatgaattagcaggtgtcttttcttcattctatgaacactgcccaattctgaataatgaagatgaacaaattaaacgcagtcgcttaaaactggcattattaacagaaaaaaccttaaaacaaggactcgatttgttgggtattaagactgttgataagatgtaa

SEQ ID NO: 30840 - DNA, 1083 bp, Pasteurella multocida
atgaaacccacaattatcagtaaattagaaagtttgaaagagcgccacgaggagctagaggcactattgggtgaggcttctgttatcagtgatcaagataaatttcgagcttactcaaaagaatatgcacaattagaagatgtggtgaaatgttttgctcgttggaatcaattaaacagtaatatggaagaagcgcaacttttactcgatgatcctagcatgaaagaaatggcgcaagaagaaattgaagcatgtaaaacagaaatcgaacaagttgaacaacaattacaaattttattgctgccaaaagatccaaatgatgaatataactgctatctagaaattcgtgcaggaacaggtggagatgaagccgggatttttgctggcgatttattccgtatgtatagccgttatgcagaaagtaaacgttggaaagtagaagtattaagtgccaatgaaagtgagcagggtggttataaagaaattattgtgaaggtcaatggtgaaggcgtttatgggcaattaaaatttgagtcaggtggtcaccgtgttcagcgtgttcctaagaccgaatcacaaggccgtattcatacctctgcttgtaccgttgccgtgatgccagagttacctgagtctgagttaccagaaatcaatccatctgatttacgtattgatacttaccgttcttcaggggcgggtggtcagcacgtgaataccacagattcggcggtgcgtattactcatattccaacgggaattgtggtcgagtgtcaagatgagcgttcgcagcataaaaacaaagcgaaagccatgtctgtattagcttcacgtattgttcaggcggaaaaagaacgtcaagagcaagcccaagcggatacccgtcgtaatttattgggttctggtgaccgatcagacaaaatccgcacctacaactatccacaaggtcgtgtgacagatcaccgtattaacttaacggtttaccgtttagatgaagtgatgaatggtaaaattgatgaattaattcaaccgattattaccgaatatcaagcagatcaacttgcggccttgtcagagcaagcctaa

SEQ ID NO: 30841 - DNA, 897 bp, Pasteurella multocida
atgacgtatcaagaatggcgacaattcgctgaacatgtattgatgaaaaataaggagaacgatccttttttagatgtaaaaagtgagagtgttcttttattacaaaccgtcactaaacgttcaaaagcgagtattctcgctttttcagaaacagtgctaacggaagtagaattacagcagttagcacaacttttaatgcgtcgtgctaaaggtgagccgattgcctacattctcggggaaaaagcattttggtcattgtcattgaaagtgtcagaacacacattgattcctcgtccagataccgaagttttagtggagcatgcgttagacttcgcaaaacaacgagtgacttcagcgcacgtttccggcgaactttcaatactcgatttaggcacaggaacgggggcaattgcattagccttagcggcagaattgacgccgttaacgcaaaagtgcggtatcaatttaaatattttgggtgttgatcgtattgcagaagcggtcgccttagcaaaagacaatgccaagcaaaatgagttaaaggttaactttttacaaagtgtgtggtttgatgcacttaatccagagattcgctttgatttgattgtcagtaaccccccttacattgataaaaacgacccgcatttgacacaaggtgatgtccgttttgagcctttatctgccttagtcgcagcggaagaggggtatgcggatatccgccatattattgaacaagcccctttgtttttaaagccacaaggagcgttattactcgaacatggctggcaacaagctgaaaaagtgcggtcaatttttcaaaaaaatttatggcataacgttgcgacgctaaaagattatagtgggaatgaaagggtaaccttaggttgttggaggtga

SEQ ID NO: 30842 - DNA, 855 bp, Pasteurella multocida
atgcaaaataaagtgattcgcttaggcgaaattgagatttctaatgataaaccctttgttttgtttgggggaatgaacgtattagaaagtcgcgatatggcgatgcaagtgtgcgaagcttatgttaaggtcacggaaaaattaggggtgccttatgtgtttaaggcttcttttgacaaagcaaaccgctcatctatccattcttatcgtggaccgggtatggaacaaggtctgaaaatcttccaagagttgaaagacacatttggggttaaattgattacagatgtacatgaaatttatcaatgtcaaccagtcgctgaagttgttgatatcattcaattacctgcttttttagcacgtcaaaccgatttagtggcagcgatggcaaaaacgggcgcgattattaatgtgaaaaaaccacaatttttaagtcccggtcaaatggggaatatcgttgagaaaattgaagaatgtggtaatgataacgttattttatgcgatcgaggcaccaattttggttatgacaatttagttgtagatatgttgggtttttctgtaatgaaaaaagtatcaaaaggttgccctgtgatttttgatgtgacccacgcattacaatgtcgtgatccatttggtgcggcctcagggggacgtcgtgggcaagtcacggaattagcgcgcgcgggaatggcagtgggattagccgggttatttttagaagcacatccgaatccgagtcaagcgaaatgtgatgggccttcagctttaccgctatctgcattagaaggttttgtacatcaaatgaaagcgattgatgatctggtgaaacatttcccagaattagatactgccaattaa

SEQ ID NO: 30843 - DNA, 1191 bp, Pasteurella multocida
atgaaattttctgttcctttattcattgcattgcgttactggcgagcaaaaagtgcggaccgttttggacgtctggttaccaatctggccagtattggtattgtgttgggcgtgatggcattgatcattgtgttgtctgtgatgaatggcttagaacaacatcaaaagaagcatgtcttagcaaacattccacacgctattgttatgccagtaacacaacgcattacattaacagatgaaatgattgcattaccgccttttgtgcaaaaagcggtgccgatcaatcaaacacaagtgattttacaaacggcaacaggcgtgagtgcaggtcaagtcattggtgtacaacaatcggctgatgatcctttattaatggatatgttgagccctgattttgaacaaattctaccaccaggtgcctttaatttagtgattggggcgcaactcgcacaaaaattacagctacatattggcgataaagtgcgcttgatgatgacagaaaacagtcaatatacccctttcggtcgcgttcccgtacaacgtctgtttacggtcagtgatatttattattcaggagatgaagcatcgagttatgaagtttttgctcatttatctgatattggacgtttaatgcgcattcaacctgagctggcacaaggctatcgtttatttctgcaagaccctttccaaattactgaacttccacaatattttgctgagcaatcttggcaattatacgactggcgtcaacaaaaaggcgaatttttccaagcggtgcgtatggaaaaaaacatgatgggactcttaattagcttaattattgttgtggcagtttctaatattgtgacatcacttagccttatggtcgtggataaacaaggcgagatcgcgattttacaaacacaaggacttaataaacgccaagtgcggtcgatttttatttatcaaggttgtttggtcggctttgttggtaccgtgattggtgccatattaggtgttctcgtgacgctaaacttagataggctagtcggttggttcaattctgcggatatttatttaccgacggcatttgatccgctccagttcatgattattttatttttttcgttattattatctttaatttccacaatttatcctgcttatcgtgcagcgcaaattgatccagcagaagcactacgttatgaataa

SEQ ID NO: 30844 - DNA, 1023 bp, Pasteurella multocida
atgataaaagatcttgattggaaaaatttaggctttggctatattaaaacagattatcgctatatcgcttattggaaagacggaaagtggtcaaaaggcgagctgacacaagataatgtactgcatattagtgaaggttcaactgcacttcattatgggcaacaatgctttgaaggactcaaagcttatcgctgtaaagacggttcgattaacttgttccgccctgatcaaaatgcagaacgtatgcaacgcagttgtcgccgtttattgatgcctgaagtgccaacagacatgtttattgatgcctgtaaacaagtggtcaaagcaaatcaagcatggttagcgccttatggcactggtgccaccctctatttacgccctttcttgattggtgtaggtgacaatgtcggcgtcaatcctgcgccagaatatattttctcgattttctgctgccctgttggcgcttattttaaaggtggcttaaaaccgaccaatttcttagtttcaaattatgatcgcgccgcaccgcaaggaaccggggcagcaaaagtgggtggaaattacgcagcaagtctttatcctggtaaagaagccaaacaaaacggctttggtgactgtatttatttagacccgaccacacacaccaaaattgaagaagtggggtcagcgaatttcttcggtatcacaaaagataacaaatttattactccgctttcgccgtcaattctgccaagtatcacgaaatactcgttactctatctcgctaaagcgcggttagggttagaaacagaagaaggggatgtgtatatcgatcaattagatcaatttaaagaagcgggcgcttgtggtactgctgccgtcatcacaccgattggtggtattcaatatggtgataacttccatgtgttctactctgaaacggaagtcggtgaaatcaccaccaaactctacaatgaattagtgggtatccaatttggtgatgttgaagcccctgaaggttggattgttaaagtagataactaa

SEQ ID NO: 30845 - DNA, 1209 bp, Pasteurella multocida
atgtcagaaaccttacttaatccctatttcggcgaatttggaggaatgtatgttcccgaaattctgatgccggtgttgaaaaatctcgaaaaagcctttgttgaggcacaacaagatcccacatttaaagaaaccttcctcgatttattgaagaactatgcaggtcgcccaactgcgctgactcgctgtcgcaatctcactcaaggcagtaaaaccaaactgtacctgaagcgtgaagatttattgcacggcggtgcgcataaaaccaatcaagtattagggcaaatcttattagcgaaacggatgggaaaaacccgtattattgcggaaacaggggcgggacaacatggcgtagcaacagctctcgcttgtgccatgctcggtatgccatgccaaatctacatgggcgcaaaagatgttgaacgtcaatcgccgaatgtatttcgtatgcgtttaatgggggcgaatgtgactgcggtaacgaaaggctcagcctcattaaaagacgcctgctgtgaagccatgcgtgattgggcagaaaactatgaacacactcattatttactcggcacggcagcaggtcctcatccctttcctactatcgtgcgtgagttccaaaaaatcattggtgaagaaactaagcaacaaattttagcacgcgaagggcgtttacctgatgcagtcatcgccgcggttggtgggggttcaaatgccattggtatgttcaatgactttatcgaggaaaccagcgtacgtttaattggtgttgaaccagcgggcaaaggaattgccactggacaacatggcgctccactaggtcatggcacaacaggaatctattttggtatgaaagcgcccttgatgcaaacaccagatggacaaattgaagaatcgtattcgatttcagcaggacttgattttccttctgttggtccacagcacgcacatttacaagcgattgggcgtgcccaatatgaatccattaccgatgatgaagccttatccgccttccaagccttagcacgccatgaaggcattattcccgcattagaaagtgcccatgccctcgcttatgccttaaaactgattcagcgccagcctgaaaaagaacaactcttggtggtcaatttatctggacgaggtgataaagatattttcaccgtagatcgcattttatcgcaaaaaggagtttcatatgcgccgttttga

SEQ ID NO: 30846 - DNA, 1410 bp, Pasteurella multocida
atgacacaagcgtttccctctattctgcaaaaaatcattcaagataaaaccacttggattgcagaaaaacaagcacaattgcctttagcaagctttcaagatcagctagaacgtagtgatcgtgacttttatcaagcgatgcaacaaggctcaaaacaacgcccttcatatatcttagaatgtaaaaaagcctctccctcaaaaggcttaattcgtgcagcattcgatttaaccgagattgccgaggtttatcaacactatgctacggtcatttccgtcttaaccgatgaaaaatattttcaagggcattttgctgatattgctcaagtacgccaacgcgtgacacaaccgattttatgtaaagattttatcttatctgaataccaagtatatttggcacgatacgcacaagccgatgctattttattgatgctttccgttctcaatgatgaacgctatacacaattagccacattagcacaccaattagggatgggcgttttaactgaaaccagtaatgaggcagaatttgcgcgcgcattagcgttaaaagcgaaagtgattggtgtcaataatcggaatttacatgatctcagtgtagacatacaacgtgttgcccagatcactcaacactatgccgatcagattcctcctgaaaccaaaattatcagtgaatctggtatctatcaacaccaacaaattcgagacttacgccatgttgccgacggttttttaattggcagtagtttaatgcaacacacagatttaaatcatgcggtacgctcacttctttttggggaacataaagtttgtgggctcacccgtccacaagatgtaagagcggtttaccagcaaggtgcactttacggtggactgatttttgtgacacactcaaaacgttgcattagcttacgtcaagcccaagaattagtcacacaagccccattgcgctttgttggggtatttcaagatcaatccatagcgtttatctgtcaccttgcaactcaattaagactccacgccgtccaattacatggcaacgaaagccacgaatttattcgccaattacgcgatgaattgccagtgaattgtgaaatttggcgcgccatttgcattgagagtagtggcaccagtccgtgtcaaatcgtggaaaataaaaatattgatcgttatatttttgacagtaaaacgcatcaacaacgtggcggaacggggaaaacatttgattggcaattgatccctcatcacttaaaaccaaaaagtatgttagctggtggtattacaccagaaaatatccctctggcgctcgctcaaggctgtttaggactggatttaaattcagggcttgaaacttatcctggtgtaaaatcacaccaaaaagtcgttgcagcttttgctcaactccgctaa

SEQ ID NO: 30847 - DNA, 1002 bp, Pasteurella multocida
atgcaaaccgagcagttacttcaccaactctttgaaaaaaaagcgttaaaccaacaacaaaccgaatttcttttcaccgctatcgtacgtggacaattggataactcacaactcagtgccgcattaattgcccttaaactgcgcggtgaaacccctgaagaaatcagtggtgccgtcaccgcattacaagctgatgccgaatcctttcccattccagactacccttttgctgatattgtcggcacgggaggagatggcgccaataccattaatatttctacagcttcggcaattgtagcggccagttatggactaaaagtcgcaaaacatggtaatcgtagtgtttcgagccaaacgggcgccagtgatctgttaacggccttaggggtgaatgtccatatatcagctcacaaagccagacaagcgttggatgaaattggcttatgttttctttttgccccacaatatcatctggggtttcaacatgcgattcctgtccgccaagcacttaaaacacgcactatttttaatatcttaggtcccttgatcaatccagccaaacccaaacggcagttacttggtgtgtattcatctgacttaattcaaccttatgcagaaacggttgcccgtttgggacatgagcatagcgtagtggtacatggctcaggcttagatgaaattgcactacatggtgtgaccgaagtcgctgaaatcaaagcaggacaaatcgaacgttatacacttacaccgcaagattttggctttcagccacagccacttgaaacattacgtggcggaaagcctagcgaaaatgcccaaattctgaccgcacttttacaaggcaaaggtaaattggcacaccaacaagcagtggcaatgaatagtgccatgttgatgagcttatttggctatccaaacctcaaacaaaatgcacaagcgattatggatattatcgccacaggcaaaccatttgagaccttacaacaacttacccaatattaa

SEQ ID NO: 30848 - DNA, 1575 bp, Pasteurella multocida
gtgaaaaaacaatcttcagaaaaattaaatatagctagaataagtttggttcttttttttgcagtactttcatattgtattttatattatttagcatattcggatgagccaataatagaagtgctaaaaaataaaataggtgattcaaggggactttggacactgattactgccattataactgcaccaatcgcctttattatttgggtgtttagagatatcaatgctaaacaacaaattgaaaatcaacgtaaagacattaatctaaaagaatttcaaaaaattgccgagtgggtaagtggtttacatttgattgaagatgaggtgacagaaaaaatagtcaaccaaactgaacaagaaaaaacaagaaaatatacacaacagtctgagcatttatctatttccacttttagcaaaaaagacggcgcagtaggtttgcaaatcgcggcaatttataacttattgcctttttaccgcggggagcatggggaaagctttaaaaagcccgcattgaatttattgctttctgcttggttagccttgcaacagaaagaggttaaaaatttagagaatttcgatgttttgaccaacaggctagattttgataatactgttaagaaaatccaagagaatggacgaagtcctatcggcattgcgatcacgcatgtattgcttgctgatgggggagaacatttagtgcagtatcccgaggtttttcccaatttatgtctcgcaggaatggattttcatcttcctggtttagataaaaatgtactatctttatttataaatattaaaagtaaagattgttcaggtattaatttaatggcagctaatctaaataatgttcgtttagagggggctagtttagagaatgctagtttagggggggctagtttatataaggctagtttaaatggggctagtttatataaggctagtttaaatggggctagtttatataaggctagtttagagggggctcgtttaaattgggctagtttagagggggctcgtttagagagagctagtttagagggggctagtttaaattgggctagtttagagggggctcgtttaaattgggctagtttagagggggctagtttagagggggctcgtttaaattgggctagtttagagggggctagtttagagggggctcgtttaaattgggctagtttagagggggctcgtttagagagagctagtttagagggggctagtttaaatttggctagtttagagggggctagtttagagagagctagtttagagggggctagtttagagggggctagtttagagagggttagtttagagagggctagtttagagggagctagtttagagggagcaatttttacttataatacggattcgaacataaattgcgctgatttaaaatcaaaaggcggtgttattttatactttaccgcatcggaaaagaaacgtgatatttgtattcaattagtaaaagcagaggcaacatttgagcatgatgttccagataatatagatattgagaaaacccaacaagagaaccccgattggaaaatcttcattattaaataa

SEQ ID NO: 30849 - DNA, 1932 bp, Pasteurella multocida
atgccaattattactttgcctgacggttcacagcgtcagtttgaacaacctatttctgtgatggatgttgctgccagtattggtgcgggtctagcgaaggcttgtattgcaggtcgtgttaatggcgagcggaaagatgcttgcgatctgattactgaagacagcaaactagagattattaccgcaaaagaggaagatggtttagaaattattcgtcactcttgtgcgcacttattaggtcatgccattaaacagctattcccaaatgtaaaaatggcgattggtccaactatcgacaagggtttttattatgacgtggatcttgatcgctctttaacccaagaggatttagatgcacttgaaaaacgtatgcttgaactggcaaaaaccaactatgatgtggtgaaaaaagtggtcagctggcaagaggcccgtgatacctttgaagcccgcggcgagccatataaaatggcaattttagatgaaaacatcgatcgttgcgatacgccagcactttatcatcacgaagaatacgttgatatgtgtcgtggtccacacgtacctaatatgcgtttttgccatcactttaaattaatgaaagttgctggtgcatactggcgtggtgacagcaaaaataaaatgttacaacgtatctacggtaccgcgtgggcagataaaaaacaattaagcgaatacttaactcgtttagaagaagcggcaaaacgtgaccaccgtaaaattggtaaagcgttagatttatatcatatgcaagaagaagcaccgggtatggtgttctggcacaatgacggttggacaattttccgtgaacttgaaaccttcgtgcgtactaaattaaaagaatacgattaccaagaagtaaaaggtccatttatgatggatcgcgtattatgggaaaaaacagggcactggcaaaactacggtgatttgatgttcaccactcaatcagaaaaccgtgaatatgcgattaaaccgatgaactgtccgggacacgtgcaaatctttaatcaaggtttaaaatcctatcgcgatctaccaattcgtatggcggaatttggttcatgccaccgtaacgaaccgtcaggttcattgcatggcttaatgcgtgtacgtggcttcacccaagatgatgcgcatattttctgtacggaagatcaaattgaaagtgaagtaacggcgtgtatcaaaatggtttacgacatttacagcacattcggttttgaaaacattcaagtgaaactgtcaacccgtccggaaaaacgtattggtgccgatgagatgtgggacagagccgaagccggtcttgctgctgcactgtcgcacaatggtcttgaatatgaaattcaagaaggtgagggggcgttctatggtccgaaaattgaattcgcattacgcgactgcttagatcgtgaatggcagtgcggaactattcagttagacttcgccttaccgggtcgcctcaatgcgtcttatgtggcagaagataatgatcgccgtacacctgtgatgattcaccgtgcaattttaggttctatcgagcgtttcatcggaattatcaccgaagaatacgccggtttcttccctgcatggttagcgccaacacaagcgatcgtgatgaacatcacggattcacaatctgactatgtgcaaaaagtggtgaaaacgttatctgacgcaggtttacgtgtgaaatctgatttacgtaatgaaaaaatcggtttcaaaattcgtgaacacaccttacgtcgcgtaccatacatgttagtttgtggcgataaagaaatcgaagccggtaaagtagcggtgcgtacccgtaaaggtgccgacctcggtacattcaccattgaagaatttttagatatcttgaaaaaacaagtacgttctcgcgaactgaaattacttggtgaagagtag

SEQ ID NO: 30850 - DNA, 1134 bp, Pasteurella multocida
atggcatttttctcacctaaaacgaatttccatttgatggcaaaaccaagtagttttcattgtaatattcaatgtgaatattgtttttacctagaaaaagagcacacttttggttcaaaagcccccttcatgtcagaacaaacgttacgtaattatgtgaagaattacattgaatcacatgcagggcaacgcgtggaatttgcttggcaagggggagaaccgaccttattaggtttagatttcttcaaaagagcggtcagttttcaacaagaatttgcgaatggtaaaaccattactaatgcctttcaaactaacggtattgcccttaatcgccaatgggcagcctttttcaaacaacatcagtttttaattgggttatctgttgatggactcagtgccgtacataatcgttaccgtattacgagtaacggacaaccgacctttgatcgtgtagtgaaagccttagccttattaaaagaatatcaagtcgattttaataccttgacggtcgttaatgatcaaaattggcataaaggaaaagaaacttatctggctttaaaagcgttaggctctaccttcatgcagtttattcctattgtggaacagcatgctgaccatctacagacattctctgttccctcggaaggttacggacattttttggtagatgtgtttaatgaatggaaaaaacaagatgttggacgtattttcgttttggagtttgataatctgctaggacaatggttaggttatccttctagtagctgtattcatcagccaacttgtggtaaatcgctggttgtagaagcgaatggtgatgtgtattcttgtgatcattttgtttatcctgaatataaaataggtaaccttaatcacacctcccttgcagaacttgttcaatcgcctaaacaatctcattttggtttcgcgaaacaaggtcaattgactcaaatttgtcgccaatgtgaattcaaatccctttgtcatggagggtgtcctaaacaccgaatttcctcagtagaaggggagcattttaagcacaattatttgtgtgcttcttatcaatattttttccgtcagacagcagaagacatgcaacagatgagcaatcagattcgttttgctaaaacataa

SEQ ID NO: 30851 - DNA, 465 bp, Pasteurella multocida
ttgattgaccaagatggcgaacaagcaggtattgtatcaattcaacaagccttagaaatggctgagcaagcagaattagatcttgttgagattagtccaaacgcagagccaccagtgtgtcgcattatgaattacggtaaattcctatatgaaaaaggaaaagcggcaaaagagcagaagaaaaaacaaaaagttgttcaagtgaaggaaattaaattccgtccgggtacagatgaaggcgactatcaagtgaaattacgcagcctgattcgtttcttggaagagggcgacaaagcaaaaattactgtgcgtttccgtggacgtgagatggcacaccaagatatcgggttagaagtgttagagcgcgtgaaaaacgatttagctgagatctccgtcgttgagtccgcccctggcagacttgaaggtagacaggctgttatggtacttgccccgaaaaagaaatag

SEQ ID NO: 30852 - DNA, 198 bp, Pasteurella multocida
atgcctaaaattaaaacagtacgtggtgctgcgaagcgtttcaaaaaaacagcttctggcggtttcaaacgtaaacaatctcacttacgtcatattttgactaaaaagacaactaagcgtaaacgtcatttacgtcataaatccatggttgcgaaagcagaccaagttttagtagtagcgtgcttaccatacgcataa

SEQ ID NO: 30853 - DNA, 354 bp, Pasteurella multocida
atggctcgtgtaaaacgtggtgttattgcaagagcacgccataagaaagttcttaaggctgctaaaggttattacggtgctcgttcacgtgtttatcgtgttgcgttccaagcagtaattaaagctggtcaatatgcttaccgtgaccgtcgtcaacgtaaacgtcaattccgtcaattatggattgcacgtatcaacgctgcagcgcgtcaaaatggtttatcatacagcaaattcatcaacggcttgaaaaaagcatctgttgaaatcgaccgtaaaatccttgccgatatcgcggtattcgataaagttgctttcactgcattagtagaaaaagcaaaatctgcactttaa

SEQ ID NO: 30854 - DNA, 4488 bp, Pasteurella multocida
atgtctgaagaattagcccttgaaaaccttgaacacgttgaaacaagtgtgcctcatactgtattttctcatgcaaatagtgcgccccgtggtaaatttcgttctttaacgttaattaactggaacggtttttttgcgcgtacttttgatttagatgaattagtcaccacactgtctggtggaaacggtgctgggaaatccaccactatggcaggctttgttaccgccttaattcctgatttgaccttattacatttccgtaataccacagaagcgggagcaaccagtggttcgcgtgataaaggcttgcatggtaaattgcgtccgggcgtttgttatgctgcattggataccattaattcgcgcaatcaacgtgttattgtaggcgcaagactacaacaagtagcgggacgtgataagaaagtcgatattaaaaccttctctattcaaggactcaacttagccgaaaatccgacaacgatttttaccgatgtggtcaatgaacgccaagcacgtgtactcacactcaatgaattaaaagagaaaattgagcaagctggcgcacaatttaaacaatatcattcgattactgattatcatgcgatgatgtttgatttgggtattatcccaaaacgcctacgttcttcctctgacagaagtaaattctataaactgattgaagcctcactttacggtgggatttcaagtgccattacccgttctttacgtgattatttattgccagaaaatcttggcgtgcgtaaagccttccaagatatggaaagcgccttgcgtgaaaaccgcatgacgcttgaagccattaaagtgacgcaagccgatcgtgatttatttaagcatttgattaccgaaacctccaactatgtggcatcggattatatgcgccatgctaatgaacgtcgcggtaacattgaaagtgcggtgcgtttccgccaagattggtatcgtgcgcgcacagaacagcatttgtcacaacaacgtttagtcgaattaagtcgcgaagcggcagaattggccgagaatgaaaaaacgttagaagtagatcatcaaagtgcagtggattacttgaacttagtgctgaatgcgctacgtcaccaagaaaaaatcgctcgttatcaagatgatgtggctgaaattacggcgcgtttagaagaacagaaaatggtggttgaaacggcaacggaacaacttgaggaaagccaagtacaggttgaacaagttgaacaagaagtagatcagatccgtgcccaattagccgactatcaacaagccttagatgcacaacaaacccgtgcattacaatatcaacaagcgattgcagcgcttgaaaaagccaaaacactgtgtggtttagctgatttaggcgtaaaaaatgttgaagcttatcacgatgagtttgcagcacatgctgaaagtcttactgagcaagtgcttgaattagaacaaagaatgtcaatttctgatgcagcaaaatcacaatttgataaggcttatcaattagtttgtaaggttgcaggcgagattccacgttctacagcctttgaacaagcgaaagtgctcttacgtgactacccaacacaaaaagtacaagcacaacaaacgtctcaattgcgtgcaaaattacatgaattagaacagcgctatgcacaacaacaaagtgcggtgcgtttgttaaaagaatttaatcaacgtgcaaatgtcagcttggaagatgctgaggcgttggaagcctaccatgctgaacaagaagctttgctcgaagatgtcagtgcagaattatccgaacaagttgaacaacgttcaaccttgcgtcaaaaacgtgagcaactcagcgcactttatcaggataatgcaaaaaaagcgcctgcttggttaaccgcacaagccgctttagagcgtttacaagatcaaagtggggaaacctttgcagacagtcaagatgtgatgcaatttatgcaggcacaattggtgaaagagcgtgagttaaccattgaacgtgatcagcttgaacaacaacgtcaacaattagaagcccaaatttctcgtttgagccaaccagatgggtcagaagatgcgcgcttaaatgtgttggctgaacgttttggtggggtcttgctttccgaattgtatgatgatgtaccgattgaagatgccccttatttctctgccttatatggtccagcacgccatgccattgtcgtacgtgatttagacgcggtaaaaggacaattagctcagcttgaagagtgcccagatgatttatatttaatcgagggtgaccctactgcttttgatgatagtgtgctttctgcccaagaattagcacatggtgtcgttgtacaagtctctgatcgagaattacgttactctaaattccctgagattccattatttggtcgagctgcacgcgagcaatatttagaggcattacagcaacaacgtgatgacgtgacagagcagcatgcacaacgtgcgtttgatgtacaaaaatgtcagcgtttacacgaacatttcagtcaatttgtcgggctacatttagcgctcgcgttccagccaaatcctgaagatgtgatggcggaaattcagcaacaacgcaatgagattgagcgtgaattaaatcaatttgtgacgacggaacaacaattgcgtattcaattagactatgcaaaagaaaaaatgcagttgttgaataagttaattccgcaattaaatctgattgcggatgaaagtttgattgatcgtgtagaagagtgccgtgaacaactggatattgcagaacaagatgagttatttattcgtcaatatggcgcgacgttgtcacaattagaacctattgcgaacacattacaaagtgacccagaacattatgaacgcttaaaagccgattatgaacaggcgatttcacagcaaaaacaagtgcaacaacgcttatttgcattagcagatgtattacaacgtaaagcgcattttgcttatgaagagcgtgttcaaacagaaaacactgatttaaatgaacaattacgcgctaagttagacagtttgcaacaacaacgtgaagtgcaaaaagcgcagttacaacaaaagcagcagcaatttaccaattacaatcgggtgtatattgagctacaaacctcgttcaataacaaaatgcaaatgctacaagagttattgcaagaagttggcgaattaggtgtacgagccgatcaaggggcagaagaacgtgccaaacaacgtcgtgacgaattacatcaagtcttatcggatacacgtcaacgtcgtcactatgtagagaaacaattaaccttaattgaaagtgaagcgcaaagtttaaatgcacgtattcgtaaggcggaacgtgattacaaaacacaacgcgaactggtggttgccgcgaaagtgagctggtgtgtcgtcatgcgtttatcgcgcggtagcgacgtggaaaaacgcttaaatcgtcgtgaatttgcctacttatctgctgatgaattgcgttctatgtcggataaagcccttggtgcattgcgcacggcagtcgcagataatgaatatttacgtgatagtttgcgtttgtctgaagataatcgtaagccagaaaataaagtgcgcttctttattgccgtctatcaacatttgcgtgaacgtattcgccaagacattattaaaaccgatgatccaatcgatgcgattgagcaaatggaaattgagctttcacgcttaacagatgaacttactcgccgtgaacagaaattggcgatcagttctgaaagtgtggcaaatatcatgcgtaaaaccattcagcgtgaacaaaaccgtattcgtatgttaaatcaagggctacaaaatattgcctttggtcaagtcaaatcggttcgcctcgtggtcaatatccgtgatacccatgcgatgttgcttgacgcgttatcgggcacccaagaggaataccaagatttatttactgatcagcgtatgaccttctcggaagcaatcgctaagttgtatcagcgtttaaacccgcatattgatatggggcaacgtactgcgcaaaccattggagaggagctactagattaccgtaattatctcgatctggaagtggaagtgtatcgtggcgcagacggttggttacgtgcagaaagtggtgccttatcaacgggtgaagcgattggtaccggtatgtcgattctattaatggtggtacaaagctgggaagaagaatcgcgccgtattcgcggtaaagatattgtgccgtgtcgcttgttattcttagatgaagccgcacgtttggatgcaaaatccatttccaccttgtttgaattgtgcgagcgtttagatatgcaattattgatcgccgcgcctgaaaacatcagcccagaaaaaggcacaacctataaactggtgcgtaaaatcgccggcaaccaagaacacgtgcatgtggttggtttacgtggttttggcgcaacagcctag

SEQ ID NO: 30855 - DNA, 1428 bp, Pasteurella multocida
atgtccacatcacctgattttagctttttcatttatgattatgagagttttggcgttgaccccgcttctgatcgtcctgctcaattcgctggtattcgcactgacatcaatttcaatatcatcagtgaccctgtcatgttttattgtaaacaaaccaatgattatttacccgcgcctgaagcggttttagtcacagggattacaccacaagaatgtaatgagaaggggattcctgaaccagagtttgcggaacgtattttgcaagagttcagtcgtccaaatacgtgtgtgatgggatttaataatattcgttatgatgatgaaatgacacgctataccttttatcgcaatttcattgatccctatgaatatagctggaaaaatggcaattcgcgttgggatttattggatttggttcgtgcttgctatgctttacgcccagaaggtattaattgggcttatgatgaagaagggatgccgtcatttcgtttagagaaattgactaaagccaatggcattgaacatagcaatgcacatgatgcaatggcggatgtatatgccaccattgcgatggcaaaactgattaaagaaaaacaacccaaattatttcaatatttctttgaaaatcgcggtaaaaaagaagttgagaaactgattgatactgcaaatctgacgccattggttcatgtttcaggtatgcttggtaatcatcgtggtaatactacctggattgtgcctttagcctggcatccgaccaatcaaaatgctgtcatttgttgtgacttagccgcaaatataacagatttactcaataaagatgctaacgaattacgtcaaaatctttatactcctaaagctgaattaattgaaaaggggattttaccggtaccattaaaattggtgcacattaataagtgtccaattcttgcgcctgctaaaaccttattacctgaaaatgcagcgcggttaggtattgatcgtacattttgtttggaaaacttacagcgcctcaaattatcaccacctattcgtgacaaggtcactgaaattttcaatgaagaacggcattttgccccaagcatcaatgtagaaacagaactgtataatgggttctttgattacaatgataaaaacaacatggcgattttacgccatttaccagaagaaaagctggccgagcatggtttagcgtttaaagatacgcgtatccccaaattattattccattatcgggcaagacattattttaatagcttaactcgcgcagaacaaattcaatggcaaaagtaccgtcataaaaagttggatcaagttgcactgcaatttgagcagagcttacaacgtttaatcgcagagaatagtgaaaatccgactaatttagccttattacaaaaagtctatgagtatggcgcaaaaatattagcctaa

SEQ ID NO: 30856 - DNA, 312 bp, Pasteurella multocida
atgagtaaagaattcgataaaaaacgtgatgaattattaagtgagattcgtgagatcttagataacgcagaagagctattcgatgaaaaatctaaagccagtgtggatgaattaaaaaaactgaaatcgaatctggattcacgtgtttctaaattacagaaacaatttggcgtattaaaggatgatgctgttgctggtacgaaagaagtgattaaacaaactgacgagttagtccaagataatccttataaagcaattggggttgctggtgttattggattattattaggcgttttaatctctaagaaataa

SEQ ID NO: 30857 - DNA, 2607 bp, Pasteurella multocida
atgagtaaatccttggttattgtggagtcgccggcaaaggcaaaaaccattaataaatatctaggcagtaattatgttgttaaatctagtgtgggccatatccgtgatctccctacggtcggttcaagtaatggtgagaaagcaaaagcaatttccacgaaaggattaagtgcggaagaaaaaagcgcgattaagcaagaaaaagatcgcaatgcgttagtcaaacgtatgggaattgacccttatcatcaatggaaagccaattaccaaattttgcctggcaaagagaaagtagttgccgaattaaaatcgttagccaaaaaagccgatcatatctatcttgcgaccgacttggatagagaaggagaagccattgcttggcatttgcgtgaggtgatcgggggggatgatgcacgttttagtcgtgtcgtatttaacgaaatcacgaagaacgcgattcaacaagcctttgaaaaaccagaacaactgaatttagatcgtgtaaatgcccaacaaacccgtcgctttttagaccgcgtggtcggttttatggtgtcgcctttattatggaaaaaagtagcccgaggcttatctgctgggcgtgttcaatctgttgctgtcaaattagtagtagaacgtgagcgtgaaattaaagcctttcagcccgaagaatattgggaaattgacgttttaacgcaaacgcaagcgaaacaagcattacgtttagccgtgacccaatttaaagggaaaaaatttgagccgaaaaatgccacgcaagcacaaagtgcggtagattttttacagcatgctgactatgtggtttccgatttagaaacgaaaccaacccattctcgagcgaaggccccttttattacctcgacattacagcaaaccgccagtacacgtctagggtttggtgtaaagaaaaccatgatgctcgcacagcgtttatatgaagctggttatattacctatatgcgtacagactccacgaatttgagtcaagatgcgttaaagatggtgcgtggctatattcaatcacattatggtgaaagctatttgccgagcaaacctgtgttttattcaagtaaagaaaatgcacaagaagctcatgaagcaattcgtccatcggatgtcaatacattagcagagcaattgacaggcatggataaagatgcggtacgtttatatgatctgatttggcgtcagtttgtcgcttgccaaatgccagcggcgcaatatgacagtacaacggttacggttcgcgcgggagagtatgaattaaaagcgaaaggacgtattttacgttttgatggttggacaaaagtcttacctacaatgagtaaaaatgctgaagatcaagtgttgccagatgtgcagctgaatgaaaaattgcatttagagcatgttttacccgaacagttatttaccaaacctccagcacgttttagtgaagcggcgttggtcaaagaacttgaaaaacgtgggattgggcgtccctctacatacgcagcaattatttcaacgattcaagaacgtggctatgtacgagtggaaaatcgtcgtttttatgccgaaaaaatgggcgaaattgtcactgaccgtttaaatcaatctttcaccgcgttgatgaattacgatttcaccgccaatatggaaaacatcttagaccaaattgcgaacggtgagaaaaattggaaaaccgaacttaatcaattctttaaagatttttcgcaacagttaagccaggcggaactggatgaattagaaggtggaatgaaaccaaatagtttagttccaaccgatattaactgtccaacttgtggtcgtaaaatggcaattcgcaccgcaagtactggggtgtttttaggttgcagtggttatgccttgccaccaaaagagcgctgtaaaactacaatgaacttaattccagaagctgaattgctcaatgtgttagatgaggcttctgaaaccaaggcgttaatggaacgtaaacgctgtccaaaatgtggtacagcaatggacagttatctaattgatccagaacgtaaaattcatatttgcgggcataatccgaattgtgatggttatgtgttagaacagggcagtttcaagattaaaggctatgatggtccgattgtcgaatgcgataaatgcggtgcggacatgcatttgaaattgggtcgttttggtaaatacatgggctgcaccagctgtgataatacccgtaagattctaaaaagtggggaagttgcaccaccaaaagaagaaccgactcatttcccagaactgaaatgtgaaaaatcggatgcttattttgtattacgtgatggggcaagtggtgtgtttatgtccgctcataattttccaaaatcgcgtgaaacccgcgcaccgaaagtggctgaattagcattatatcgtgatcgtttgccagaaaaattacgttatttagctgatgcaccacaacatgatcccgaaggtaatgatgctattgtgcgttttagtcgtaaagaaaaacgtcaatatgttacttctgaaaagaatggtaaagcaacaaaatggattgtggattaccttggtaatcagtgggtagagcgaaaaaaataa

SEQ ID NO: 30858 - DNA, 834 bp, Pasteurella multocida
atgacaacaatttatgatcttcattgccatagtactgcttctgatggcgtattatcaccgacagaagtcgttgcacgagctgttgaaaagggagtaaatgtacttgccttgactgatcatgatactacggcagggcttgcggaagcccgtttagccgcacaacaaaccgatttaaccttgataagtggcgtcgaaatttcaaccacttgggaaaatcgtgctattcatattgttggattgggttttgatgaaacttcagcaaaaatgaccgcgcttttacgtcaacaagcggcattacgctatcaacgtgcgcttgagattagtgacaaattagcaaaagttggcattgtagatgcatttgagcaagccaaaatgttagcaacgggagaagtgacaagagcacattacgcacgtttgttggtacaaatgggtaaagtctcgaatgagggacaagcttttaaaaagtatctctcacaaggcaagtcttgctatgtaaaagcacagtggtgtgatattccaactgcaattgaggtcattcatcaaaccggtggactcgctgttttagcacatcctttacgctataccttaaccaacaaatgggtcaaaaaattaattgccgattttgcacaatggggaggcgatgcgattgaagtcgcgggctgtggacaggcaccagaacaacgtttgcttctcgcccaatgggcaacggaatttggtttactgagctctgttggatcagattttcattttccctgtggttgggttgagttaggcaagtcgttactattgcctgctaattgcgtgccaatttggacaaagttatcgcccaactaa

SEQ ID NO: 30859 - DNA, 2610 bp, Pasteurella multocida
atgcaagccaaagccaaatacagaaaagattatcgtactccagacttcaccgtgacagaaatcgcgcttgattttcaacttgatccgaaaaaaacggtcgtcacggcaaccagtcaatttcgtcgtttaaatcctcaagcacaaaaattacgtttagatggacacagtttccaattttcatcgctcaaattgaatggtcgtgattttaaacattttgagcaagatggggagagtttaagcctaaatttaagcaccgttgatgcagaccaatttagcttggaagtggtgagtattttaagtccagaaaaaaatacgtcattacaagggttataccaatcaggtgaggggatctgtacgcaatgtgaagccgaggggttccgccaaattacttatatgttagatcgcccggatgtattagcacgctatacaacgaaaattacagcagataaaagtaaatatccttatttattatcgaatggtaaccgtgttgatagtggcgaactgcctgatggtcgtcattgggtggaatggcatgatccatttccgaaaccaagctacctctttgcattagttgctggggactttgatgtattaagtgatacttttacaactaaaagtggacgagaggttgcgttagaactttttgttgatcgtggtaatttagaccgtgcagagtgggcaatgcaaagtttaaaacgttcgatgaaatgggatgaagatcgctttggtcttgaatacgatttggatatttatatgatcgtggcggttgatttcttcaacatgggagcgatggaaaataaagggttaaatgtgtttaactcgaaatttgtgttagccaatccacaaaccgccacagacgaagactatattgcggtagaaagtgtgatcgcccatgaatatttccataactggacagggaaccgtatcacctgtcgtgactggttccaattaagcttaaaagaaggcttaaccgttttccgtgatcaagaatttacgtcggacctttggtcgcgctccggtaagcgtattgaagatgttcgtttattacgcacagcacaatttgccgaagatgccagtccaatgtctcacccaattcgcccggataaagtgattgagatgaataacttctataccatgacggtgtatgaaaaaggggcagaagtgattcgtatgatgcataccttattaggcgaaaccttattccaaaaagggatgcaactgtatgtgtcggaacaagatggcaaagcggcaacttgtgaagattttgtatcggcaatggaacgtgcatcaggtattgatttaacacagttccgtcattggtatagccaatcaggtacgccagaattaaccattacagatagctatgatcccgaaacagcggtttatactttacatgtggcacagcatacgccaccgactgcagaccagatggaaaaagtcaatttacatattccattaaaaatcgcgttatacgataaaaacggtcaagcgcaagttttagaaaacgatggtcaaatcattaaccccgttctcgatgttaaacaagcggagcaaagtttccaatttacaggggtaaaaagcaaacccgtccccgccttgttatgtgatttctcggcaccagtcaaattgcattatgagtatagtacggcacagttaatcacattattacgccatgccgaaaatcaatttgtgcgttgggatgtagcacaaatgctttatgccgcagaattacgtcgtaatctaactcgctatcaacaaggtaaaagtttagaattttctgctgaggtattggcggagttataccaaattttagacggttatcagcaagatcctgaattggctaccctcattttgactttgccaaaagtcactgagtttgccgagttatttaaaaccattgatccagaagggattagtgtcgtgcgtgattttatggtgcgcacgattgcagaaagtctgaaacaaacgttattaaaagtgtataacgacattcgtttagaggtatatcgtgttaacgcagaagatattgctttgcgtgccttgcgtaatctgtgtgtgagttatttggcatatacgacagttgggaataacttggtgaataaacattatagttatgccaataatatgacagacactttggcagctttaagtgcggcgactcaagcacagctaccttgccgtgataccttattagcggactttgaaagcaaatggcaacatgatggcttagtaatggataaatggtttgcgctacaagcgacacgtccagatgacgatgtgttattgaatgtgatgaaattaatggatcatccaagtttcaactttaataacccaaaccgtttaagagccttagtcggtagtttcgccaatcataacttgaaagcgttccatgctattgatggttcaggttatcgtttcttaaccgatattttgattcgtttaaatgagagcaatccacaagtggcatcgcgtttaattgagccattaattcgtttctcgcgttatgatggacaacgacaaaccttgatgaaacgggggttagaacgtttaagcgaagtggaaaatatttctcgtgatttatatgagaaaatcgaaaaagccttacaatag

SEQ ID NO: 30860 - DNA, 1014 bp, Pasteurella multocida
atgcaaacaattccaattaaacatgttggtaatgatcctttagtggatgcgttccaacgtcgctattactatttgcgactgtcaattacagatgtgtgtaatttccgctgtaattactgtttgccgaatggttatcaacctgagtcaaataaacccagttttctcaccttaaatgaaattcgtttagtggtaaaaagttttgctaacatgggtactgaaaaagtccgtattacggggggagaacctaccttacgtaaagattttttacctattgttgaaaccattgctcaaaatcctactattaaacagattgctttgaccacgaatggttaccgtatggcaaaagatgttgctgcgtggaaagaggcggggatcacgtcgattaacgtgagtattgatagcttagatgcacgaatgttccatcgtattaccgggatagacaaatttgaagacgtaatgcgtggtcttgagcgtgcttttgaggtgggctatcagaaaatcaaagtcaattccgtgttaatgagagatcttaatgacgcggattttaatcagtttttaacttggattaaagacaagccgatccaaatgcgttttattgaattaatgcaaacgggggaaatggatcatttctttcagcaacatcatgtatcaggtcaattgttagcagataaattaatcaatgcggggtggaccttacaaagcaagggattacttgatggaccggctaaagtatttaaacacccagattatgttggcgaagtaggcttgattatgccctatgagaaaaatttctgtgcgagctgtaatcgtttaagggtatcagcgaaaggcaaactgcacttatgtttgtttggtgaagaaggcattacgttacgtgacttactgcaatcggatgatcaacaattgcaattacaagcacgtatttcttctgcactacaaggcaaacgtgagcatcatttcttacatcaaggtgatagtggtgtacgcgcaaatttagccagtatcggcggttaa

SEQ ID NO: 30861 - DNA, 927 bp, Pasteurella multocida
atgtcggatttaactcgttttacacagtatgagcacttagataaagtcaaaaaagtcgtcgcgatcggcggagggcatggcttagggcgactgatgtctgcattaagtttcatgaaatcacgtttaacgggtatcgtgaccacgactgataatggcggttcaacaggacgtatccggcttaatcatggcggaattgcgtggggtgatctgcgtaattgtttaaatcagattattactgaacccagtactgcttctagtttatttgaatatcgctttactgggcaaggtgaactctctgggcataacttagggaatctcatgctcaaagccttagaaaatatgcacattcgtccagtggaggcgattcatttagtgagagagttattgcatgtcaaatctcatatttttccgatgtctgaaagtccggttcaccttgctgccgtcttacaatccggtgccagcattgttggtgaagtgggaattgataatctcactgaattacccaaatccatttttttagtgcctttagtcaaggctacaccagaggcaattgaagcattacaggaggcagatgtgattttgtttggtcctggcagttttctcaccagtattctgccacccattttattacctgaagtaatcgaagcattgcaaaaaagtcacgcaaagaaaatatttatcgataatttagcccttgagcaaagccctgccgcctctctatcgctatcagatcgtattcaatggattcatcataccgttggtaaagagattattgatgcaacaatcgttccaaccaatgcaaacgacttgtgcgagaatttatccttgaaagtgatggttcgcccattacaggcagatgatattagctatcgccatgatcgaagtttgttatcacaagcgattgatgatttacttggcgaattataa

SEQ ID NO: 30862 - DNA, 2388 bp, Pasteurella multocida
atgaaatttagtgaatcatgggtgcgtgaatgggtaaatcccgctattagcacagcgcaattatgcgatcaaatcacgatgttaggtttagaagtggacggcgtagaaaaggtcgcgggtgatttttcgggagtggttgtcggtgaggtagtggaatgcgcccaacatcctgatgccgataaattacgtgtgaccaaagttaatgttggtggtgatcgcctattagatattgtgtgtggtgcaccaaattgtcgtcaaggcttaaaagtggcttgtgcgacagaaggggctgttttaccgggtgacttcaaaatcaagaaaaccaaattacgtggtcaaccttcagaaggtatgctttgctcattcagcgaattaggtattgatgtggaatccagcggtatcattgaactaccacaaaatgcgccagtcggcactaatctacgtgattatttaaccttagatgataatacggtagaaattagcttaaccccaaaccgggcagactgtttaagtatcgcaggtattgcgcgtgaaatcggtgtcgtcaataaactggctgttaatacaccgcactttgaatcagtgaaagcgacaattactgataaagtcgatattcaactgcatgcgcctgaagcgtgcccacgttatttattacgtgtagtgaaaaatgtcaatgtgcaagcgccatcaccaatgtggttacaagaaaaacttcgccgttgtgggattcgctctattgatccagtagtcgatgtaactaactatattttacttgaactgggtcaaccgatgcatgcatttgatgcagccaaagtcgctcagccagtacaagtccgtatggcaaaatcaggtgaagcgctcgtgcttttagacggttctacagcaaaattaaaagataacactttattaattgcggaccaaaatggaccattagcgatggcggggatttttggtggacaagccagtggggtaaatgcagaaactaaagacattattttggaagctgctttctttgcaccgttagccattgctggtcgagcaagacaatatggcttacataccgattcttctcatcgtttcgaacggggggttgattttgaattacagcgtcaagcgatggaaagagcaacagccttgttagtggaaatctgtggtggggaagtcggtgacatttgtgaagtcgctagtgacgcctttttaccgaaactgaaccaagtgagtttacgtcgtgaaaagttagatgccttattaggtcaccatattgaaacagaaaccgtcacggatattttaacgcgccttggcttacaagtgagctatgctaacgatgtatggcaagtgacatcagcaagttggcgttttgatattgaaatcgaagaagatttagtggaagaaatcgcacgtatttatggttacaacagtattccaaacaaggcgccattggcacatttacgtatgcgcgagcataaagaagcggatttagatttggcccgaattaaaactgcactggttgatgccgattaccaagaggcgattacttatagtttcgttgatccaaaaatacaaagcgttttacatccacaacaagatgcactggtcttaccaaatccaatttcagtggaaatgtccgccatgcgtttatccctattaagtggtttgttaggcgcagtacagtataaccaaaatcgtcagcaaacccgtgttcgcttatttgaaacaggtttacgctttattccagacacgcaggccgaattcggcgtacgtcaagaatttgttttagcggctgtgatgacaggtaataaaaaagcagaacactgggcaggtaaagccgaaagtgtcgatttctttgacctaaaaggggatttagaaagcattttatctttaacagggactagaaatttggttaaatttgtagcaaaatcatatccagcattacatcctggtcaatctgcggccatcatgttaaatggtgaagaaattggttttattggtacacttcatccaaatgccgcgaaacaactgggtttaaatggaaaaacagtggtatttgagattctttggcaagcgattgcaacacgtcaagtagtgcaagcaaaagagatttcacgttttcctgcaaatcgccgagatttagctatcgttgttgctgagagtgttgcagcaagcgatgtgcttgacgcgtgtcgagaggttgctggcgaaacattaactcaagttaacctgttcgatgtctatcaaggcaatggtgtggctgaaggccacaagagtttagcgattagtttgattattcaagataatgaaaaaactcttgaggaagatgatatcaacgcagtggtttctgttgtattgtctgagttaaaacaacgttttaatgcttatttgagagattaa

SEQ ID NO: 30863 - DNA, 984 bp, Pasteurella multocida
atgcaaaacctagaacaaattaccgaacaagcattggatgcaattgcccgtgcggaagatggcaaagcattagatgcgattcgtgtggaatattttggtaaaaagggaccttttacggcattaatgcaaggattacgtgatgtgtcaccagaagcacgtccagccgtaggtcaaaaaattaacgatgcaaaacaacttgcacaaaatgcattaaatgaaaagaaagtacagcttgaaacagcggaattaaatgcacaattagcgaaagaaaaaattgatgtaagcttgccgggacgtaaagtggaaactgggggattacatccagtgacaatgacgattgatcgtgtgaccaaattcttctctgagttaggtttttccgtcgaaagtggtccagaaattgaaagcgactattataatttcgatgccctcaatatcccgaaacatcacccagcccgagctgatcacgatacattttggtttaacccagaattattactacgcacacaaacctctggtgtacaaattcgtacgatggaaaaaatgcaaccgccaattcgcattatggcaccaggacgtgtttaccgtaacgattatgatcaaacacatacaccgatgttccaccaaattgaattattgtatgtggataaaaaagcgaacttcactgaattaaaagggttactccatgacttcttacgcgccttttttgaagaagacttacaagtgcgtttccgtccttcctatttcccgttcactgaaccttccgctgaagtggatgtgatgggcaaaaatggcaaatggttagaagtactaggttgtggtatggtacatccgaatgttttacgcaatgttgggattgacccaaatgaatatgctggctttgcggtggggatgggggttgagcgcttaacgatgttacgctacaacgtcacagatttacgtgctttctttgaaaatgacttacgtttcttaaaacaatttaaataa

SEQ ID NO: 30864 - DNA, 651 bp, Pasteurella multocida
atgaaaacattaacattctatttgatacgtcatggtaaaacggagtggaacgaaaaaaggttattacaaggaaatggggactcccctttgacacaagaaggcattgaaggtgctaagcgcacagcaaaagcgttatctaacattgatttcactgccgcctatagtagcgtattgccccgtgcaatttccactgcaaacatgattttagcgcacaaaaccaccccattaatttgtcatgccggcttaaatgaattgtgttttggctcatgggaagggcaagccattgaggaattaagttgcttaccggaataccgtcaaatgcgcgatcaacctgcgcagtatttggggttaaccaatggcggggaaacttatcagcaattagcaacacgcgcgatcggcgtcattgaacagattattcaacgttatgacactggaaatattctcattgtctctcatggtcatactttacgtatgcttttggcgttgtttcatggtgccacttggcaaacccatcgagaaaaaagtaccagcttagcgaacacgtccattagcgttgtacactatttacaaactgagaatgaaacaggacgctttgtgcttgaaaaggtcaatgatatacagcatttaaccgattcattcgatgaggaataa

SEQ ID NO: 30865 - DNA, 915 bp, Pasteurella multocida
atgagttggattgatcgaatttttaataaagatacttcttccacaagctcgcgtaaagcgaacgttcctgagggcgtttggactaaatgtacttcttgtgagcaagtgttgtatcgtgatgagttaagacgtcatttagaagtttgtccaaaatgtggacatcatatgcgtattgatgcgagagaacgtcttttggcacttttagataaagacagtagccaagaattgtctgcggagcttgaaccaaaagatatcttaaaatttaaagacttaaaaaaatataaagatcggatttccgcagcacaaaaagaaacgggtgaaaaagacgcattaatttcaatgtttggcactttatacggtatgccaattgtcgccgctgcctctaactttagctttatgggtggctcaatgggctcagttgtgggcgcaaaatttgtgcaagcagcagaaaaagcgattgctgaaaactgtccttttgtgtgtttctctgccagcggtggcgcacgtatgcaagaagccttattctctttaatgcaaatggcaaaaaccagtgctgtcttagccaaaatgcgtgaacaaggtgtgccatttatttccgtattaaccgatccaacgttaggtggtgtttctgcgagctttgcgatgctgggtgacattaatatcgcagaaccgaaagcgttaataggttttgctggtccgcgtgtgattgagcaaactgtacgtgaaaaattacctgagggtttccaacgtagtgaatttttgcttgaaaaaggcgcaattgacatgattgtgaagcgtgctgacatgcgtcatacgttagcaagtgtgttaagcaaattaagcaataaaccatcgccttttgtggaacctgaattggtggaaaacgaagaacaaagtaaaagcgataatgaataa

SEQ ID NO: 30866 - DNA, 795 bp, Pasteurella multocida
atgaaaattgcattaggcattcaatataacggaaaaaattattgtggttggcaacgtcaggaaaatgtggcgagtgtacaagagcaattagaaaaagcgatttcttttgtcgctaaccaaccctgtcagattttttgtgcagggcgaacggattcaggggtgcatgccacagggcaagttgtgcattttgaaaccgatgccattcgggcagaaaaagcatggagttttggtgtgaatgcgaatttgcctgatgatatttcagtgagctgggcaaaatgtgttactgatgattttcatgcccgctttagtgctactgcacgccgttatcgctatattttgtattgtaataaattgcgctcggcaattttgcctgaaggtgtcacacattgtcatttagacttagatcaccacttgatgcatcaagcgggacaagcgttattaggtgaacaagacttttcttcttttcgtgcagcacaatgtcaatcacatacaccatttcgcaatgttcatcatttaaaagtggtgcgacgtgggcaatatattattgtggatatccaagccaatgcatttgttcatcacatggtgcgtaatattgtgggcagtctgattgaagtcggcgcgggtcatcaacctgtagaatggatagggtggttgctggcgcaaaaagatcgtagattagcggcacccaccgcaaaaccggaagggctttatttggtcaatgtgagttatcctacgcaatttcagttacctcaaaatgcgttagggcctttgtttttagaaaatgaattaggctag

SEQ ID NO: 30867 - DNA, 285 bp, Pasteurella multocida
atgtttaaatttaatgctgaagttcgtcaatcgcaaggtaagggtgcgagccgccgcctgcgtcataatggtcaaattcctgcaatcgtttacggtggtagcgaagcgcctgtttcaatcgtcttaaaccacgatgatttaaataacgcacaagttcatgatgcattctacactgatgttattacattagtgattgaagggaaagaagttgcagtgaaagcacaagcgatgcaacgtcacccattcaaaccaaaattagttcatatcgatttcaaacgtgtttaa

SEQ ID NO: 30868 - DNA, 1416 bp, Pasteurella multocida
ttgaggttttatatgactaaagtcgcatctattgtagatgttttacaaggcaaaattgccattggtgaaaccgtcactgtccgtggctggattcgtactcgccgtgactcaaaagcaggtctttcttttttggccatttatgatggttcttgctttgatcctatccaagcaattgtcaataatgatattgaaaattacgaaacagaagtgttgcgtttaacaaccggctgttctgttattgtaacaggtactgttgtagaatcccctgctgaaggtcaagctgttgaattacaagcagaaaaagtcgaggtcgcaggttgggttgaggacccagaaacatatccaatggcggcaaaacgtcactcaattgaatatttacgtgaagtggctcatttacgccctcgtaccaatattattggcgcagtcgcacgtgttcgtcactgcttagcacaagccatccaccgttttttccatgaacaaggtttctattgggtagcgacgccattaattaccgcatcagatacagaaggggcaggcgaaatgttccgtgtgtccactctcgacttagaaaatctgccacgtgatgacaaaggtgcggtcgatttttcacaagatttctttggaaaagaatctttcttaacagtatccgggcaattaaatggtgaaacctatgcctgtgctttaagtaaaatttatacttttggtccaacattccgtgcagaaaattccaatacaacacgccacttagctgaattctggatggttgaaccagaaattgcctttgcgactctggccgataacgcgaaattagccgaggatatgttaaagtatgtattccgtgcagtacttgaagaacgcaaagatgacttaaaattctttgaaaaacatgtcgataacgacgttattagccgtttagaaaatttcatcaattcagatttcgcgcaaattgactatactgatgcaattgaggtgttattacaatcaggtaagaaatttgaattcccagtttcttgggggatcgacttatcctctgaacatgaacgttatttagcggaagaacactttaaatcgccagttgtggttaaaaactatccgaaagacatcaaggctttctatatgcgcttaaatgatgacggaaaaactgtcgcagcaatggatgtgttagcaccgggtattggtgaaattatcggcggttcacaacgtgaagaacgtttagacgtgctggataaacgaatgatcgaaatgggactcaacccagaagattactggtggtatcgcgatttacgccgttatggcaccgtaccacacgctggttttggtttaggttttgaacgtttaatcgtgtatgttactggcgtacaaaatattcgtgatgtgatcccattcccacgttcaccgcgtaatgcaaacttctaa

SEQ ID NO: 30869 - DNA, 2358 bp, Pasteurella multocida
atggctcgcttacgtaaaaactgtattttatcgctgctttataccgcacttttacttgcctgcgtggtgaccattgttcgccttttaccttactccccattaaaagatcatttcccctattccagcgcagtttatgacgagcaacaaaatttgttacgcctcaccaccgccaaagatgagaaataccgtctatggacacctctccatgatatctccccgaaacttgttgatgcggtgctttttcaggaggatgaatggttttattggcattttggtgttaatccttacgggctattgcgtggggcttggcaaacctacattttaggcaactcaccacaaggtggatcaacgattactatgcaactggctcgtgtcttatgggctattgacagccgaagtctattaggcaaaacagaacaaatcttacgcgcaatccaactggaaatacgttactcaaaaaaagagattttagaggcttatttgaattttgccccttatggcagaaatattgaaggggcgggaaccgccagtttaatctactttaataaagccaatcataagatgaatttggctgaagcgcttaccttagcgattttaccaaagaatccgaacagctatattcgtcaaaacaatcaacagctgaattctgctttattcaaggcacgtaaccaactttaccaacgttggatagcacaataccctgctgatcaacaatggcaaacagattttcaactcaattatccactgcgaccactcgaaaaactaccgttttttgcaccgcattttgttgatcaattactacaacaatatcctgaacaaacgcatattgtcagtacgctcaatagctcccaacagcgattaattgagcgtattacacgccgctatttatcccagcaatacactaaaggaatagaaaatgtcgcagtactattagtggataatcgcgatatggcagtaaaagccttgatcggttcgggtaactattttaatccagccatttcgggacaaattaatggtactttagctaaccgctcttatggttcaacgttaaaaccttttatttacgcattggcgtttgatcaaggtttagcccacggcaaaaccgttttaaaagatttgccaacgacctttggtgattaccagcccgaaaattacgaaggcaattttttaggtcccgtcagtgttactcaggcgttattacaaagccgcaatattcctgctattgatcttgccaaacaacttaaccccgatctttacgactttctccaacaagcagatatcaaactacccaaaagtaaaagctattatggcttatctctagtattaggcggtgctgaattaaatctacaacagttagccagtttatatgcgatgttagccaatcaagggagatggcaaccgttgaaattcaaccaacgagatagtcttcctgcgcctaaaaccgtattaagtcaagaaagtgcggtcatgattcatgatattttgcggcaaaattttcgcaccgatatgcaaaataaatcgattaagactgcattaccgctctattggaagaccggcacgtcaaatgggctacgtgatgcgtggacggcaggttattttggacactatactcttgtggtttggtttggtaattttaacaataaaaataacccgcattttattgggcgtgctttggctgcccctttgttcttacaactggcagacagtctgattgctagtgagcctcaaatgcgtgacattgtcactgagaatatcaatcaactcaatttaaaaaatgtcctcgtttgtcaggcggacggaaatctaccgaatgcctattgccaacaacaagtcaacaccctgtttattcccggaaaatcgccgattaccatcagccagctttatcagccttttatggtactcaaaaatagcgacatgttggcatgttcaacacatgataaagccgaaacggaacaaaaaatttatgaaatgtggtcaagtgattttcaacagatttttgcgcaagctggcgtcatgaaaagaatgccgatcataaatacggcttgcccttatgaacaacaacaccaagccttacaaaatctacaccataataatccgcaaatcgtttcgccattagcacaacgtcattattatattgaacatgacaacccaaaaagccctttacttctgtcagctattgccgcgggtgaagtcaaaaaattatactggtttgtcaataatagttttattggtgaagccttgccgcagcagccccttttttggcaacctaggtcagcaggctattatacgatctcggtgacagatgattacggcagaagcacaagcctttccattaatgtgctactgaaaggattttaa

SEQ ID NO: 30870 - DNA, 846 bp, Pasteurella multocida
atgaacaatttaacaggaattttatatattgtcgccacgccgattgggaatttacaagatattacacaaagggctttagcgatttttgaacaggttgatctgattgcggcggaagatacgcgtcatagtggtttactattaagccattatggcattaagaagcctttttttgctttacatgatcataatgaacaacaaaaagcacacctcttagtagagaaattacagcaggggcaacatattgcgttgatttctgatgcggggacgccactgattagtgatcccggttttcatctagtacgtcaatgtcgccaagctggtattaaagtggtgccgataccgggcgcttgtgctgcggttaccgcactttgcgcttcaggtattgcatccgatcgtttttgttttgaaggatttttaccggcgaaaagcaaggcacgttgcgataaattgcaaaatctcgctgaagaagagcgtacgctgattttttatgaatcaacccatcgcattttggataccttagcggatatcgaaaaaacgttgggagcagaacgctatgtggtattggcgcgggaaattaccaaaacctgggaaacgatcgtaggggacaatgtggcaaatttacgccaatggttaggagaagatccgaatcgcactaaaggagaaatggtgttaattattgaagggaaagtcaaacaggagactgatgagataaatccccaagccctcaaagcacttgaattaataagccaatcgcttccattaaaaaaggcggctgccattgtggcggaaatctatggttataagaaaaatgcgctgtatcaatatggattagagcattttaattaa

SEQ ID NO: 30871 - DNA, 615 bp, Pasteurella multocida
atgtttacaggtattgttcaaggaactgcaaaaattgtttctattcaagacaaagctaattttagaacacagatcgtgaaaatgccacaagaaatgctgaaaggattagaaattggtgcttcagttgcgaataatggcgtatgtttgacggtaacagagattaatcaagattgtgttagttttgatttaatggcagaaacattacgtattacaaatttaggcgagttacagccgggtgatttggtgaatattgaacgtgcgatgcaaatgggcagtgaaattggcgggcatattttatcggggcatgtgtattgtacggcgagtgtgaagcagattttcagttcagaaaataatcgccagatttggttcgaattaccggatatggcaacaatgaaatatattttacctaaaggctttattgcgattgatggaattagcttaaccattggtgaagtgaaaggacaaacattttgcgttaatttgattcctgaaacgttgaatcgtaccttgattggcacgcgtgaagtgggggataaagtgaatattgagattgatccacaaacgcaagcgattgtggatacagtagagcgttatttgggtacaaaacagcaataa

SEQ ID NO: 30872 - DNA, 1440 bp, Pasteurella multocida
atgtctagaagactaagaagaacgaagattgtatgtacaatgggaccgtcaacagagcgtgggaataatcttgaaaaaattatcatggctggcgcgaatgttgttcgtatgaacttttctcatggcacaccagaagatcatatcggtcgcgcggagaaagtacgtgaagtggcaaaaaaacttggaaaaaccgttgctattttaggtgatttacaaggccctaaaatccgtgtctcaactttcaaagatggtaaaattttcttaaatattggtgataaatttgtgcttgatgccgatttaccaaaaggtgaaggtacgcaagaaggtgttggtttagactacaaaacattaccacaagacgttgtgccaggcgatattttattgttagatgatggtcgtgttcaattaaaagtcttatctacagaaggtaataaagtttttactgaagtcactgttggtggtccattatcgaacaataaaggtattaacaagttaggcggaggtttatctgctgatgcattaactgaaaaagataaaaatgatattttattggcagcaaaaatcggtgtagattatttagcggtttctttccctcgttcaagtgcagatttaaactatgcgcgtgagttagctgaagctgcaggcttaaaagcaaaaatcgtggcaaaagtagaacgtgcagaaactgttgcaaccactgaagcaatggatgatattattttagcatcagatgtcatcatggtagcacgtggtgacttaggggttgaaattggtgaccctgaattagtgggtgtacagaaaaaattaatccgtcgcgcacgccaattaaaccgtgttgttattacagcaacacaaatgatggaatctatgattagcaatccaatgccgactcgtgcggaagtgatggacgtagcgaatgccgtattagatggtacagacgccgtgatgctttctgcagaaacagcggcagggcaatatccagcagaaacagtggctaccatggcaaaagtgtgtttaggtgctgaaaaaatgccaagcatcaatgtttctcgtcaccgtatggatatcacttttgattctatcgaagaatccgttgcaatgtctgcaatgtatgctgcaaaccacatgaaaggtgttgctgcaattattgcaatgacacatactggacgtaccgcgttattaatgtcacgtattagttctggtttaccgatttttgccttatctcgtaaccaagatgcattaaatctttgtgcattataccgtggtgttacacctgttcattttgatgaagtcagccgtaattcaaaaggtgcagctgcagcgattcgtttgttaaaagagaaaggtttcttagtatcgggtgatttagttcttttaactcaaggtgatgaattgttagcaagtggtacaaatacttgccgtacactagttgtagaataa

SEQ ID NO: 30873 - DNA, 825 bp, Pasteurella multocida
atgtcattacaacatatcattgaagccgcttttgaaaagcgcgcagaaatcaccccaaaaacagtcgatgcgcaaacgcgagccgcgattgaagaagcgattgaaggcttagattcgggaaaatatcgcgtagcagaaaaaattgatggagaatgggtcacacatcaatggttaaaaaaagcagtgttattgtctttccgtattaatgataatgagttagtcgccggcagtgagacaaattactatgataaagtgccaatgaaatttgctgaatatgatgcggcacgttttcaacaagaaggtttccgtgttgtgcctcctgcagctgtgcgtaaaggcgcctatatcgctaaaaatacggttttaatgccatcttatgtcaatattggtgcccgtgttgatgaaggtactatggtggatacttgggcaacggttggttcttgtgcgcaaattggtaaaaatgtgcatttatcaggcggtgttggcattggtggggtattagaaccattgcaagccaatccaacgattattgaagataactgttttattggtgcacgctctgaaattgtcgaaggggtgattgtggaagaagggtctgtcatctctatgggcgttttcattggacaatcaaccaaaatttacgatcgtgaaacgggcgaagtaacttatggtcgagttcctgcggggtctgtggtggtttcgggtagccttccatctaaatgtggcaaatatagtttatattgcgctgtaatcgtgaaaaaagtcgatgctaaaaccttaggtaaagtcggtattaacgaattattacgaacaattgatgaatag

SEQ ID NO: 30874 - DNA, 1038 bp, Pasteurella multocida
atgaagtttaccaaaccaaattctcgtcaaaataaaccgcacgttgagcaaaaaacatcgcgacgttctacaaacgcgaatgctgtggcgagtaaaaatgtgaaaaaggtgacagaagcacaaccgaaatcggtaaaagccagtacccatagtgtaaaacccacagttaagaaccccttagttgaaggggaaaaactacagaaagtgttagcgcgagccggtcaaggttcacgtcgtgaaatagaagcgatgattgccgaaaatcgtgtcagcgttgatggaaagatcgccactctaggtgatcgtattgatgtacacgctggcgtgaaaatccgtattgatggacatcttattaatttacttcatgcacaaaaagaagtgtgtcgtgtactgatgtattacaaacctgaaggggagttatgtacacgtcatgatcctgaaggaagaccgaccgtatttgaccgtttaccacgtttaaccggttctcgttggattgctgtcggacgcttggatattaatacttcaggattgttgcttttcacgaccgatggcgaattagcgaaccgtttaatgcatccaagtcgagaagtagagcgtgaatattctgtacgtgttttcgggcaagttgatgaagcgatgctacatcgcttaaaaaaaggtgttcaattagaagacggtcctgccaattttaaagagattaaatttgctggtggtgtgggcatgaaccaatggttcgacgtgactttaatggagggacgtaatcgcgaagttcgtcgtctatgggagtcccaaggtgtacaagtgagcagattaattcgtactcgatatggcaatatttctttaatgaaatcgttacctcgaggcggttgggaagaaatggatttaaccaatgtgaattatctaagggaattagttgggttaccagcagaggtggaaacgaaacttgacgtgacaaaacctcgccgtagagcgaaaacaggtcaaattcgtaaggctgtgaagcgttatgctgaattaaataaacgttataaaaaataa

SEQ ID NO: 30875 - DNA, 555 bp, Pasteurella multocida
atggatgcattacaattactgacaacacgacgttcagaaaagaaactgactgcgccggcaccggataaagcacagttagacgtcatttttcaagccgcattaaatgtgcctgatcacggtcgtttatccccttatcgctttattgtgatggaaggtgaagggttaaataaacttgaaatattattaaaagaaacggtgcaagaatttgaattaggcgaagaatttctcaaaaaagcagaaaatttggcaagccgtgcccctatggtgattgcggtgattgcgaaaatcaataaagcgttgcctaaagtccctgcttgggaacaaatgttaagtgcaggttgtgctacttatgcaattcaattggcggctaacgcgcaaggcttcgcaaatgtatggattacgggaaaatgggtgaacggcagtaaattgcgtcacgcctttgattgtgcagaacacgataaagtgattgccttattaatgctaggcagtgcggaagaaaaaatggatagggaaaagaaatcacaagatctttctgagtttgtatcttatctgtaa

SEQ ID NO: 30876 - DNA, 726 bp, Pasteurella multocida
atgttaaaaagattatcattatataccttattgctttgtgttgtccctctttttgcttggatttttacatggcaatggcgtagcgatgatgtgatgacaaattacgactatccactttatttcttaacagaaagtgggagtgtgccttatgcgattattacgtgtgggatttttgccttactttttattcccttattccagacgcgaaaacagtgggtattaggtgtgcttgtcatggcatttgccgtcatccttacgcaaggtatcaaaagcggattaaaaacgcttttttcggagccgcgtccttatattgtttatgtcgcagaagcgagtggtatcagtgttgaacaattttatgcacaagagcgtaaacaacgatcgcattttattgatcagttttatcaaacaaaatcggatacaccaaactggttaaagaaccattatgaaaaagaagtgggctatgcatttccctctggacatacgatttttgcggcaacttggttgatgttagtggtcggttttgtacacttattaagtgtacgttcattaacggcaaaagtacttgtgagtttcacttcactgtgggctgtatttatgctgattagtcgtttacgtttcggaatgcattatccgatagatttatttatcagcacgttaattgcattttttgtacactggggaatttttacgtttttgcaaaaaaaatcgatatttatcaagaaatag

SEQ ID NO: 30877 - DNA, 1302 bp, Pasteurella multocida
atgacaatcaaaaactcttttttggaatatcgtatgacagaattaacacaacaaatagaaaaatcaacatggcattctaaatttgccgctttaggtccggggattttaatggcgtcagctgccgttggtggatcgcatattattgcatctacccagtctggtgcgatttatggctggcaattggccatcattattattttagcgaatttattcaaatatcctttcttccgctttggcgtgcaatacacgctagattcaggggaaactttattgcaaggttatttaagaaaaggcaagctatacatttggatcttctttttacttaatgtgtttgccacagtgattaacaccgcagcggtgggtttgctttgtgcggcgattttgaccttcgtcttacctgttcaagtgcctgtacccacattaagttttattgtgatcggggtgagcacctctatcctgttattaggtaaataccgtttacttgatggcttatctaaattgatcatgattgcgttgacaatcacgacagtgagtgccgtgataattgcattagcacgtaatggcattcaaggtgttgcccccgcagattatgtcagtgccagtccttggaatttagccgcattgggctttattgtggcgctaatggggtggatgccggcaccgattgaaatttcagccatcaattcaatgtgggtgattgcaaaacgccgtgtatcgaaagtgtcttatcaagacggtatttgggattttaacgtaggatatattggtaccgccattttagcgcttgttttcttagcattaggggcgttagttcagcatggctcaagtgaaactgttcaattggtaggtggcaaatacatcgcacaattaattaatatgtatgcttcaacgatcggtgagtgggcaagaggtctgattgcgttcattgcctttatgtgtatgtttggtacaacgatcacggttatcgatggttattcacgcaccaatgttgaaagtttacgtttaattttaggcaagaaagaaagccgtccgagttatttaaatgttgccattacctttgctgctttagcgggactagccattattttctattttaataatgcggtaggtccaatgttgaaatttgcgatgattgcgtcttttgtttcaacccccgtatttgcatatttaaatttatcattggtattaaaaggtgagcatcgtgttaaagggaagttattgtggttatccttaattggcttaatgtatttaacttcatttacgttgctgtttattgctcaacaagcaggctggttgaattaa

SEQ ID NO: 30878 - DNA, 1224 bp, Pasteurella multocida
atgcgagaaaatcaccaaatagcaaatgttgatttagtaaaacaaatgaatagcgctgttgtttataaactgattgatcaacaaggtcccatttctcgtattcaaatttcagaactcagccaattagccccggcgagtgtcactaaaattacacgtcatctgcttgctcgagggttaattaaagaagtggagcaacaggagtctactggtggacgtcgtgccacttcaattgtggcggaacataaagctttccgcacgattttgattcgtttaggtcgtcaacatgcgacttttgctatcatggatttatccacgaagttattaaaaaaagctgtggtggatttacctgaacagcaaagtgttacgagtatagaggcttttctgttacaacatttgacggcatttatggcacaacatcagaaacgaggcagtgagtttatcgcggtggggatcactgtgccgggatttgtcgatgtgaaaacggacatgattcaatatatgccacatcttgatttagacgcgccttgggatctggcgaataaaatctcacaacatacgcagttagccacttttattggacatgatgtgcgcagtttagccttagcggaacattattttggtgtgacgcaagattgttatgattcgttgctattacgtgttcaccgtggcgttggtgctggcattgtgataaatcatgaggtttttttaggttataaaaataatgtcgctgaaattggacatattcaagttgatcctctcggaaaacgttgtttatgtggcaatgtggggtgtttggaaactgtcgtgagcaatacggcgattgagcgcaaaatgcatgagctgttagaagatggctacgagagtaaatggttatcgcttgaatcgcacgatattgaagctatttgtaaggcaagtaataaacaggatacggcggcgattgaactgattgaacacgttggggtgcaaattggacgagtgttggcgatgagtgtgaatatgtttaatcccgagaagatcgtgatttctggtgaaattacacaagctaaaaatatcttgttttcggcaatacaacgttctttagatagccatgcgttgcctgcttttgtcaagaatacaccattggttgcgtcagagctgaagaatgaagatgtcattggggcatttgcgttaattaaacgtgcgttattagatgggagtctgttgcgtcgcttgctagcagactaa

SEQ ID NO: 30879 - DNA, 1305 bp, Pasteurella multocida
atgacgattctagttattggtattaatcataagacagcctctgtcgctatccgtgagaaagtggcgttttctgctgagaaacgggttgaggcattggcgcaaattcagcaacaagcattggctgaaagtgcggtgattttatctacttgtaatcgtactgaagtatattttcatcataaagctattccgcctcaagaggcagaaagttggactgcgcgttgtatgcaatggtttgcagaaatacatcagttatccttagatgcattagcaggctgcctttattcgcaacaaaatcaacaagcagttttacatttaatgcgtgttgcctgtggattggattcgttggtattgggagaaccgcaaattttagggcaagtgaaagacgcctatcaattgagtaaaatgtattatcaagggcaaaatcaacctctttccagtgagttttcccgtttgtttcaaaaaacgttttctgtcgcaaaacgagttcgaaccgaaacgaacattggtggcaatgcggtgtctgtagcctatggtgcatgcagtttagcgcgccaaatttttgattcactcaaaacattaaatgtgcttttagtcggcgcaggggagaccatcgaactgacttgtcgacatttgttacgccatggtgtacaacgaattatgattgcaaaccggacatttgaacgcgcgcaacatttagtgactaaattagatggtgcagaaaatgtgcaagttttggcgctcacacagttacaagaaggcttaaatcaagcggatattgtgatcagctcaacaggaagtccgacaatcttgattactcaagatatggtcaagattgcacaaaaagcacgctgtgacctaccaatgctgttggtggacattgcggtaccacgtgatattgaagaaagtgtcggtgagctagacagtatttatcattacacagtagatgatttacagacaattattcaacgcaatctggtagaaagagagaaagcgtcggcacaagcgtgggtgattattcaacaagaatgcgcagatttctttgaatggttaaaagtgcatcagttttcaaatttaatccgttcttaccgagaaaatgcagaagatattcgtcaaatactattagaaaaggcattgcttgcgttacgtcaaggtgaagatagtgaagccgtattacaagcactgagttataaattgacaaataaacttttacattcacctacacaagtgatgaatgcgatggtcaaaacaggtaattcaacgggattagcactgttttcttcaactttaaagtccgacgtggagtag

SEQ ID NO: 30880 - DNA, 414 bp, Pasteurella multocida
atgcaaaattggacaactgaaatgtggcaagcagcgggtattggcttagttattgggttgatcctaggttacttattcttacgtcttactaaaggttcggtgaaaaaacaacttcaaacggaaactgaattacagaaagtcaaaaatcaattagataaccaaaaacaacagcttgaaaaacacttttcagaaagtgccgaacttttgaaaaacattgcgcaagattatcaaaagctgtataagcatttagccacctcctcaaccacattattgccagaattaaccaataaaccgttattctcatcacatttaattacgactgaacatgtggatagacatgaccagcgaaataaagatgaccaccgtagagattattgtgaaggttcatctggtttactaaggaacgataaatag

SEQ ID NO: 30881 - DNA, 1962 bp, Pasteurella multocida
atgccgcataattcgatgttaaaagaaaatcgtcttttcaaaccaacagatgaatttcgtcgccaagccaatatttcgggcttagaaacctatcaagcgctttgggaatttgctgacaaagattatctcacctattggagtgatctggcgcgtgaattaatcacttggaaaaagccttttatgcacatctttgatgattcagaagcgcctttctataaatggttttccgatggcactttaaatgtgtcctataactgtttagatcgccacttaccagacaaagcagataaaaccgcgctgatttttgaatcagattttggtcaagtccaactctatacttatgccaaattacataatcgcgtttgccgttttgctaatgcattgcgtgaattagggatcaaaaaaggggatcgggtcattatttatttacccatgctcgtggaagctgtgattgcgatgcaagcctgtgcccgtatcggtgcggttcattcagtggtatttggtggtttttctgccagcgcactacgtgatcggattgaagatgctgaagccaaattagtgattaccgcgaatgctggattacgtggtggtaaaattattccacttaaagagaccgtggatgaagctttagaaatgggctgtaaaacaattgaaaatgttatcgtctttcaccgagtgaatattgataccccgtggaaaaaagggcgtgatctctggtggaatgaacttactgcaaaccaacccgctttctgtgagccagaatggatgaatgcggaagacccgctatttattttatacacctcgggatcaacgggtaaaccgaaaggcattgtacacagtaccggtggttatttattaggtgcattaaattcgtttcgcaatgtgtttgataataagccaaatgatattttctggtgtacggcagatgttggctggatcacgggacattcttatgtctgctatggtccgctcgccaatggcgcaacacaggtaatttttgaaggcgtaccgacttatccagatccgggacggatttggcgaatgatacaacgtcacaaaattaatgtattttacacttcaccgactttaattcgttcattgacacgcttaggcgaccatatccccaataagtatgatttatcttcactacgcttacttggcagcgtgggcgaaccaattaacccatcggcttggatgtggttttatgaagtggttggtaaaagtcgctgtccaattgttgatacctggtggcaaacagaaaccggctcgattatgctcgcaccgatacccggcgtaaccgcaaccaaaccaggttcttgtaccctaccattaccgggtattatggctgaggtgttagatgaaaatggtcaaaaatgtgcggtagaacaaggcggtgcgctcgctattaaacgtccattcccatcgatgttacgcacaatttggaatgatcctgaacgttataaatctacctatttccctgcggaatatggcggcaaatactacatcgcaggcgataatgcccatcgcgataaagacgggtatttttggattcttggacgcacagatgatgtgcttaatgtctcaggacatcgacttggtaccatggaaattgaatctgcgctcgtcgccagtccaaaagtggctgaagcggcagtggtcggtaagccagatgagatcaaaggggaagcaattgttgctttcgtagtgctgaatgatttccgtccagaaggtgaagaagcacgtcagctggcagaagaactcaaagcctgggtatccaatgaaattggtaaaattgcccgtcctgaagatatccgctttgccgataacttaccaaaaacacgctcaggcaagattatgcgtcgtttattgcgatctatcgccaaaaacgaaatgatcacacaagatatttccaccttagaaaatccacagatcatcggtcaattacaacaacaatggctttaa

SEQ ID NO: 30882 - DNA, 1221 bp, Pasteurella multocida
atgttgcctcttgaacaagcactgactcaaatgctcgctatgttgccaacaccagattgtgcgcaagccgaacaactcccccttcaacatgcggtgaatcgcatttgtgctgaggatatcatttccccgcttaatgtgccctcatttgataactcggcgatggacggctatgcggtgcggctggcagatttagcacaaaatttaactctcacggtcgcaggaaagtcctttgcgggcgcaccttttgacggggaatggcaaacacaaagcacggtcagaattatgacaggagcaatgttgccggtgggtgcggatgcggtggtgatgcaagaagacgtgatcgtcaatgaggatggtacagtcactttccctgaaaagattaaagctggtcaaaatattcgctacattggcgaagatgtcaaacaaggtgaagtggtattgaataaaggaagcctgttaaatgcagtttccttacccttactcgcctcattaggcatagataacgtaaaggtctttccacgtttgaaagtagctgtgctttcgactggtgacgaacttgtgccggtaggacaaccgctgaaagaaggtcaaatttacgacactaaccgtttcacgattcaattgttactggaaaagctcaattgtgagattctggatttcggtttattaccagataacgagcaagaatttgaaaaagcctttattgaggctcaacagcaagcggacttggtgatcacaagcggtggcgtttctgtgggtgaagcagattttaccaaaaaagtgcttgaaaaagtcggtcaagtgaatttctggaaaattgcgatgaagccgggtaagccttttgcctttggtcgattaaaaaacgcctggttctgtggtttaccgggtaatcctgtgtcggcattggcaactttttatcaattagtacaaccggtgattgccaaattaagtggttatagccagtggaaagcgccgcaacgcttgacagccattgcagcaaccaagatgaaaaaagcaccggggcgtttagatttccaacgtggtttctatcaagtgaatgcccaagggcaaattgaggtgcaacccgttggttttcaaggatcacatctttttagctcttttgtgaaaagtaactgctttattgtgctagagcgtgaacgtggcaatgtggaagcgggtgaaacggtcacaatcgagccatttaaccatctaatgagttaa

SEQ ID NO: 30883 - DNA, 717 bp, Pasteurella multocida
atgactgaattaagttatcaagaagaattacgttataaccgtcaaattatgctcaaggcggtagattttgaggggcaagaaaccctcaaacaaagcaaaatgctgattgttggcttaggcggtttaggctgtgcggccagccaatatttaacgacagctggtgtggggcatctcactttgttggattttgatacggtgtcgctgtcgaacctacaacgccaggtgttgcacgatgacagccgtttagcgatgccgaaagtcgattcggcaaaactgtcgttgcaacgcttaaatccacatattcagattgacactatcaatgccaaactctcaacagaaaaactggctgaaatcataccgcactttgatgtgattttagattgcaccgacaatatagaaattcgtaatcagcttgatcaggtctgccaacaagcgaaagtgccgttagtctctggagcggcgatccgcctagaagggcaagtaacggtatttacttatcaagaaaatacgccaacctatcgtacattaagtcaattatttggcgagaatacgctaagttgcgtcgaggcgggtgtattagcgcccattgtgggcattgttggttctattcaagcgctagaggcaattaaagtgcggttaaatatcggtaagaatttatgtggcagattactgatgattgatgggatgacgatgaatgtgagagagatcaaattttag

SEQ ID NO: 30884 - DNA, 444 bp, Pasteurella multocida
atgtatttttttatttttttaaaaaaaggtcagcattatttaaaaagttggccattggaaagtaagctaggtatgatttttcccgaaaaccgcgtgattaaagcaacgcttttcgcgcaaaagtttatgccttttttagctgtttttgccatcacttggcaacaagtttacgccaaatccgatatcagtgcattagccattgctgtatttagcgcgattgttgcgctgttaattccgttgcaaggtttgtattggttaggtaaacgttctatcacgcccttatccccacaaagtgcggtctggttttatgaaatttgtgagcgcttaaagcaagtaaacgaaactttacctatcttaacagagcagccgaattatcaaaatttagctgatgtcctgaaaaaagcacagcgaaaattagataaagctttttggcaagaattataa

SEQ ID NO: 30885 - DNA, 2139 bp, Pasteurella multocida
atgtcacgtacaattatccttatcccgattagtgctggtgtaggcttaaccagtgtcagcttaggtttaacacatgcactggagcaaaaaggggcgaaagtcggctttatgaaaccaatttctcagccgaactcaggtgaagatatgattgatcgcacaacatcaattattcgcaccagtaccaccattgaaaccagtgaaccgtttatgttaagtgtagcggaatcactaatcggtcaaaatcaatctgatgtggtactagaaaaaattgttgaaaatcatcaacaactcgccaaaaacaatgaaattgtcgtggtggaaggtttaatccctacgcgtaagcattcttatgccaatagcattaactatgaaattgctcaagcacttgatgcagaaatcattcttgttgcagcaccagcgacggaaacaccagcagaactcaaagaacgcatcaaagccgcagcctcattatttggcagcaaaaataaccctaatttacttggtgttgtgatcaataaatttaatgcgccgattgatgaatctggtcgtactcgccctgacttggcagaaatttttgattctttccaacacacacaaaatcaagtatctgagatttatcatttatttgagaaaagcccaattaaaatcttggcatgtattccttggagcgcagaattaattgcgactcgtgccattgatttagccaaacatttaggtgctgccattattcatgaaggcgctatcaatgaacgtcgcattcgtggcatcactttctgtgcacgtaatttgaccaatatggtggaacatttccgtgttggaagtttacttgtcacttccgcagatcgtcctgatgtgatcgtcgcagcggcattatctgccatgaatggcgttgaaattgcaggtgttttattaaccggtggttacaaaattgatgcacaaatcaagaaactctgtcaacacgcgatcgaaagtacaggtttaccagtcttccgtgtcgaaggcaacacttggcaaactgcactggcactacaaagttttaacctcgaagtgcctgttgatgataaagaacgtatcgaaaaaattaaacattatattagcgacctactcgacagcaattttatcgattcattagcggcggcctcttctcgtttacgtcgtttatcgccacctgctttccgtttccaattaaccgaattagcacgtcaagcgcaaaaacgcattgtattgcctgaaggggatgaaccacgtacagtaaaagctgctgccttatgtgcagagcgtggtatcgctgaatgtgtgttattagctacaccagaatccgtcatgcgtgttgccgaagcacaaggcatacaattaggcaaagggattacgattattgatcctgctacagtgcgtgaaaactatgttgcacgtttagtggaattgcgtaaaaacaaaggcatgaccgaagattctgcacgtgaacaattagaagacaatgtggtacttggtacaatgatgttagaagcgaacgaagtagatggtttagtctctggtgccgtacatacgacagccaatactattcgtccgccgatgcaaatcatcaaaactgcaccgggtaattcgattgtgtcttcaatcttcttcatgttattacctgatcaagtcttggtttatggtgactgcgcagtcaacccagatccaacagcagaacaattagcagaaatcgcgattcaatccgcagactcagccaaagcctttggtattgatccaaaagtggcgatgatctcttactcaactggtacttctggtagtggtgcagatgtagagaaagtgaaagaagccactcgtctggcacaagaaaaacgtccagatttaatcatcgacggtccattacaatatgatgcggcagtgatggaagatgtagcgcgttctaaagcaccaaattcaccagtggcaggtaaagcgacggtctttattttccctgatttgaataccggtaataccacttataaagcggtacaacgctctgctgaccttgtgtctattggaccgatgttacaaggtatgcgtaaaccagtgaatgatttatcacgtggtgcgttagtggacgatatcgtgtacacaattgccttaactgcaattcaagcaacacaataa

SEQ ID NO: 30886 - DNA, 8139 bp, Pasteurella multocida
atgaataaggtttaccgtgttatatggagccacgtcactaatacttttattgcagtctcagagcttgcaacctcgaaaggtaaagtaaagtcttttagcgctatttcttccaatccacaaccagaattgaatagcagtatccctgctacattcaaattaagtgcgattgcactcgtttctattttagcattcgcaccatctcaagtattggcacaagatgttaacgcaactaatttgacagttagtggaacatctacttttactggtgcggctacgtttaataatacagccacatttaataacatggtgacagcagggaatgttactgcaactacgttaacagttggtggaaaaaatgttgcaacgaaagatgatgtgacaacattaacaactacggtgaatcaaaaagcagctcaatcagaagttgataacttaaaaaatactaaagcagataagtctgatgttgataacttaaaaaatactaaagcagctcagtcagaagttgataacttaaaaaatactaaagcagataagtctgatgttgataatttgaaaaacattaaagcagataaatctgaggttaatgaattaaaaaatagcaaagcagataaatccgagttaactaaactcagtaaccttgttacatctttaggtgtaccagaaggcacaacaacgtatacagggattaaatattttcgtgttaaatcaacccttgatgatgcagttgctgacggacaagattccgttgctattggtccaaaagccaaaacagaaggcgttgatgctgttgctttaggtcatgacagtacagccaatgcaacagaatctattgcaattggtaaaaaagcttatgcggttaaaactgcaaataaaggtatcgcgattggtgaacatgctcgtgtaggttctaaacaagatggtgatgtggtttatgatggcgcatcttcttatgttctaggacctaaagatggagaaagttctgtcgcgattggtgataaagctgttagccgaggtgaagcaagtattgcgattggtaaaaatgcgatcacctcaaataaagatgccaagtcacaaattgctaaaaataatattgcattaggtacaaatgcacaagctattgcaagtgataattctattgctttggggaatgcggcaagaacaaataaagactcagattcatctattgcaattggtgatagtgcagaaactaaagccgcacactctttagcagtggggacaacctctaaagcgctcgctgaagcagcacttgcattaggtaaacttgctgaggcaaaaggtacatcttcagttgcaatgggtaacacctcaaaagcagatggctcaaattcagtggcagtcggcaatactagccaaacattacagagtaatacgattgcgattggctcatctgctattgctaatccagaacgtacaatttctattggcttaaatgcaggtaaaggacaagaagccgatgcaacagggactaaacactctcaaattaatattggggagaactctggtgaaggtgttattggtcaattaaatattggtattggtgctcatgctggaacaaatgttgttggtaaacataatattgcattgggtacttatgcaggtacgaatttaaaaaattctgaagaaacatcaggtgctaacgtttctattggtcatgaagcaaataaatatgatcaattgactgctgtacaaaagtcaactgtagttggtgcacaaactaaagcagcttctcgctccacagcattaggtgctgaagcaacagctttagggttagatgcggttgcagtaggtattacttcaaaagcagagggtgataaatctgttgcgattggtgcgaactctacagccgactcaaacaatgtggcgttaggagcgacatcacgtgctgtagcaaaagaagggagtggctatttaactggtaagcaatcttcattagttgtttctgttggtcatcaggatggtgcagcagatcaacatattttacgtcgtcttgtgaatgttgctgatggtgtggatgaacaagatgcagcaactgtagcgcaactgaaaaaagtcactgaaaaagtaacgagtgatttacaagcacaatttaatgcgttatctcatgcgccaaccgcttctgaaattaaatacgatacagtaccaccatctccaacaacaggagcagaaaataagattacattaaaagcgaaaacacgtatttctaatgtggctcccgctgaacttgatacagatgcggtgaatttaggtcaagtaaatcacattgtgactaaaaataaagcgcattattttagtgtgaatgatacgggtataaatcctgtccctggtaaccatgataatgatggtgcaactgctaaattagcaatggcaattggacaaaatgctgctgcaaaagcagagcgcagcgttgcaattggtaacaatacgacagtaaatggcgaaggttctattggtttagggacgtactataaaggtagcgctgaattagacgatggcgtaccaagagaaagcgaaactacagttacaaaaccatccaagaatgtgaaatatggtattgcaattggtgcggggacaactaccgatggtaataactctattgcgattggtagtttagctgcaacctctgataaaaatcctggtgcaaatgtagatagagcgatcgctattggttataacgcagtgtcttcagcagaaaaagcaaatgcaatcggtgatcgtgcagtcgctaactcagtaaaaggcaatgcgtttggtagtcaggcattatcaggcgctgaatcttctactgcaattggtactgaatcgaaatctgaaggtcagaatgcttatgcacttggtacaaaatcacatgcaaaaggtttaaattctattgcttttggtactaatcaagtagtgagtggacaaaattcaggtagtattggttatgcaggtgaattaggtaatgcgaaggcgacagtaatcaatggtgaaggtacttattctttaggtaataccaacagtacattaactgctaatgaaagtggtattttcggtaatagtaatgaaatcaaagctaaggaaaatgcgcgtattgtcggtaacaagaacaccattggtgcaattgaagaaaaacctcatgtacctggcacaccaccagctgcaccagttaatgatctaaaagacatttatgtgacaggttatgataacaaaatcagtagtgataaaaagctagcgaaagatttaagtggattgtttgtctatggtcacggtaataatattgctcaattaccagatcctgattcaacagaagaatttacattaactgactcatcggttattggagcgaataacaccttaaatacaaaagggaaaaattattttgttttaggtaataatgtcactgcaacattagaaaattctgtgtatttaggtgccgattctgcttatacaacgggtaattcgacttctagtatgaattcttatgctgatatggcaaatgggttaaataaatcaggttatacctttgctggttcgcagccagttggtgtggtcactgttggtgcggttggtaaagagcgtcgtgtacaaaatgtggcttctggtttagtgacagaagcgagtaccgatgcaatcaatggtagccagttatttgcgttgactcgtccattgcgttttgcgggtgataactcgacattaagtaatccaaatggcaaacctggtactgatgtgacagtgatttcgcgcagttcaaaccaaggtatgaaagttgttggtggtgagaatgatggaaataaacttacaactatcgcagataaaaatatcggtgtcattgctaacggtgatcacacgttagaagtaagattagcgaaaacactttctaacttgaaagatgcaacatttggtactggaacagataaaacaactatcaataaagacggtatgaccattactaatggtgctaacacagtaagcttaaccgaaggtggtttaaacaacggcggtaataaaattactaatgttgcagctggtcagaatgagactgatgcggtgaacgtaaaacagttaaacgatcttaaagcagaaggctttggcttaactggtgaagatggccaaacagttaaacaagctttaggtacggcaattaaagttactggtgatgataatgtgaaaaccaaaatcgtaacagacgctgatggtagtaagaagttagaaattggtttagaaaatcaagttacacttggtggagaggctaagaatggtaacccagcagcagatggtaagttaacactaaaaaatcaagcaggtacagacaaagtcgtacttgatggtgcaaatggaacagtgggcttgactggtgctgatggtgcacaagcagtgattaccgttaagaaaggtcgtcctacattagataatgcagcagagactccacgtattgcttatggtaatgaagaagttgcgactttaaacgatggtttaaaatttggtgcgaatgctggtgatgttcacaatgcaaaattaaatacacaagtagatgtgaagggagctacggcaaatacagtatgggataacttcgataaaggccagaatattatgactcgcgtcgaagggaatactattacagttgcgttagccaaagcattatcaggcttaactagtgcaacctttggtgatcctgctagtaatcctaaagatagtacagttatcaataaagatggcttaactattactcaaggtgataatacagtcagcttaactgatgatggtttagacaatggtaacaagcaaatcaagaatgttgccagtggtttaaccacaactaatggtactgcaacaacctctttagatgatgctgtccaaactaatggtgtcaatgtaggcgacttaaaaacagctattaataatattactaatggtactaacccattaggtggtttcggcttaaaagataaggcgggcaatacctttaaacaaaacttaggtgaaactgcgcaaattactggtgattcaaatgtgaataccaaagtagttgatggtcaaaatggtggtaaagcgcttgaagtcagcttagctaaccaattaactttaggtaaaggtcctgaggctaatgtacctaacgcaactggtgaggcaggtaagatcaccttaaaagatgataaaggtacagatcgtgttgtagttgatggtagcgaaggcgctatctcgttaacgggtcagcctgctacacaaggtgcagcagcaccaacagcaaaaattaaagtagctgaaggaaatcctgatttagaaaatacatcagatgatcctgctaatccaaatcagaataagaaaacgcgtattacttatgatatcgcaggtccaaatggaacaactgtgactgaacaattagctacgcttaacgatggcttaaaattcggtgcgaatacaggtgatgtacatgacgccaaacttaatacacgtgtcgatgtaaaaggtaaagctgaaaataccaactgggctaactttgatgcgggtcagaatattatgactcaaatcagtggtaatacgattactgttgccttggcgaaagccttagctgggttagacagtgcaacatttggtaaccctgctgatggaagtaaagatggtgctgtcattaataaagatggtttaactattaccgaaggtgacaaaactgttaaattaactgaaaaagggttagataacggtggtaaccaaattatcaacgttgatagcggtctgaaaaaaacagatggtagtgtcgtagcgttgaaagatgcagaaggtagtgtgttaaccaatggtgtcaatgtaggtgatttgaaaaatgctattaaggatgttacttcagcaacaaacggtggctttggcttaaaagataaagctggtgctgagtttaagcaagatttaggcactacagcacagatcactggtgataaaaatatcaatacgaaagtgattgatgttcctaatagtaatgataaagcgttagaaattagtttagctaatgatattactttaggtaaaaatggcgcagatggtgttgatggttctctcggtgtgaacggtaaagatggtgcaagtgttgtcttgaatggtaaagatggctcaattggtttaactggacctcgaggtcaagatgggtctgatggtaaatctgccactattagtgtgaaagatggcaaagctggtgttgatggtaaagacggcgatactaagacacgtattgtttatgaaactaaagatgctacaggtaaaccagttgtagaagaagtcgctactttaaacgatggtatgaagtttgtcggtaacgatggtaaagaagtcactcgtaaactgaatgaaacattagatattaaaggtggattagatgcagcaactgttgcagataatgcgaaagtttcttctagtaatttaggtgtgaaaaccaatgcggaaggcactggtttagaaatcgtaatgaaagagcgtccaacattctccggtcttgttgtcaatggtaaggatggtgaggatgccgctgttaagtttgcgaaagacggtaaagatggtatgtctattgccgcagtaactgataatgatggtaatgctactggcttaactatcaaggataaagatggtaatccaggtgtgactttcaacaatgatggtcgtattaccaatgttacagcgggtgttgatgataaagatgctgtaaatgtgagccaattaaaagatggacttgcaaaagcaaccacaaaagttgaagcaggcaaaaatatgacggtaacgccaactgtaaatcaggatggtagtacgacttatactgtagcaacagaagacaatgtgaactttacaacggtcacaaccggtaacacagtcatgaacaatgatggtgtgaaagtcggtgataatgttgcactcactaacgaaggcttaaaagcaggtgatgtgacagtgacgacagcaggtattaatgctggtaataagaaagtgactggggttgcagatggcgatatttcaccaaatagcacagatgcagtaaacggtagtcagttgaacgcagttaaagaaacagctgaagcaggctggcatttaaccgcaaatggtgcagattcatctaatgtgaaaccaagaaataccgtggatctgaacaataccgatggcaatatcgtgatcagcaaaacaaacactgcggataaacataatgtcacatttggtctagcagataacattaatgtaaaagattctgttgttgttggtccaaaaggtgcaaatggtaaaccaggtgaaggcgcggttgttatcaatgcggaagatggtgctaatggtaaagatggcattagtattgtgggcaaagatggcaaagatgcggtagcgatcagcggtaaagatggtgttggtacgattggcttaacaggtcctgcgggggctgatggtaaaaatgcaaatgcgatcattggcgtgaacgatagcgtgaaaggcttagatggcaatgatggtaaagacggtaatagtaaaacacgtatcgtttataccaaacctaatggtgaagaagagcaagttgcaaccatgaacgacggtttagtgtttggtgcggataaaggtactgaacataaagcgaagcttggtaccactgtgaaagtgaaaggtgacgataagaatatcgaaactgaagttgcaggggatacaattcgtgtcagattgaaagacaatattgatgtgaaaggtatcaacgtgacggagaacttgacggtgaaagaaggcgcgaaaatcaacatgggtaacaacgtgattgacggtgtggctgatggtgaagtaaatgcaaccagtaaacaagctgtgaatggtagccagttacataaagttcaacaacaagtgaataaccaagccactgcgattaataagttaggtgatcatatcaataaagtggataaagatctccgtgccggtatcgcgggtgccacagcggttgcgttcttacagcgtccaaatgaagcaggtaagagcattgtttctcttggtgtaggttcttatcgtagtgaatctgctattgcagttggttatgcaagaaactcagataacaataagatctcaatcaaacttggtggtggtatgaacagccgtggtgatgtgaacttcggtggtagtatcggttatcaatggtaa

SEQ ID NO: 30887 - DNA, 1464 bp, Pasteurella multocida
atgtataaaatatcttctttttttactgccacgcttttacgccttttcaaacgaacgatacttatatgtagtttactcgtcagtcatttcagttatgctgagattgatcttgctgaaatcaacgctcatttacccgaagggaccagcctaggttttgtggctaaaaacttaaatcgtaatgaaaaaattgtagaacaccaagccagtacttttatgttacccgccagtacacaaaaagtgctcaccgccttaaccgccaaactcgtactcagtgaccaatttcaatttgaaaccagtctattaaccaatggaaaaataaaaaacaatgaaatgcatggtgatctcatcgtacgttttacaggtgaccccgatctcaccagtggtcagctttaccaacttttcgcccaattaaaaaaacagcgtatccaaaaaatcagtggtgatattattttagatacctcagtatttagcagtcatgatcgtggtttaggttggatctggaatgacttaaccatgtgtttcaatgcaccgcctgctgcggtaaacattgataataactgtttttatgttgagttagatgcgaattatgcaccgggtgagcaagcgaagatccatgttcctgcgcaatatcctgtacaggtttttggtcaagtctatatttcaacgcctaaagaggctgggtattgccaacttgatgccaccgtacttgataataatcgttaccagttaaaaggatgcttagcacgccaaaacaaaccctttggtctgagttttgcgatccaagatccgaatgcctatgcggcaaccattattcagcgacacctcaaaaaattaggaatcgcttttaatggtaaaatcaaacagccttatcaggcgcaaaaaggacaattattagcacagcatctctctaagcccttacctgatttaatcaaaaaaatgatgaaaaaatcagataaccaaattgccgatgccttattccgtactatcgcttatcaatattatcagcgccccgcttcatttcctttggctagccaagccatgcgacagattttacaaaccaaagcaggaattaaatttggtcatgccattattgcagatggctccggcttatcacgtcataatttactctctgctgacattttattacaagcattggaatacattgcaaaacatgaagcacagttacagctcatggatacttttccaattgcggctgtggatggcacattaacgggacgaggttctctcattcatgaacccttagcgaaaaatttaattgccaaaacaggcgctctcaaaggtgtgtataatctcgccggctttatgaccaataaaaaaggggaaaaagttgcttttgtgcaatttattaatggctattctactggcgactttgagcgcaaaacaaaacgggcgcctttagttcaatttgaaagccaaatctacaatcgcctttatgaacactaa

SEQ ID NO: 30888 - DNA, 2271 bp, Pasteurella multocida
atgaacaaagcattgatggtcaccaaacgtgacggacaccttgaaccaattgatctggataaaattcaccgtgtgattacatgggcggcagaaggcttagataacgtttctgtttctcaagtggaattacgttcacatattcaattctatgaaggtatccgtacatctgatatccatgaaaccatcattaaagctgctgcagacttgatcagtaaagatagcccagattatcaatatcttgctgcccgtttagccgttttccatttgcgtaaaaaagcctatggtcattttgatcccccccgtttatacgatcacgtaaaaaaattggtacgcatgggaaaatacgatcccgcccttttagtcgattatacccgtgaagaatgggatgaaatggattcttatttagatcattggcgtgatatgaccttttcatacgcggcggtgaagcagttagaagggaaatacttagtacaaaatcgtgtcacaggtgagatttatgaatccgcacaatttctttatttactggtagcggcgagcttattttcgaaataccccactgaaacccgtttaagttatattcgtcgtttctatgatgcgacctcaacttttaaaatctcgctgccaacaccgattatggcaggggtacgtacaccaacccgtcaatttagctcctgtgttttaattgaatgtggcgacagcttagactcaattaatgcaaccgcctctgctattgtgaaatatgtttctcaacgcgcggggattggcgtcaatgcgggtgctattcgtgccttaggcagtccaattcggggcggtgaggcattccataccggttgtatcccgttctataaatatttccaaacagccgtcaaatcttgttcacaaggtggggtgcgtggcggtgctgccacggtttactacccgatttggcatttagaagtggaaagtttattagtattaaaaaataaccgaggtgttgaagataaccgcgtacgccacatggattacggggtgcagctaaataaattaatgtatcaacgtttaattaaaggcggtgatattactttatttagcccgtctgatgtgccgggattgtatgaagccttctttgctgatcaagataaatttgaacaactttatttgcaatatgagcaagatccaactattcgtcaacgcagcgtaaaagccgttgagctgttctcattattgatgcaagaacgcgcatcaacgggacgaatctatattcaaaatgtggaccactgtaatacccactccccgtttgatccgaaagtggcgcctgtccgtcaatctaacttatgtttagaaattgcgttaccgaccaagccattgcaacatttccatgatgaaaaaggtgaaattgcgttatgtaccctttctgcgttcaatttgggtacccttgaaaatcttgatgagttagaaggcttagctgatttagcagtacgtgcgttagatgccctattagattaccaagactacccggtgatcgcagcgaagaaaagttcacttgcacgtcgctcattaggcattggcgtaatcaactatgcgtattatttagcgaagaatggcgtgcgttattctgacagcagtgccaacgatttaacccaccgcacttttgaagcgatccaatactacttattgaaagcatcaatgaacttagccaaagaaattggtccatgtgaatatttcaatgaaaccacttattcacaaggaattttaccaatcgatacctataaaaaagacattgataacttgaccaaagagccactgcactacgattgggagaccttacgtaaagaaatccaagaatttggtttacgtaactcgacgttaacagcattaatgccttctgaaacctcatcgcaaatttcaaatgcaacaaatggtattgaaccaccacgtggtcatgtcagtgtgaaagcctcaaaagatggtatcttaaaacaagtggtgccggaatatgaaaccttaggtgaaaactatgagttgttatgggatctcccaaataatgatggttatctgcacttagtggggattatgcaaaaattcgttgaccaagcgatttcggcaaacaccaactatgacccacagcgttttgaagacggcaaggtgccaatgaaacgcttactgggtgatttattaactgcctataaatacggcttaaaaaccttgtactaccaaaatacccgcgatggtgctgaagatgtgcaagaagatattgatgatggctgttcaggtggtgcatgtaaaatctaa

SEQ ID NO: 30889 - DNA, 1131 bp, Pasteurella multocida
atggcctatactaccttttcgcaaaacaaaaacgatcaattaaaagagccaatgttctttggtcaaaatgttaacgttgctcgttatgaccaacaaaaatatgaaacttttgagaaattgattgaaaaacaactttcgttcttctggcgtcctgaagaagtcgatgtgtcacaagaccgtatcgattaccaagcgttaccagaacacgaaaaacatatttttatcagtaacttaaaataccaaaccttattagattccattcaaggtcgcagtccaaacgtggcgctcttaccacttgtgtctatccctgaattagaaacttggatcgaaacttggactttctctgaaaccattcactcgcgttcttatacccatattatccgtaacattgtgaacgatccttccgtgatttttgatgatatcgtgaccaatgaagaaattatcaaacgcgccaaagatatttctgcttattatgatgatttaattcgtgactcacagctttatactttatatggtgaaggcacttacaatgttgatggtcaagattgtgtggtcacattacgtaatttgaaaagacaactttacttatgcttaatgagtgtcaatgcgctagaagcgatccgtttctacgtgtcttttgcttgttctttcgcctttgctgaacgcaaattgatggaagggaatgcaaaaatcattaaatttatcgcacgtgatgaagctttacacttaaccggtacacaacatatcctcaacattatggcatccggtcaagatgatccagaaatggcagagatcgtggaagaatgtaaacaagaagcttacgatttgtttgttgctgcggcagagcaagaaaaagaatgggctgattatttgttcaaagatggctcaatgattggcttgaaccgcgatattttagtgcaatatgtggaatatattaccaatatccggatgcaagcagtcggtctcccactgcctttccaggcacgctctaatccaatcccttggattaatgcttggttagtgtcggataatgtacaagtcgccccacaagaagtcgaagtcagctcttatttagttggtcaaattgactcaaaagtcgataccaaagactttggcgattttgatctctaa

SEQ ID NO: 30890 - DNA, 249 bp, Pasteurella multocida
atgaaaattcatttaatccatagccaaatgactctcgactacgataatcaaacttctcttctttctcatttagaaaatcacgggattcatcacgagtatcaatgtcgctcgggttattgtggttcctgtcgtgtcaaaattagcaaaggcaaggtatcttataaagaaccgccccttgcctttgtacaacccaacgagattttactttgttgctgtcaggttgatgaagatttagacatcgagatgtaa

SEQ ID NO: 30891 - DNA, 1050 bp, Pasteurella multocida
atgatcattcgtgaaatcgtggtggaaccgcaagctattgcatggttaccttgggcggtgagctatttcttttttattggtctcgccttttctagtgtatttgttggcttactcattcataaaatggagaaaaatgtccagcatgaattcattgccatcatcgttgcgctaagttgtgcgattgtggcaccgatcgccttaaccgcggatttacaccaacctagtcggattgtaaatttctatttacaccttaccccttggtcttggatggcatggggtgcgattttcttacctttatttacgcttgctgtagtagggtattttttatgcttattgcgtcaagctattccacaacagcatttacctcggtttttgcattttctctattggggacagttgaatctccctcgttggacaactttcttccgagtgtttgcgtttctctctgctttatccattttgatttataccactatggaagtgtttgtggttgaggcccgtcctttatggcatcaatcttggcttatgccgttgattttatttagtgtttttccaagcacattactgctttgtcgctttttgattgcggtgtttagccaacggaaaattgcaggatatctttcaacgctgaccttcatcagtttgatgttatttattggaacattgttgggggtgtatttttcttcagaacagaccgcacttcaactgacacagctgtggcaagtgagtgatctgccgatgcttgttctagttgtgcttgggggattgctgttaggtacttatctgactgcatcattatggttacagggcatgatggtattgctcgccttgttattgacttgggtcgttcgttggatcttattgatcgaagtacaacgtcttgctaaatacaatgcgttaatcaacccatatgaattaacttggcatatcgacggtgcgattggcatcctgtcggtatttagcttatggctatgtattagtatcgtactttggtgggtattttctgctgcattagcaccacttcatttgactgggggaaaccatgaataa

SEQ ID NO: 30892 - DNA, 813 bp, Pasteurella multocida
atgacattacgtgtggcaatcgtcggtgctggcggcagaatggggcgccaattgattcaagcggtaagtgaaacggagggggtcgtcttaggggctgcctttgaacgtcaaggttcatctttattaggggcagatgccggagaattagccaatgtgggtcatcttggtgtacagattaccgatgatttagccagccaacaagaccagtttgatctcttgattgattttactcgtccagagggaactttagcgcatcttgcattttgtgtggcacagcataaaaatatggtaattggtacaacaggctttgatgatgacggaaaagcgaaaattcagcaagctgcagacagtattggcattgtgttcgcatctaattttagcgtaggagtgaatttggtgttcaagttgttagaaaaagccgccaaagtcatgggcgattattgtgatattgaaattattgaagcccaccatcgtcataaggtggatgcgccttcagggaccgcgttatcgatgggagaacatattgcaaaaacgctaggacgggatctgaaaacacatggcgtatttacccgtgacggtattacgggtgaacgtaaacgggatgagattggctttgccacaatacgggcaagtgatgttgtcggtgagcacagtgtgtggtttgcggacattggtgagcgtgttgaaattgctcataaagccacaagtcgcatgacctttgccaaaggagcagtacgtgcagcgaagtggcttgcacaaaaagaaaaggggctatttgatatgaccgatgtgctcgatttaaatcagctttaa

SEQ ID NO: 30893 - DNA, 993 bp, Pasteurella multocida
atgagtcatggcgaatttgacataattcaacgttatttcaccgcgtcaaaacgcaccgcgcgtaaagatgtgattttgtctattggggacgattgtgccattacagaattacgtcaaaatcaacgtttagtcattacaaccgatactatggtagaaaatacacattttctaccgagtatgcatgcagcagatttagcttataaagccgctgtcacgaatttaagtgatcttgctgccatgggcgctgagccggcttgggtttcgttggcgttaactttacccgatgtcgatgctcagtggttaagtgattttagtcaaagtttttttgatgtgttagatcactataatgtggatttaatcggtggagataccacgaaaggtcccttgtctgtgacgataaccgcacatggcattattccgaaaggaaaaggtttatgtcgtcatagtgcgagcgtgggggattggatctatgtttccggtaccttaggtgacagtgcagcaggtttatcgttattgttaagtcagcagacaccacttaactccgatcatgaatttcttatccaacgtcatcttcgtcctacaccgcgtgttttactcggtttagaattagctgtctcttctttagccaatgcggcaattgatatctcagatggttttttggccgatttagatcatattcttacacgtagccaatgtggtgcggtgattgagttggataaattaccgctttcttcttctttagtgaatgtttttggtgttgaacaagcagagacctttgcgttaagtggtggtgaggattatgagctttgttttacggtacccgacagtaataaagcgaaattagagcgtgcgttagcttatattggcgtggattatacttgtgttggacaagttcgcgcgattagtccacaaaataaaaaacgcatcaaatttcaacgcgatggaaatccgattgatatcactattcaatcgggttttgatcatttcaaataa

SEQ ID NO: 30894 - DNA, 435 bp, Pasteurella multocida
atgacagaacaaaaacatgagaaaaaaatctcgccacgtcgtcgtgcgagagaatgtgcagtacaagcgttatattcttggtatgtgtcacaaaattccccagcggaaattgagcttaattttatggcagaacaggatttaaaaggtgtcgatacagcttatttccgtcgccttttccgccaaaccgcagaaaatgtcgatgcagtagataatattatgataccgtatttggatcgtgaggtcagtgaacttgatccgattgaaaaagccattttacgccttgcggtctatgagcttaaatttgaattagacgtgccctataaagttgtcattaatgaagcaattgaagtggcaaaagtatttggtgcagaagacagtcataaatatgtcaatggcgtattagataaagtcgcaccggtgttatcacgcaaataa

SEQ ID NO: 30895 - DNA, 474 bp, Pasteurella multocida
atgaaagtattagaaggtgccgtggcagcgccaaatgccaaaattgcggtcgtgattgcgcgctttaatagctttattaatgaaagtttacttgaaggtgcattagatgcgttaaaacgtctcggacaagtcaaagaagaaaatattacgttagttcgtgtgccgggcgcgtatgaattaccgttagtggctcgccgtttagcagaaagtaaaaaatacgatgggattgtagcattaggaaccgttattcgtggtggcaccgcgcattttgagtatgtggcgggtgaggctagcagtggattaggtcaagtagcaatgaatgcagatattcccgttgcgtttggcgtattaaccacagagaacattgagcaagcaattgagcgagctggcaccaaagcggggaataaaggggcggaagctgcgttagttgctttagaaatggtaaatttattagcgcaaattgacgcggcgtaa

SEQ ID NO: 30896 - DNA, 1380 bp, Pasteurella multocida
atgagaaaaagacgttttctattaacaagtattgcactcggattaagcattttatcgacgccgatgataagtcaagcgtccttaccaactcaagttgacggtcagcaagtccctagcctcgcccctatgttagaaaaagtcttaccagcggtggtatctatttctgtggaagggaaagccaagaatcatggtagtacaccatttcaaggtatcccagaagaatttcgttttttctttggtcccgatcttttcaatgatcgcgcaccacgtaatttccgtggtatcggctcaggcgtcatcattaacgctgaaaaaggttatgtgttaacgaataatcacgtcattgacagtgcagataaaatcaccgtgcagttacaagatggtcgagagttaagcgcaaaagtgattggtactgatgaattatctgatgttgcactgattcaaattgaaaaacccaaaaatttgaccgcactaacgattgctgattccgataaactccgcgttggcgattttactgtagctattggtaatccttttggcttgggacaaaccgtgacatctggtatcgtctctgccttaggtcgttcaacgggttcagataacggtacgtatgaaaactatatccaaactgatgccgcagtaaaccgcggaaattcaggaggtcctttaatcaacctacaaggagagctaattggtattaatactgcgattatttcaccaagtgggggaaatgccggcattgcttttgcaattccaagtaatatggcaaataacttagtacaacaaattttagaattcggtgaagtacgtcgtggcatgctaggcattaaagggggcgagctcaacgcggatctagcgaaagcttttgatattgaagctcaacaaggggcatttgtaagtgaagtcttgcctaattctgctgcagaaaaagccggtttaaaagcaggtgatgtcattgtcgcgatgaatggtcagaaaatttccagttttgctgaaatgcgagcaaagatcgcgacatctggtgcagggaaagaaattgctctcacctatctacgcgacggtaaaacacatcaaacaaaggtcacattacaatcagatgatcaaactcaagccgatgcaagtcacttattaccggcattagctggggctgagatgagcaatcatgatgataaaggcgtcaaaggcgtactcatcacgagtgtgacacctaaatcgcttgcagaacaacgtggtttgaaaaagggcgatgtcatcattggggtgaaccgtcaaaaagtagaaaatttaggtcaactgcgtaaaattttagatgcaaaaccttcggcgattgctctaaatattgtgcgtggcaatacgaatttctatcttcttattcaataa

SEQ ID NO: 30897 - DNA, 1905 bp, Pasteurella multocida
atgggaaaaattattggtattgacttaggtacaactaactcttgtgttgcggtgatggatggcgataaaccacgtgtgattgaaaacgcagaaggtgatcgcacaactccatcaattattgcttatacgcaagataacgaaaccttagtcggtcaaccggcaaaacgtcaagccgtcacaaacccgaaaaatacgctatttgcgatcaaacgtttaattggtcgtcgtttccaagatgaagaagtgcaacgtgatgtaagcatcatgccatttgaaattgtcgcggcagataacggcgacgcatgggttggtgtgaagggtgaaaaaatggcaccaccacaaatctctgcggaagtattgaaaaaaatgaagaaaacggcagaagatttcttaggtgagcctgttactgaagcggttatcacggtacctgcttattttaacgatgcacaacgtcaagcgaccaaagatgccggtcgtatcgcaggattagaagttaaacgtattatcaacgaaccgactgcagcagcccttgcctatggtttagataaaggtcaaggtaacaaaactatcgcagtttatgacttagggggcggtacattcgacttatctatcattgagatcgatgaagtcggtggtgaaaaaacgttcgaagtattatctaccaacggggatacgcacttagggggtgaagacttcgataaccgtgtgatcaactacttagtcgatgagttcaaaaaagaacaaggtgtggacttacgtaacgatccattagcaatgcaacgtttgaaagaagcgggtgaaaaagccaaaattgaactgtcttctgcacaacaaaccgatgtcaatcttccatacatcaccgcagatgcgacgggaccaaaacacttaaacattaaattaacccgtgcaaaattagaatcattagttgaggatttagtgtctcgctcattagagccagtgaaaattgccttagctgatgctggtttaagcgtatcgcaaattgatgatgtgattcttgttggtggtcaaacccgtatgccacttgtacaacaaaaagtggaagctttctttggtaaagcgcctcgtaaagacgtgaaccctgatgaagcagtggcaattggtgctgcagtacaaggcggtgtgttagccggtgatgtcaaagatgtcttgttattagacgttaccccactttcattaggtatcgaaaccatgggtggcgtgatgacaaccttgattgagaaaaacactacgattccaacgaagaaatcacaagtgttctcaacggcagaagataaccaaagtgcggtaactatccacgtacttcaaggtgagcgtaaacgtgcggcagacaacaaatctttaggtcaattcaacctagaagggatcaacccagcaccacgcggtatgccacaaattgaagtgactttcgacatcgatgcggacggtatcatccacgtttctgcgaaagataaaggtacaaacaaagagcaaaaaatcacgattaaagcctcttcaggtttaaccgatgaagaaattcaacaaatggtccgtgatgctgaagcgaacgccgaagcagaccgtaaatttgaagaattagtgcaagcccgtaaccaagcggatcatttagttcacggcactcgcaaacaattaagcgaagtgggcgataaattatctgccgaagataaagcaccaatcgaaaaagcggttgcagatttagaagctgcagcgaaaggtgaagataaagcggaaatcgaaacgaaagtacaagcattaattcaagtatctgaaaaattaatgcaagctgcacaaccacaaccagaagcgcaagcacagcaagcgcaaagcggtaagtcaaatgatgatgtggtggatgcagaatttgaagaagtgaaagacaacaaataa

SEQ ID NO: 30898 - DNA, 1056 bp, Pasteurella multocida
atgctaaagattaatgtcaagaaacaactcggtcagcttgcccttgaagccaatttacagatccctgcgcgtggtgtgaccgccctttttggactatccggttcaggtaaaacctcgttaattaatttagtaagtggcttagttcatccagatgagggctatatttccttaaatgagcgcgttcttgtggatcaatcaaaagcggtttgtattcccgcttatcaacgacatatcggctatgtttttcaagatgcgcgactatttccgcattacaccgtcaaaggtaatttatgttacggcattaagaaaatcgatctagcaaaatttgatgatattgtgtcgttgctaggcatcgggcatttactcaaacgttatcctattaccttgtctggtggtgagaaacaacgtgtggcgattggtcgagcactcttaacacagccagaaattttactgatggatgaaccgctttcagcgttagacttaccgcgtaagcgtgagttgatgagttatctagaaaccttatcgaaaaagattgatattccgattttgtatgtgacacatagcatagaagaattattgcgtttagctgaatatgtggtattgctagatgaaggaaaagttcgagcctttgatcgtttagagtcgatttgggaaaatccgttattcttaccttggaaattagaggatgagcaaagtgcggttctttctttgccaattttacacaacaatactggctatcaagtcaccgctcttggtttacagcaacaacagatttggattaaggcgcaacaagcagaagtaggggaaaacatccgtatttgtattaaaggctccgatgtatcgctcagtttaacacaaccagaaaaaaccagtattcgtaatattctacacggtaaagtaaagcgtattgttgaacgagaaaatcgtgtagatgtgcagattgagattgatgaaaagccaatttgggcgaccattagtaaatgggcattagaagacttggcattacagcttggacaaccagtctttgcgcaaattaaagctgtttcggtactttaa

SEQ ID NO: 30899 - DNA, 765 bp, Pasteurella multocida
atgcttaaattaaaaatgatcaccgtttcactcgcaactgcttgtttagcattttcgctttctgcgcaagcgaaagtaacggtatttgctgccgcatcaatgactaatgcattaaaccaaattgcagaagattataaaaaagtgaaaccagatcaagaattggtgttttcttttgcgtcttcttcaacgcttgcaaaacaaattgaagagggagcacccgtcgatatttttgtttcagcaaacactaaatggatgaaacacctttcagataaaggattaaccattaaagacaccgaaaaagtgttagttggtaacgaattggttttaattgcgccagaagccagtcaattaaaagaagtcgatgtagcgaaaggtgaatgggtagccgaattaaaagacagtttcttgtctgtgggcgatcctgatcatgtgccagcgggacaatatgcgaaagaagcgttaacaaacttaaaattgtgggataaagtggaagcaaaattagcacgtggtaaagatgtgcgtgccgctttagctttagttgaacgcgctgaggcgccattaggtattgtgtatagcacagatggtaaagtgagcaaaggggtgaaaattgttggtgtgttccctgcggatacttacaaagcggtggaatatccagtcgccttattaaaagatcgcgataatgcagaaacccgcgaattcttaaactatttagaatcagcagaagcgaaaaaagtacttgtcagctacggtttctcagtgaaataa

SEQ ID NO: 30900 - DNA, 1131 bp, Pasteurella multocida
atgatgacatttacggcacaagatgtagtgtacatgcaaatggcattagagttagcggagaaagggcaatttactactacaccgaacccctcagtgggttgcgtattagtgaaagacggtattattgttggacgtggctttcatgttaaagcaggcgaggcgcatgctgaagtcatggcattgcgagaggcgggagaaaatgcacgaggtgcaaccgcttatgtgacattagaaccgtgctcacattttggacgtactcccccttgtgcccaaggtttgatcgatgctggtgtagtgaaagtcgtgagtgcgatgtgcgatcccaatccgcaagtggcaggtcgaggattaagcatgttatctgatgcggggatcgaaagtgcggtcggtttattagctgaaaaggcggagtggcttaatcgtggttttcttaaacgtatgcgtactggcagaccttatgtacaactaaaaatggctatgagtttagatggaagaaccgcgatggcaaacggggaaagtaagtggattaccggtgagcttgctcgtgcagatgtgcaagcagaacgagccaaagcctcagcgattttatccaccagtgcaacggtgttagctgatgatcccttattaaatgtacgctggcaacaattacctgacaaggtgaaagccgattatacacaagcgcagctacgtcaacctgtgcgagtgattttagattctcaacatcgagttcaaccctcacaccgacttttcagtctgtcttcgccagtgtggttagtgagtcaaactgcgcgttcgttacttgagtttcctgcacattgcgaacaaatacagctttccgcttctaccaacgctttagctgatttaatggcagaattaggacaacgtcaaatcaatacgctttggattgaagccggtgcgacattggctggtgcattaattgaggcaaaattagtggatgaattgatcatttacattgcaccgaaattattaggtgatgccgcacgaggattatgtaaattacctcatttaagcaccttggctgaggcaagtttatggcaattgcattccattgagaaactcggcgatgatctgaaaacgatttaccacccacgaattacggagccaacatga

SEQ ID NO: 30901 - DNA, 1530 bp, Pasteurella multocida
atgttaattggtgtacctagagaactgcttgataatgaaagtcgtgtggcggcaacgccaaaaacggtacaacaaatcttaaagctgggctttgaggtcattgttgaacatcatgccggttttaaagcgagttttgaagatcaagcatttgcagaaacaggcgccaaaattggctcagcgcaggaagtttggcagtcagatatcatttttaaagtgaatgcgccaacggatagcgaaatcgcactgataaaagaaggggcgactttggtgagctttatttggccggcacaaaatccagacttaatggaaaaattgtcagcgaagaaaattaatgtattagccatggatgcggtaccacgtatttcacgagcacaatcgttagatgcgttaagttcgatggcaaatattgcagggtatcgtgcggtagtggaagcggcgcatgaatttggcagttttttcacggggcagattaccgcagcaggtaaagtgccaccggcgaaagtgcttgtgattggtgctggggtagctggcttagcagcgattggtgcagcaaacagtttaggtgcgatcgtacgtgcctttgactcgcgtcctgaagtgaaagaacaagtggaaagtatgggcgcaagtttccttgaaattgatttccaagaagaaggtggcagtggcgatggctatgcgaaagtcatgtcagaagaatttaatcgccgtgcgctagcactttatgcggaacaagccaaggaagttgatattattatcactaccgctttaattccgggtaaacccgcgccacgtttgattagcaaagaaatggtagcatccatgaaaccgggttcggtgattgtggatttagccgcagcgacaggcggtaactgtgagttgtcaaaagcaggcgaagtcgtagtgaccgataatcaagtgaaaatcattggttacaccgatttaccaagccgcttaccaacacagtcctctcaattgtatggcaccaaccttgtgaacttgcttaaattgttatgtaaagaaaaagacggcaagatcagtattgatttcgatgatgtagtattacgcggtgtaacggtgattcgtgacggtgaggtgacttggcctgcaccacctatccaagtgtctgcccagccacaaaaagtgaaagccacactggtagagaaaaaagaagtaaaagcggtcgatccgcgtaaaaaatacggtgcgatggcagtggcagcgttgttgtttatggcgttggcatctgtggcacctgctgcattcttatcgcacttcaccgtgttcgtattagcctgtgtagtcggctattatgtggtgtggaacgttagccatgcgttgcatacaccgttaatgtcagtcacaaatgctatttcaggcattattattgtcggcgcgttgttacaaattgcgcaaggcaatttctttattagtattcttgcatttattgcaattttagtcgcaagtatcaatatctttgggggctttaaagtgacccaacggatgcttgctatgtttagaaaagattaa

SEQ ID NO: 30902 - DNA, 1188 bp, Pasteurella multocida
atgacggagataaatacggttcttgctgaacttaaacgtggtgtagatgaaattctttcagaagcggacttaattgaaaaactaaaagaaaaccgccctttacgcgtaaaattaggtgctgatccaacagcccctgatatccatttaggacacaccgtcgtattaaataaattacgtcaatttcaacaatttggtcatgaagtcattttcttaattggtgactttaccggtatggttggtgacccatctggcaagaatactactcgcccaccactcagtcgtgacgatgtcttacgcaatgccgaaacctacaagcaacaaatctataagattttagatccacaaaaaacccgtattgtgtttaactcaagctggttaggcgaattagggacagaaggcatgattcgtttaacctcaaattacaccgttgcacgtatgttagaacgtgatgatttcaaaaaacgttttagcaacaaccagcctatcgcgattcatgaatttatctatcctttattgcaaggttatgactctgtggcattagatgccgatatcgaattaggtggaacggaccaaaaattcaatcttttagtcggacgtgaattacaaaaatcggcgggtcaaaaaccgcaagtcgccatcacgttaccactacttgtaggcttagacggtgagaaaaaaatgtcgaagtcactgggcaattacattggtgttgcagaaagcccgacagaaatgtttggtaaagtgatgtcaatttctgatgagctcatgtgggattggtatgacttactgtctttccgcccattaaccgaaatcgcccaattaaaacaagaggttgaaaacggacgtaacccacgtgatatcaaagtgttacttgctaaagaactcattgctcgtttccatagtgaagctgacgcagaagctgcagaacaagaatttattaatcgtttccaaaaaggcgcaatgcctgaagatatgcctgaattgacctttgaaggtgaaatgggcttagcaaacttgttaaaagaagcgggattagtcgcctcaacctctgaagcaaaccgtatggtgcaacaaggtggcgtgaaaattgacggtgaaaaagtcgaagatgccaaattagttatcaaagcaagtaccgccgtttatcaagtaggtaaacgtaagtttgcgcgtgtgacggtgaagtaa

SEQ ID NO: 30903 - DNA, 924 bp, Pasteurella multocida
atggcaaagccgcgcaaacgtggacgtgatattgacggcgtttttttgctagataagcctcaagggatgagctccaatgatattatgcaaaaggtcaaacgtgtgtttcaagctaacaaagcaggacacacaggtgcattagatcctttggcaacggggatgttgccaatttgcttaggtgaagccacgaagttttcacaatttttgttggatgcggataaacgttatcaagtgaccgcgaaacttggggaaagaaccgatacgtccgatgcggaagggcaagtcgttgaaacacgagatgtgcaggtagatgtgcaggacattttggctgcactaccacattttcgtggcaatttaatgcaagttcccacgatgttttctgcgttaaaacatcaaggtaagcctttatatgagtatgcacgtgctggcataacagtggaacgagaagctcgcccgatcacgatttttgacttgcaatttattgcgtacgatgccccttatttaacgctggaagtacattgttcaaaaggcacttatatacgcactttagtggatgatttaggcgaatatttgggctgtggtgcacatgtaacggtgttacgtcgaaccgctgttgccaattatcctgtggaggcgatgatgaactgggacactttacaagttttagctgcacaacaagacctcgcattattagatcagcacttattaccgacagacagtgcggtctccgcattacctgcattgcatttaaatcaagaacaaagtaaagccattagttttggtcaacgtgtcaagtttgacaatccaactcagcttactggacaagttcgtttattttctgacacgcaacaatttttaggtgttgccttagtcgatgagcataatgtcattcgtccgcaacgtttgatgacacaaaatacgtaa

SEQ ID NO: 30904 - DNA, 2502 bp, Pasteurella multocida
atgacagaagatgtaaaaaaagccgatggggctgccccaaaaaaactgagtttacagcgtcgaactaaaaccaccgtcagtacaactgcgggcggtaaggcaaaagaagtgcaagtcgaagtccgtaaaaaacgtacggtgccaacagatgcggcacaaaaagcggaagaagcaagattgaaagcaaaacaagaagcagacagattggcagcagaaaaagcgaaaaaagacgcggaagaaaaagcgcgtttagaggctgaaaaagcaaaacaagcgaaagccgaagaagcgaagaaagcacaagctgtgagcgcaccgaccaaagcggttgacgtggaaaaagaaaagcgccgtgcagaagaagccgaattacgtcgtaaagctgatgaacttgcacgccaaaaagcagaagagctagcacgtaaagcggcagaagaagcgaaacgttatgcagaattaagtgaagaagacgcagagaacgagaacagtgaagactatgcggattatcatttaacgtctacttatgcacgtgaagcggaggatgaagaagcgcgccgtaaagaaaaccgtaatcgtggaggaaaaaataaagttgccaaagcgaaaaaaggtggtcgtgaagacgaaagctcaaaaacagaacgtgaatctaatcgtcgtaatcagaaagatggcaaaatgggtaaaggtaagcatgcgaaaaaaggcagtgccttacaacaagcctttactaaacctgctcaagccgtgaaccgcgatgtcgtcatcggtgaaacgattaccgtggctgaacttgccaataaaatggcagtaaaagcaacagaagtcatcaaaacgatgatgaaaatgggcgcaatggccactattaaccaagtgattgaccaagaaaccgcacagcttgtggcagaagaaatgggtcataaagtgatcattcgtaaagagaatgaattggaagaatcggtgatgagcgatcgcgatgtggatgcggaattagtcacgcgcgcacctgtggtgaccatcatgggtcacgttgaccacggtaaaacctcattacttgactacattcgtaaagctaaggttgcctctggtgaagcgggtgggatcacccagcacatcggtgcataccatgtggaaactgatggcaaaatgatcactttcttagatacaccaggacacgcagcatttacttcgatgcgtgcgcgtggtgcgaaagcaacggatatcgtggtacttgtggtcgcggcagatgatggtgtgatgccacaaaccattgaggcgatccaacatgcgaaagctgcaggtgtgccgattgtggttgcagtcaataaaattgataaaccagaagcgaacccagagcgtgttgagaccgaattgttacaacacgaagtcgtcgcagaaaaattcggtggtgacactcagtttgtatatgtttcggcgaagaaagggactggtgttgatgagttgcttgaagcgatcttattacaatcggaagtccttgaattaactgccgtgaaagacggtatggcgactggtgtggtgattgaatcttatcttgataaaggtcgtggtccagttgcaacaattcttgtgcaaaccggtaccttacaccgtggtgatatcgtactttgtggttttgaatatggtcgtgtgcgtgcaatgcgtaacgaaaacgggaaagatgtagcaagtgcgggtccttcaattcctgttgaggtattggggctttcaggagtacctgctgcaggtgatgaagcaacggttgtacgtgatgagaaaaaagcacgtgaagtggcgttatatcgtcaaggtaaattccgtgaagtgaaattagcacgtcaacaaaaagccaaattggaaaatatgtttaccaatatggcagaaggggatgtggctgaattgaacgtgattgtgaaagcagacgtacaaggatcggtggaagcgatctgtcagtcattgaacgaactttctactgccgaagtgaaggtaaaagtggtgggttccggtgtcggtggtatcacggaaacggatgcgactttagcggcagcctcgaatgcgatcgtacttggctttaacgtacgtgccgatgcctcagcgcgccgtattatcgaatcagaaagcattgacttacgttactactcaattatttatgagctattaaacgaaatcaaagctgcgatgagcggtatgctacaacctgaatttaaacaagaaattatcggtttggctgaagtgcgtgatgtcttccgtcatccgaaatttggcgcaatcgcaggttgtatggtgacagaaggtattgtcaaacgtaacaacccaatccgtgtcttacgtgataacgtggtcatttttgagggcgaacttgagtcattacgtcgctttaaagatgacgtagcagaagtacgtaacggtatggaatgtggtatcggtgtgaagaactacaatgatgtgaaagttggcgaccaaatcgaggtattcgaagtagttgagattaaacgtacgatctaa

SEQ ID NO: 30905 - DNA, 1485 bp, Pasteurella multocida
atgagtaaagaacttttattggctgcagaagcggtatcaaatgaaaaattattaccacgtgaaaagatttttgaagcgttagaaagtgcgcttgccctttcaaccaaaaagaagtatgagcaagaaattgatgtgcgtgtggtgattaacacaaaaacgggggagtttgatactttccgtcgttggttggttgtggacgaagtaactaatccgacaaaagaaatcaccttagaagcggcacaatttgacgatcctaatgtgcaactaggtgattatgtagaagatcaaattgaatctgtggcctttgaccgcatcacgatgcaaactgcacgtcaggtgattagcacgaaaatccgcgaagcagagcgtaacaaaattgttgagcaattccgttctcaagaaggcgagattgtgaccggcacagtgaaaaaagtgaatcgcgacaatattgtattagatttaggtcaacaagccgaagccgtgatattacgtgaagatatgttaccgcgtgaaaatttccgtccgggagatcgtgtccgtggtgtgttatataaagtgagcccagaaagcaaaggtgctcaattatttgttacccgtgctaaaccggaaatgttaattgagttattccgtattgaggttcctgaaattggtgaagaactgatcgaaattaaaaatgctgcgcgtgatccgggttctcgagcgaaaattgcagtgaaaagcaatgataaacgtattgacccagtgggtgcttgtgttggtatgcgtggtgcgcgtgtacaagcgattaccaatgaattaggtggtgaacgtgtggatatcgtactttgggatgataaccctgcgcaatttgtgatcaatgcgatggcaccagcagatgttacttctatcgtggtggatgaagattcacatgcaatggatatcgcagtcgaaccagccaatcttgcacaagcgattggtcgaaatggtcaaaatgtgcgtttagcaacccaactaacaagttggacattaaacgtgatgaccactgatgagctgaaccaaaaacatcaagcagaagataataaagtattgaaattattcatgaatgcgttagaaattgatgaagattttgcgcatatcttaattgaggaaggtttctctacattagaagaactggcttatgtttcagtcagtgaattaaccgcaattgatggcttagaagatgaagatttggtcgaagaattgcaagcgcgtgccaaaaatgcgattacggctgcggcattagcagaagaagaagccttaaaacaagcgcatattgaagatcgtttactcgcattagagggaatgaatcgccatattgcgttgaaattagcagaaaaacaaattactactctggaagaacttgcagaacaaggtgttgatgatttagcggatattgaagatttgacagcagaacaagccgccgattttattatggcggcacgtaatatctgttggttcagtgagtaa

SEQ ID NO: 30906 - DNA, 747 bp, Pasteurella multocida
atgaacgaaaattatcgacatagacaattactgaatttgttagaagaaaggaaagcgctatcaacgcaagatattattcgcttattggatgtttcacctgcaacagcaagacgggatattactaaattaaatgaacaagggcgcttaaaaaaagtgcgtaatggtgcggaagtcattgagaaaaaagcataccgttctcaaccgctcgccatcaataattcaggtgagaaaaaacggattgctgaattagcagccaaactctgtcaggatggcgatagtgtgattctgacctgtggctctacaatgctgatgttaggtagccgtctttgtggtaagaatgtacaaattatgacaaatttcttgccattagcgaattatctcattgagcatgatcataatgatgtagtgattatgggggggcaatacaataaaaatcaggctattatgttgtctttaaataccaatgcagaggctatttatgcagcgaatatcatgtttaccagtggtaaaggattaaccgtagatgggctatataaaaccgatatgttaattgcgaactctgaacaaagaatgttgccacgtgtcggtaaattagttgttctattagatagttcaaagcttggaaaacaagccggtatgttatttgcggaactgcacaatattcatttgttaatcacagggaaagaagcggacgctgagattattgcagcattaaaacgtcaagggctaaatgtgcttttagcataa

SEQ ID NO: 30907 - DNA, 1878 bp, Pasteurella multocida
atgcttatacctagatttcttggatcaggccttatccagaaatctttcatgcaaatatacacaatgaaaaaatccagaggtgtcactatggaaacactctataacctattcttaagctttaataatcaagtcctttctaaagccccctttctacttggtattgttgcttgtattgggtacattctattgaaaaaagacacaacaacagttatcaaaggaacaataaaaacaattgttggttttatgattgtgcaggcgggatctggctttcttgtcgcaaacttcaagccaataattgaggggttatcaaaatatcataatttgacgggggcagtgattgacccttacaccagtatgcaagccaccatccaaacaatggcagataactatgcgtgggttggctacgcggttattctggcattgtttttaaatatcttattagtcgtatgccgtagaattacagggattcgaactatcatgctgacgggacatattatgttccaacaagcaggtttagtcgctgtattctatatgattattggtgcctcaatgtgggaaacggtcatttatactgccgtattaatggcgctatattggggaatctcatcaaatatcatgtataaacccacccaagcagttactggtggtgcaggtttttctattggacatcaacaacaaatcgcttcttggatcgcagtcaaactcgcgccaaaacttggcgacaaaaatgataccgtagataaaatgaaattaccgaaatggctacatatttttcatgacagtatttccgcaactgcacttgttatgactgtatttttcggcatcattttactctcttttggcttagataacttgcaacaaatggcaggcaaaacccactggtttatgtacatttttgaaatgggcttaaaatttgctgttgctatccaaatcatcgtcactggtgtacggatgtttgttgctgagctttcagaagcattcaaaggaatatctgagcgcgttattccaaactctgtactcgctattgactgtgcggccatttatgctttttcgccaaatgcaatggtctttggctttatgtggggggcgattggacaatttgtagctgtcggtctgctcctcggttttagttcacctattctgattattccaggcttcattccgatgtttttctcaaatgcaacgatcggtgtctttgcgaaccaatttggtggctggaaatccgtcatgaaaatttgtttcattatgggaatcatagaagtacttggttcagcttgggttattcacttacttgccacccaaggtacaacgtttaatggttggatgggaatggcggactgggcattatttttcccaccaatattgcaaggcattgttagcataccgggtttcttttttgttttactgacattagccattgtttatatggtgtttgcgtcaaagcaattacgttcagaagaggccgctgccgctgcacttggtaaaaccttggaacaaatggatggttatgacaagacagaacatagcccaatcacaccggatgacagcgtccaacatgatgttctaaaaacagccgttaaccctattcgaatcctggcagtttgtggtagcgggcagggttcatcaatgatgatgaaaatgaagattaaaagttatctggacaagcataacataccaaataccttggattcctgtgcagtgaccgattataaaggcaaattaaatgaaatcgatattatcgttgcttctcgtcatcttgccgatgaaattgaagtgggtgaagataaatttgtcttgggtgtacaaaacatgctaaatccaaattcctttggtccagaattaattgccttaatcaaaaaatatcagcaaaccacttaa

SEQ ID NO: 30908 - DNA, 468 bp, Pasteurella multocida
atgaatttaaaacagtcactcatagaaaataattcaatcaaacttcatcaaactgccaaaaattgggaggaggcaattaaactagggactgatatgttaatcgcttcgggagccgtcgaaccacgttatcacgatacgattatcaaatgtgttaaagaactaggaccatatatcattattgctccccatttagcgatgccacacgctcgcccagaggatggtgtcaatcgcacagcctttgccctcgtcacgctagatacacccatttattttgatggtgaagatgaacctgttgatgtgctcctcacacttgcgggcagtgatgcaaatcaacatatgcaaggtctcatggaaatcactcaggtacttgatgatccagacagtgatacgggcattaatttagataaaattcgtcgttgtcaaactgctgaagatgtttatgcggttattgatgcagtcttaaactaa

SEQ ID NO: 30909 - DNA, 1869 bp, Pasteurella multocida
atgaaaaaggttattatcattggacataaacagtctaactatcaagatgttgaaaaggtttttcaatgttatgggatgaatcccccgcttccatcaaaacgtgaaaaaatgtcccccatcgaaattggccatgtacttaataaagtattaccaagtcttgagcacacacctaaaaatgtatctttactttctaataagaaaagcaaaataaaaaaagggaattcagccaaaaataaatctcataagcacgctaaaacgaacacaatacaaacgacttcgagcatctgggataacttatctctcgatttgatgctcgcgaatatcgagcaaaatttttggggatggtctgatcctaatgcaattcaaatattagattattgggctaaccttgacccaaacattcatttcgtctttgtttatgataagccagaaaatttattccaatatcatagcttagaagaggctctcaaattagataaacacaccgtacaagaaaaatttgaagagtggcaaacctacaatgaaaaaatcctaacttactttaataaatataaagatcgtagtgtattactgaatacacaacaactccaaaatacgaaaaaaacatcactgtctgaaatttataaacatatttctgcacctgatgcattagtcaaaaaactgaatgaaccttctctaaataaagagatggaaattattgaagtaaaccaagatttatctcaccaagaagaatgtccactgtctaactttattgttagccaaattataaaaaattctcctactgttacgcaggtatatgaagaattacagtcgcatgctgatctgccttatatttcagaacaaaaattagtaaatgatgccgattttgctctccttgcatggaaagatatgattcaaaaaaaagtcgatgtaaatcaatatcaacatgaaaaagaattagaacttagcacaataaaagaacgtcaattagaggtcacagagagatatcaattgacggaacaaaaactgtcagaaacacaaaaagaaatcgaacaaattaaagatgaaaatagaaaagtaaaatctgaaaaagcaaaactcactgcatctgttcaatcaacgagcaaaatactttctgagaaagaaaaagagatttcttgcataaaaagtgaaaatacaaagattaaagaagaaaaaattaaaattgatgaagcataccacttaaccaagaaaaccttgtcggataaagaaaaagccctcaaaacgcatcaagatgaaattgaagcgctcaagataatttttaatgaaaatatttccgtacaagaagatatgcaagaaaaatttcaggaagccaataaaagaaaacaagaacttgaacaagagctaaaagccatatcggataagaaagcattattagaaacagaaaacagccaaaaaacccaagtatctgagtctttagaaaatgaaaataaagtgttattagctcaactccaactcattcaagaagaattagaaaaactttatattgacaatcaagtattaaaagctaaaccacgcctttacggtgcagctgatcgcataaaaaaccaattaacttatcgactaggttacaaaatacaaagacatggaagaagtctatttggtctcatttttcttcctttcatcttatttttcacctatctgggctttaaaagagagatgaaaaagtacgagtggaatacgctcccaccaattcatgaatatgaagatgcgcatgaagccaatcgcattaaaagccatttatcttataaattgggcgtcctctttttgcaagaaatcaacaatccgtttaagtggcttactctcccttataaactgattaaagaaggtaaacgattcaagcaaggttaa

SEQ ID NO: 30910 - DNA, 1173 bp, Pasteurella multocida
atgaagaaaattacaattgctggggctggctatgttggtttatccaatgcagtattattagctcaacaccacaatgtgatcttattagatattgatcaaaataaagttgatttaattaataataaaaaatcgcccatcacagataaagaaatcgaagatttcttacaaaataaatcactgacaatgatggcaacaacagataaagaagtggcattaaaaaacgcagactttgtcatcatcgcaacgccaacagactataataccgaaacaggttattttaatacatccactgttgaagctgtcattgaacaaaccctttcaatcaatccacaagcaacgattattataaaatcaacaattcccgttggttttaccgaaaacatgcgtgaaaaatttaataccccaaatcttatcttttcacctgaatttctaagagagggaaaagccctttacgataatttgtatccaagcagaattattgttggcagtacttcttatcaagcaaaagtatttgccgatatgttgacacagtgtgccagaaaaaaagatgtaactgttttatttacacacaatactgaggccgaagctgttaaattatttgcaaatacgtatctcgcaatgcgagttgccttttttaatgaattagatacttatgcgagtcttcaccatttaaatacaaaagacattatcaatggtatttctactgatcctcgcattggtacacactacaataacccaagtttcggctatggcggttattgtttacccaaagacactaaacagttactggctaactatgctgacgtgcctcaaaatctcattgaagccattgtcaaatctaatgaaaccagaaaacgtttcattactcatgatgtattaaataagaaacctaaaactgttggtatttatcgtttaatcatgaagtcaggttctgataacttcagagcttctgctattctcgatattatgccgcatctcaaagaaaacggtgttgagattgtgatttatgagccaaccttaaatcaacaggcatttgaggactaccccgttattaatcaactctctgaatttattaatcgctctgatgtcattctcgctaatcgttctgagccagatttaaatcaatgttcccataaaatctatacaagagatatttttggcggtgatgcttaa

SEQ ID NO: 30911 - DNA, 1434 bp, Pasteurella multocida
atgcttaacctgtttaaaatcataaaaaagtatgtgcatattcaatctttattacacaaaaaagaatatgccttactttatgctaaatacataaaccagctttctatcaaccagcaggcttatgttatttgtcaactcaaactctatgatctctttctgattgatcctaaatggagccactctgtttttttccagttaggattaattgctcgtggacacgatcatgatagcgatgaaatggtacgtcgtttgatcacttgcactgattttagcaaaaataagcagttaatcctttctcaattacttgcttattcacctcaaattgcaacaacattatgtccacagacatatcgttatcgtgcgctatatctctcattactagcgaatttaaaagactttgttcgtttaaaagaagaactcaataagttgccgtcatgtgtgttaaagaatacacctcattactgtttgttacagaattttgtcgaaaaagaaaacagcaagaaattagagaacattaatcaatttctttacttttataaacttggagaaataactacgataaagacagaagatccacctaatactaataatatagtcagtcattcgatagttaatgacacaaacacctacttaaatgcccctttaattaccatattagtgacgacatttaacagtcaaaaaagtataaaaaacacattaaattcattgttcaatcaaagctatccaaatattgaaattatcgttattgatgatcatagccaagataatacgatgagtattctccaggcttatactaagcaatataaaaatatcaaaatcattagcttaaaagaaaatgtcgggacttatgtcgcaaaaaatattgggcttaaatacgcctctggcgaattcatcacttgtcaagattccgatgattgggcacacccacaaaaattggcacttcaggtggctcctttattacaacataaagagttaattgtaactttttctaagtgggtaaggctcgatccaatagggaatccttatgcccgtactatttatccattaatgcgtttaaacccttcttccgcattattccgtaaaaaagaagtgtgtgaaaaaactgcattatgggattgggtaagaatcggtgcagatagcgaatttaatgcacgcttaaaattaatttttggacacaaaggctattacaccgtgaataaacctttgacattcggtgcacatcgagaaaattcattaatgacagctcaaagtactggctatgtcaatggcgtctccctacctcgtgaagcatattggaaagcatggaatatctggcatatctcacaattacagcgaggacacgcccctcttttatcttcctctcctaaacgagaattttttcaatatgaccaacatccgatcatggatgttatttcttatgcaatcattaattaa

SEQ ID NO: 30912 - DNA, 660 bp, Pasteurella multocida
atgatttatgtagaaaacgtctgtaaaaaataccttaatcgtacggggtggcataccgtattagacgatgtgagtttctcacttagaaaagggcaaaaagtcggtatcctcggaaaaaatggggcagggaaatcaacccttatccgtttactcagtggtgtggaaccacctacatcaggaaaaattacacgtaaaatgagcatatcttggccattaggcttcagtggtgcattccaaggtagtttaacgggtatggataatttacgttttattgcgaggatctataatgcagatatcgattatgtaaagcgttttactgaagagttctctgagctaggtaaatacttatatgagccagtacggacctattcatcagggatgaaagctcgcttagctttcgctttatcactttctatcgaatttgattgttatctgattgatgaaattattgcagttggtgatgcacgctttgctgataagtgtaaatatgagttatttgagaaaagaaaagatcgttcattgatcttagtttctcatagcccgaatgcaattcgagaatattgtgataatgcgatggttctccataatggcattatgcatcatttcaattccattgatattgcatatcaatttcataataatgcattacaaaccaaataa

SEQ ID NO: 30913 - DNA, 765 bp, Pasteurella multocida
atgggtaaatggctaaaaagtgcggtgttttttgtcacaattttgtgtgctatgccggtattttcagcacactttccacccgcaccaaatccatttcaatatgtgaatgattataccaattcattgtcagacaatgataaggcggtattggagcgtaaactgcgtcattatggacaagaaaccagttcacagattgcagtggtgatcattccttctacacaagagtatgatatttcacaatatgcgtttgaattaggggataagtggggtattggacgtaagcaattagataatggcgtattaatgctcgtagctaagcaagaccgcaaactgtttattgccgtaggacaaggtctggagggggtattacccgatgctttcttatcccaattaattcgcaaccaaattacaccgcactttaaagaagaacaatacgcgatgggaattcatcaaggattagattatctcattgccgcaagtaaaggggagtttgatgcgagtcaagtagtggaagaaacatgggaagagtatattcctttcttgatgattgctatttttgtcgcgtttatcttgttcaatgaattcttacccggtgattatgtgagtccaagtcgtcatcagtcgacgtcacgtacatcttctttaccacgttaccgacgccgctcgggtggtaacggtggttttggtggctttggtggcggtggatctggtggaggattcggcggaggaagttttggcggtggtggtgccggtggaagttggtga

SEQ ID NO: 30914 - DNA, 603 bp, Pasteurella multocida
atggtattagtaactcgtcaagcccctgattttacagcggctgccgttttaggtaatggtgaaatcgttgataatttcaattttaaacaacatatcgcaggtaaagcggctgttgttttcttctatccactcgactttactttcgtatgcccatctgaacttatcgcgtttgatcatcgctatgaagagttccaaaaacgtggtgttgaagtagtgggtatttccattgactcagaattcagccacaacgcttggcgtaaaaccccagtcgaaaatggcggtatcggtgaagtgaaatatgctttagttgccgatatcaaacatgaaatcgcacaagcctttggtattgaacatccagaagctggcgtggcgttacgtgcctctttcttaattgataaagatggcgtagtacgtcaccaagttgtgaatgatttaccattaggtcgtaatattgatgaaatgttacgtatggttgatgcgctacagttccatgaagaacatggtgatgtctgccctgcacaatgggaaaaaggaaaagaaggcatgactggtagccctgaaggtgtggcaaaatacttaaaacagcatgctgatcaactgtaa

SEQ ID NO: 30915 - DNA, 1650 bp, Pasteurella multocida
atgactgaatcttttgctcaactatttgaagaatcattaaaagaacttgaaacccgtcaaggttctatcgttagcggtactgttgttgctattcaaaaaggctttgtgcttgttgacgctggtttaaaatctgaatcagcaatccctgttgaagaattcttaaacgcacaaggtgaattagacgttcaagttggtgatgttgttaatgttgcgttagacgctgtggaagatggttttggtgaaacaaaactttctcgtgaaaaagcagtacgtcacgaatcttggattgaattagaaaaagcatacgaagaacaggcaactgttatcggtttaatcaacggtaaagtgaaaggtggtttcacagttgagttaaacggtgttcgtgcattcttaccaggttcattagttgatactcgcccagttcgcgaaactttacacttagaaggtaaagaattagagttcaaagtaatcaaacttgatcaaaaacgtaacaacgtagttgtttctcgtcgtgctgttatcgaatcagaaaatagccaagaacgtgaacaaattcttgaaaacttacaagaaggctctgaagttaaaggtatcgttaagaacttaactgactacggtgcattcgttgatttaggtggtgttgacggtttactacacatcacggatatggcatggaaacgtgttaaacacccaagcgaaatcgtgaatgttggcgatgaaattactgttaaagtattgaaattcgacaaagatcgtactcgtgtatctttaggcttaaaacaattaggtcaagatccttgggttgctatcgcagaaaatcacccagtaaacagcaaattaagcggtaaagtgactaacttaactgattatggttgtttcgttgaaattttagacggcgttgaaggtttagttcacgtttctgaaatggattggacaaacaaaaacatccacccttctaaagtggttagcttaggtgatgttgttgaagtgatggtattagaaatcgatgaagaacgtcgtcgtatttctttaggtttaaaacaatgcaaaccgaacccatggttacaattcgctgaaacacacaacaaaggcgacaaagttgaaggtaaaattaagtcaatcactgactttggtatcttcatcggtcttgatggcggtatcgacggtttagttcacttatctgacatttcttggaatgtgtctggtgaagaagcagttcgtcaatacaaaaaaggtgacgaagttgctgcagtcgtgttacaagttgatgcagtgaaagagcgcatctctttaggtattaaacaacttgaagaagatccattcaataatttcgttgcagttaacaaaaaaggtgcagtattaagcgctaaagttgttgaagcggatgcgaaaggtgcaaaagttgaattagatggcggtgttgaaggttatatccgtgcagcggatttaacaaacgaagtgaacgcaggtgatgttgttgaagcaaaatacacaggcgttgatcgtaaagcacgtatcgttcacttatctgtacgcgcgaaagaccaagcagaagaagcagctgcagttgcaaatgtgaataacaaacaagaagatgttgctattccaaacgcaatggcagaagcgttcaaagcagctaaaggcgaataa

SEQ ID NO: 30916 - DNA, 684 bp, Pasteurella multocida
atgtcaaataaaattgtgattacggtggatggaccaagcggtgctggcaaaggaacactctgttatgcgctcgctgaaaaattaggttttactttattagatagtggggctatttatcgtgtcactgcgcttgctgcattaaaaagtgcggtcgaattagacgatgaaatagccttagcggcgcttgcaagcgcactggatgtgcaatttttacccgcagatggcgaggtgaaaattctcttaaacggtgaaaatgtcagtggtcagatcagaacgcaagaagtggcggaggcagcatcaaaagtggcggttttccctgaagtaaggaaagcgcttttgcagcgtcaacaagatttctcaacggaaaatggcttgattgcggatggacgtgatatgggaacggtggttttccccaacgcacaagtaaaactctttttagacgcaagtgcggaagaaagagcaaaaagacgctataaacagttgcaaaataaagggattagtggtaactttgaccagattttagccgagataaaagcgcgtgattttcgcgatagaaatcgagctgttgcgccacttaaacctgctgaagatgctttaatattagacagtacgtcattaagtattgaagaggtcattgcgcaggcgttaagttatattcagcaacaccttgatattaaggcttaa

SEQ ID NO: 30917 - DNA, 2772 bp, Pasteurella multocida
atgaaaaaattgaccgcacttttccttatcatttgcacgttgattgcttgccaaagtatgccttcctctcctcaggcatcactcccgtttgatccagctattcaacatggtaaattagcgaatgggttaacttattatgtcgtacgaaatcctgagccggcgcatcgtgtctatattcgtttagttgtgaatgcaggatcactgcacgaagatgaggatcaaaaaggggtggcgcatttagtcgaacacatggcatttaatggctctcatcgattccctgaaaatcaaatcattaatgcacttgaaaaattaggaatgaaatttgcacgggatattaatgcatttaccgattttgaaaatacggtttacacccttaatttagacaaaaatgatcctcaaagcctgactttagcttttgaggtgttaaatgagtggatgcaccacttaacgattctggaaaaagacttagataatgaacgtggtattgtacaggaagaatggcgacgacgtttaagccccatgttacgtttaggtgacaaaaaaagtgcggtagaaatggcggggtcacgctatgcagtacgcgatccgattggcgatatgaatattattcgcacgatttcaagacagcgtgtggctgatttttatcacaaatggtaccgagctgataatatggcggtgatcattgtgggtgatattgatgctcaacaagtcacctctcagttaaaagcgcagatagggagtataaactcacactcaacttcccccttaccaccaattgatttttctattccattcgttaaccaatggcgcgttgctggtatttctgaaaaaggcacctatattcccacacttgaattaagcttttttgaaaaatttacagagcaaaataccctcgctgcatataaacaagacttgactcaacaaatcctgattcgtctgataaatttacgtttacaagattgggaacaagtcaaacagcaaaaagttgaatcagcaaatttttaccgcacccatttaggaaaagaaacgctacaaaatattttcctgctacagctttttgatactgactaccaaaaagccacacaatccttattccaatttatcgcagaaattcagcaacacggcttttctgcgcaagaatttcaacaagaaaaagcgcggttagtccaattaaatgaaaaacaacgcagtctcaaagctgggagtttaaaaatcgcagatgatctcgttatttctgcggcaaatcagcaagtcgtgataagtcaacaagatcgatatcgactcaatcaacgctttttgcaagaaatccgtttagaagaactgaaccaggcatttcaacacctcattactattcaagccaaactcctgttagttactcaaccttatcccgcgacaccattgacgttaacggtaaataaggtggcacagctgtggcaagaaacacagcatactgcgcaacatacttggcatacacctcgaacagctgggaaaatgcctgcattgtccttccctaaagggcaaatcaaacaaagcaaacattggaaaaaaggcgatattacggaatatcaattaagcaatggaagcaaattgatttaccattatagcgataaaacacccaatcaagtgtattttaaagctgttactgcgggaggattacgttctgtagcgcctagtgattaccatcgctttaaaagtgcggtgacattaactgatgattctggtattggtccattaagcttgtcggagatcaatgatttatttcgccagcatcctatcgcattggcgactgtagttgatgactataaacaaggttttaccgcagtaggaaaacccgaacaaatagctgatttactcaaattatttcgcttgaaattacaaggaacagcaattagcgaacccgtttttgaacgttaccaaaaagaaactcaagattatttccgtcaagtagataaagaaacggaatttatgcaaaaattatcacgtttacgttatcccaacatggccacagtgtatagccaaaataaaaaggaagccttatcgttttctcgtcaggaactcacccaattctatgactcggtgatgctagataaaacggatttcacatattttcttattggagatctccctcaacaagaggcagaaaagctggcacaaacgtatttagcctcagtagaggtcaaacactcacctcgtcattattacgatagttcgcctatcacacccgccaatcattttgtaatgcatggcttagatgaaccacgtgctgatgtcgagatttatttcagtacaccgaatcaatggacacctgaactacaatatcagttagatctcttagcagatgtactgcaagaagtgcttcgcttaacactgcgagaacaatcatcaggtatctatgctgtgaatagttggtttaatcaagaaaaatcacatgcgcgcctagaggggaaaattgaattcagttgcgcccctgatcgcgtggcagaactgaccgcacaaacgtaccatattttagatgaaatcatgcaaaaaggcgtttccgccagcttattagaaaagaaacgaagtgagaaacaaacacaaatcaaattccaatttgattcattagtgtctattgccatgctaattgaacaaagcttttggcatactcaaagtccagatgaaatttatctgtatcaaagactcgaagacattggacaaaaaaaatacatagataatctcgcaagaaaaatatttcagccaaatgcacgttttcaagccatcttgcagccttaa

SEQ ID NO: 30918 - DNA, 1005 bp, Pasteurella multocida
atgccactcaatttacgtcatcgtcatttcttgcgtttaatggatttcacgccaaccgaaattcaattcctactcgacctctctgccaacttaaaaaaagcaaaatataccggaacagaacaacctcgtttgaaagggaaaaatattgccttaatttttgagaaaacgtcaacacgcacgcgctgttcatttgaagtggcggcgtatgatcaaggggcaaatgtcacttatatcggtccaagtggttcacaaattggtcataaagaatcgatgaaagacacggctcgagttttaggccgtatgtatgacggaattcaatatcgtggttatggacaggaattagtcgagattctcgcacagtactcaggcgttcctgtttggaatgggttaactgatgattttcatccaacacaaattcttgctgattttctgacaatgttagaacacggtgaaggcaaacgtcttaatcaaatgaaaatggcctatttgggtgatgccagaaataacatgggaaattcttttgttgaaggtgcggcattaatgggcatggatctccgtttagtcgcgcctaaagcctattggccagaacaaaaactgcttgatgaagtcgcagaaatggcgaagaaaactggcgcaaaaattacctgtacagaaaacgtagaggaaggggtgaaaggtgttgatttcctttacaccgatatttgggtctccatgggcgagcctgaagaagcttgggaacagcgcattaacttaatgaaaccataccaagtcaacaaggcgttacttgaaaaaacaggtaatccaaaagtgaaattcatgcactgtttgcctgctttccacgatgaaaatacaacggtcggtaaagaaatggcgcaaaaatatggtatgaacggtcttgaagtcaccgatgaggtatttgaatcagatgcctccatcgtgtttgatgaagcagaaaaccgtatgcatacaattaaagcagtgatggtggcaacgttaggtcagtaa

SEQ ID NO: 30919 - DNA, 1590 bp, Pasteurella multocida
atgtcattaaacgattatccacaacaagtaaacaaacgtcgcacctttgcgattatctctcaccccgatgcgggtaaaaccacgattaccgaaaaagttttgctctacggacaagcgattcaaaccgcgggatcggtgaaaggaaaagggtctagtactcatgccaaatccgactggatggaaatggaaaaacaacggggtatttcgattacaacatctgtaatgcaattcccttataacgattgtctcgtgaatcttctggatactccgggacacgaagacttctcggaagatacctaccgcacgttaaccgctgttgatagctgtttaatggtgatcgacagtgccaaaggggtggaagagcgcacgattaaattaatggaagttactcgcttgcgtgatacccctattttgacttttatgaacaaattggaccgtgatattcgtgatccaatggaattgttagatgaagtagaaaacgtattaaatatccactgtgcaccgatcacctggccaattgggtgtggcaaattattcaaaggggtttaccacttatataaagacgaaacctatttataccaaacgggtcaaggacatacgatccaagaaaaacgtgtgattaaagggttagataacccagaacttgatgctgctgttggtgatgatttagctcaacagttacgtgatgaattagaacttgtacaaggtgcatctaacgaattcgatttagacgcatttttacaaggtgaattaacccctgttttctttggaacagcattaggtaactttggtgtggatcatttcttagatggcttaacccaatgggcgcccgcgccacaatcacgtcaagcagatagccgtgcagtagcaagtagcgaacaaaaactcaccggtttcgtgtttaaaatccaagccaatatggacccaaaacaccgtgatcgcgtggcatttatgcgcgttgtatctggcaaatatgaaaaaggcatgaaactacgccatgtaagactaggaaaagatgtggtaatttccgatgccttaacttttatggcaggagatcgttctcatgctgaagaggcttatgcgggcgatattatcggtttacacaatcacggtacgatccaaattggtgataccttcacgcaaggcgaagaattaaaattcactgggattccaaactttgcacctgaattgttccgtcgcattcgtttaaaagatccactcaaacaaaaacaattattaaaaggcttagtgcaactttcagaagaaggtgcggtgcaagttttccgacctctcatgaataacgatctcatcgtaggtgcggtgggtgtacttcagtttgatgtggtggtttcacgtttaaaatcagaatataacgtagaagcgatttatgaaaacatcaacgtggcgacggcacgctgggttgaatgtagcgatgcgaagaaattcgacgaatttaagcgtaaaaatgagcaaaacctagcgttagatggtggcgataatctgacttatattgcgccaaccatggtgaacttaaatctggcacaagaacgttatcctgacgtcaaattctttaaaaccagagaacattaa

SEQ ID NO: 30920 - DNA, 480 bp, Pasteurella multocida
atggcaacagcaatcggtttatgtgcagcttcatcagaaaaactggcaaaagaacttaataacttactcgcaaactatcaagtattttatactaacgtacgcggttatcactggaatattaaaggggtcaatttctttgaattacacgcaaaatttgaagaaatttatgacgatttagtggtgaaagttgatgaaatcgcagaacgtattttaaccttaggtcacacgccaaataacgcatacagccaatacctcagcgtttcaacaatcaaagaagatattggtgtgagcaccgcaaaagaatgcttaaaaggcactttagaaggtttcaaagtgttattaaaacaacaacgtgaaattttatcgcttgcaggcgatgcagacgacgaaggtactgcttcacaaatgagcgactacatcaaagaacaagaaaaattaatttggatgtttactgctgcttgcgaaagttgtaacgcataa

SEQ ID NO: 30921 - DNA, 2865 bp, Pasteurella multocida
atgacacaaaactttgaaatggcagatcgttttacgccatctgcagtggaacaagccctgtataaacactgggaagaaagcggttattttaaaccgtcagaagatacttcaaaaccaagttattcgattgccattcctccgccgaacgtcacggggagcttgcacatgggacacgctttccaacaaaccttgatggatattttaatccgtttcaatcgtatggaagggcacaacactttatggcaaacaggtactgaccacgcggggattgcgacccaaatggtggtagagcgtaaaatcgcggcagaagaaggcaaaactcgccatgattatgggcgtgaagccttcattgataaaatttgggattggaaagcctattcaggtggcacaattagccaacaaatgcgccgtttaggtaactcaatcgactgggaacgtgagcgtttcaccatggatgagggcttgtctgacgcggtaaaagaagtatttgtgcgtttacacgaagaaggtttgatctatcgcggtaaacgtttggtgaactgggatccaaaattacacaccgcgatttctgatctcgaagtagaaaataaagaaagcaaaggctcactttggcatttccgttatccattagccaatggggcgaaaacggcagatgggaaggattatttagtggtagcaaccacccgtccagaaaccatgttaggtgatacagcggtggcggtgcaccctgaagatgaacgctatcaatcgcttatcggcaaaacggttgttttacctttagccaatcgtgaaattccaattattgctgatgattatgttgatcgtgaatttggtacaggcgtggtaaaaattaccccagcacacgatttcaacgactacgaagtaggtaaacgtcaccaattaccaatggtgaacgtgatgaccctaaatgcggatattcgtgccgaagcggaaattatcgggtcagatggcaaaattcttgaaagttacaccgcacttattccaaccaaatatcaagggatggagcgttttgccgcacgtaaacaaatcgtggcggattttgaggaattgggtttactagacgaaattaaaccgcacgatttgaaagtgccttatggtgatcgtggtggtgtgccaatcgagccaatgctcactgaccaatggtatgtgagcgtgaaaccgcttgccgaagtggcagtgaaagcggtggaagatggcgaaatccaattcgtaccaaaacaatatgaaaatctatatttctcttggatgcgtgatattcaagactggtgtatttctcgccaactttggtgggggcaccgtattccagcgtggtatgatgagcagggtaatgtgtatgtggcacgagatgaagctgaagtgcgagcaaaacacaacttgcctgcggatctcgcattaaaacaagatgaagatgtgctagatacgtggttctcatccggtttatggacgttctctaccctcggttggccaaaacaaaccccagatctgaaaatgttccactcaacagatgtgttgatcactggctttgatatcattttcttctgggtggcacgtatgatcatgttcaccatgcattttgtgaaagatgaaaacggcaaaccacaagtaccattcaaaaccgtgtatgtcactggcttgattcgtgatgagcaaggacaaaaaatgtccaagtcaaaaggtaacgtcatcgatccattagatatgattgacggtattgatctggaaagcttgttagaaaaacgtactggcaacatgatgcaaccgcaattggcggaaaaaattgccaaagcaactatcaaagccttcccagaaggtatcgcggaacacggcacagatgccttgcgcttcactttgactgcgttagcgacaaacgggcgtgacattaactgggacatgaaacgtttagaaggctatcgcaatttctgtaacaaattatggaacgcaagccgttttgtgttaaccaatgacaaattggatctcagcgaaggcagcgtggaatattctgtggcagatcgttggattcagtccgaatttaatcgtacagtagaagccttccgcaatgccttagcacagttccgttttgatttatgtgcaaccgccttgtatgagttcacctggaaccaattctgtgactggtatttggaattgacgaaacctgttttggttaacggtagcgtggcgcaaaaacgtggggcgagccaaaccttgatcaacgtgctagaaaaattattgcgtttaacacacccagtgatgccatttatcacggaagaaatttggcataaagtgaaagcgtttgcgggagtaagtggcgataccattatgctccaagctttccctcaatttgagcaaagtgccttggattatcaagccgaagcggaaatcaactggatgaaagaagtgattgttgcggtgcgtaatatccgtgcagaaagcaacattccaccaagtaaaggcttagatttattattgcgtaatctgtcagaagcggatcaaaacgcgctcgaaaacaaccgcactttaattcaagcgatggcaaaattggatgctatccgtgtgcttgaggcaggggaagatgccccactttcagtggcaaaattggtcaacaacgcagaattacttgtaccaatggcaggctttatcaataaagaggcagaacttgcgcggttgaataaagagattgaaaaataccaaggcgaaatccaacgtattgaaaacaaactcgcaaacgaggctttcgtggcgaaagccccaccggcagtgattgaaaaagaacgtgccaaaatggcggaatacgcagaagggttaaataaactcaaacagcagtatttggcgattgaggcgttgtag

SEQ ID NO: 30922 - DNA, 429 bp, Pasteurella multocida
atgtctaaacacgcgcaattttatttgttaagtgagcaagcacaaatggaaaaaatggcttgtgattttgccgcatccgcgtggcgtcttggtaagcgcgtgttaattgcttgcgaaactgaacaacaagcgttggatattgatgaagccttatgggcaagagaggcagatgagtttgtgccgcataatttatcaggtgaagtgacgacgtatgctacaccgattgaggtgagctggaaaggtaagcgtaatgcgcaacgccgagatctcttgattaatttacaggtagaggtaccagattatgtcagcagttttacacaggtgattgattttgtgccagtggaagagcatttaaaagtgctagccagagagcgttataaacaattacgacaacttggctggcaattatcaacagagcaaatcaagtaa

SEQ ID NO: 30923 - DNA, 1203 bp, Pasteurella multocida
atgggaatttatcaattaacaggtcgtttacagcattacgtttggggtgggaaagactatttacctgccttacttgggatgaaaaaagaaacagaacagtattatgcagagtggtggttaggtgcacatgtgtcagcaccgtccatgcttgatgttgagggcaaagaaacgtcgttagctacatttttagctcaaaaaccaaccgcacttggcgacaagagcctgtcccagtttggttcagaattgccttatttattaaagattttagatgtggcaaaacccttgtctattcaattacatccgacaaaaaaacaggcagagatcggatttgcgcaagagaatgcgcaaggcattgccttaacaagtcccattcgtacttataaagacaataatcacaagccagaaatgatgattgcattatccgatttttggttattacatgggtttaaaacgaaacagactatgcttgcaaccttaaatgcacgtccttctttacaaggactggcaacgaagcttgtacaacaagatatgcatgctttttatgctgacattatgcaagcagatcaagaacagttatctcaatggttattgccgattatagaagaaaataaagcgaaatatgccgcgaatcaacttgagctgagcaatccagattattgggttctttatacgatggaggcgatggggattgcaccgtcaaaattggatgcaggtcttgtttgcttttatttatttaatattgtgcacttacgcgaaggcgagggcattttccaagatgcgggtattcctcatgcgtatttacgtggacaaaatattgaattaatggcgtgttcagataatgtgattcgcggtgggttaaccccaaaacatgtggatatccaagccttgctagcgattattgattgtcgtgaagtggtacctgagattattccagtggcaccagcacaacaggcttattttacttaccatactcctgctaaagattttgcgcttactcgatttaactattgtcaaggacaaacacagtcctgccaggcacaaagtgcacaaattttgttagtgatgaaaggaaagcttaccctgtctcaaggcacgcaggtacttgaattaaaacagggtgaatcagcttttattgaaagtgaaactagctatcaaatcacaggtttggaagagggctattgtgtcatttctgcactgccttaa

SEQ ID NO: 30924 - DNA, 975 bp, Pasteurella multocida
atgacaattgctattatgatagcgactcatggggtagcagcagagcaattgctgaaaactacggaaatgttgattggtgagcaagacaatgttgccactatcgattttgttccgggagaaaatgctgaaactatcatgaccaaataccaagaaaaactatcaaccactttatcccattgtgatgaggtgttgtttttagtggatacttggggtggcagtccatttaatgcggcaaatcgcgttgctgatggtaagccaaatatggacatcgtgactggggtaaatgtcccgatgttagtggaaacctttatggcacgtgatgatggaccaacattacctgaattggtagcgattgcgcttgaaacgggtcgcaccggtgtgcgtgcattacgctatgaggaagaggaagtcgcaacaccagtccaaaatgtggaagaaaaacccgttgaaccgacagttgttaccgcaaatggtgttgggcatttagaaattggtttggcacgtattgatgaccgtttaattcatggtcaagtcgcaacccgttggacgaaagaaagtaaagtgagccgtattgttgtggtcaatgatgatgtggcgaaggacagcgtacgttcaaccatgttgaaaagtgttgcaccgccgggcgtaactgcacatgtcgtggatgtagaaaaaatgatccgtgtatataacaacccagaatatgcgggcgagcgtatgatgttattgtttactaatccgaccgatgttgtccgtttaatggaagcaggtgtggcgtttaaatcaattaatgttggtggtatggcgtataaagatggcaaaaaaatgatcaccagtgcggttgctgtcgatgataaagatattgaggcatttaagaaactggatgcacaaaacattgagcttgatgtgcgtaaagtctcaaatgatagccgtcagtatatgatggatttattaaagaaaaataatctcatctaa

SEQ ID NO: 30925 - DNA, 1218 bp, Pasteurella multocida
atgaatgacaatgtcaataaagacggctggaaagctttattaggatctgctgtcggctatgcaatggatggtttcgatcttcttatcttaggttttatgttatcggcgatttctgccgatctcgccttaacccccgcccaatcgggctcacttgtcacttggacactgattggcgctgtcgccggtggcattatttttggcgcactcagtgataaatacggtcgtgtacgtgttttaacgtggacaattgtactctttgcggtctttaccggactgtgtgcttttgcacaaggttactgggatctcttgatttaccgtaccattgctggcatcggtcttggtggcgaatttggtatcggtatggcattagccgctgaagcctggccggcacgtcatcgtgctaaagcctcttcttatgttgccctaggttggcaagtgggtgtactgggtgccgcacttctcacaccgttattattaccgcacattggctggcgcggcatgttcttggtgggcattttccctgcatttgtcgcatggtatttacgtgccaaattgcatgaaccagaaatttttgtcaaaaaacagaccgcacttgagcgtcagaaaacttctcgtttagagcctttccgcttactgattaaagataaagcgacagcaaaaattagtgccgggatcgtggtattaacctcggtacaaaacttcggttattacgggatcatgatttggatgccaaatttcttatcaaaacaactgggatttagcttgaccaaatcaggtgtctggaccgctgtcactatttgcgggatgatgtttggtatttggttattcggtcaacttgctgaccgcattgggcgtaaaccaagtttcttactcttccaattcggtgcggtgatcagtatttttacctattctcaaatgtcagatccaacctatatgttgtttgctggggcagttttagggatgttcgtcaacgggatgatggggggctatggtgcattgatgtcagaggcatacccaacacaggctcgtgccacagcacaaaatgtattatttaacttaggacgtgctgttggaggatttggaccaattgtggtcggcgcattagtttcaacttactctttccaattggcaatcgctttcttagccagtatttacattatcgatatgattgcgacaatcttcttgattccagaattaaaaggtaaacaattggattaa

SEQ ID NO: 30926 - DNA, 2700 bp, Pasteurella multocida
atgattaggaagttttcaatgaccgatttagtccaagatactatgcatcaagatattagcccaatcagtattgaagaagagctgaaatcctcatatctcgattatgccatgtccgtcatcgtagggcgtgcattacccgatgtacgcgatggtttgaaacccgtccatcgccgcgtattatttgcgatgcacgaaggcgggaatgcctataacaaaccttatcgtaaatccgctcgtatcgtaggggatgtaatcggtaagtatcaccctcatggtgatagcgcggtctatgacacactcgtgcgcatggctcagccgttttcattacgttatatgttagtagatgggcaaggtaacttcggttcaattgatggcgatgctgccgcggcaatgcgttatactgaagcccgcatgactaaaatcgcccatgaattattagcggatctcgataaagaaactgtcaattttgtgcctaactacgatggctctgaacaaattcctgaagtcctcccaactaaagtccctgcgcttttagtcaacggttcttccggtattgcagtcggtatggcaactaatattccccctcataacttaggcgaagtgttagacggttgcttagcgtatatcgaaaacaacgagatcagcattgatgagttaatgacttatattccaggtccagacttcccaaccgccgcattaatcaatggtcgcaaagggattgaagaagcctataaaacaggacgtggtaaaatttatgtacgtgccaaagccgaagtggaaaccgatgaaaaaggcggtgaaaccattgtggtgcatgaaattccttatcaagtcaacaaagccaaattaatcgaaaaaattgctgatctcgtaaaagagaaaaaagtcgaaggcattagcgcaatcacggatttatctgacaaagacgggatgcgtattgaaattaaaatcaaacgtgatgccgtgggcgaagtggttctcaacaacttgtatgccttgactcaattgcaagtcacttttggcattaacatcgttgccctcgataaaggtcaacccaaactgctcaatttaaaacaattaattgaagctttcgtgttacaccgtcgtgaagtagtcacacgccgtaccgtttatgaattgcgcaaagcacgtgagcgtgcccatattttagaaggcttagctattgctcttgccaatgtagatccgattattgaattaatccgcaatgcgccaaatcctgaaagtgccaaacgtgcattattagcgcaagcatgggagcttggccatgtatcacaaatgcttgctgccacaggggttgatgcggcacgtcctgaagatctagaagaacaatacggtattcgtgatggcatgtattatctgaccgaagttcaagcacaagcgattttagatttacgtttacaaaaactgactaacttaggtcatgatgaaattcttgatgagtacaaaaaactcctcgatgtgatcggcgaattattacatatcttacgtagccctgaacgcttaatggaagtgattcgtgaagaattagaacaaattcgcgaacagtttaatgatccacgtcgtacagaaattaccgcgagctctgctgatatcaatcttgaagacctcattgcccaagaagatgtggtggttaccctttcacatgaaggttacgtcaaatatcaaccccttactgactacgaagcacaacgtcgtggtggtaaagggaaatccgcagccaaaaccaaagaagaagatttcattgagcgtcttttagtcgcaaacacccatgacaccattctctgtttctcgagtcgtggacgcttatattggttaaaagtgtatcaactcccacaagctagccgtggtgcacgtggcagaccgatcgtcaatattcttccattagatgaaaatgaacgtattaccgcgattctacctgtcactgcttatgaagaggacaaatttgtcgtgatggcaactgccggcggtatcgtgaaaaagattgccttaactgaattcagtcgtcctcgttcaacaggcattattgcactcaacttgcgtgatgaagacgaacttatcggtgtggatatcaccgatggtcaaaatgaaatcatgctcttctccgcacaagggcgtgtagttcgctttagtgaaaatgccgtgcgtgccatggggcgtgcagcaacaggtgtacgcggtattaaactggcgttaacgaatgatttgtcggatgatgaaagtgcggtcgatatggaagagatctctgatgagaatactaatgatgccttggatctcaatattgataaagtcgtgtcacttgttattccaaaaaatgaaggcgccattttaaccgccacacaaaacggttatggtaaacgtactgaattagcggaatacccaactaaatcacgtaacaccaaaggcgtgatctcgattaaagtgagtgagcgtaacggcaaagtcgttgcagcaacacaagttgaggaaagcgatcaaattatgctcattactgatgccggtacgctagtacgtactcgcgtaaacgaaatcaatattatcggtcgaaatacacaaggagtacgtctcattcgaacaagtgaaagtgaaacactggttggattacaacgcgtttgtgatgtcgatgaagaagacattgagagtgatgcgagcgaaagtgcggtcgaaagcgcagaaagttaa

SEQ ID NO: 30927 - DNA, 369 bp, Pasteurella multocida
atggcatattatcttatttatctacacattgcttgtgcctttctcagcctcagtctatttattatccgtggcatgatgcaattaacaggcaaaaattggcgagacagaaaagtattaaaaatcttaccgcacttaagtgatacgctgttgttctgttcgggaattgggctatttcttctttttcagcaaagtgtaacaacatggttcatttacaaaatgctctttatcgccctttatattgtcgttgctaccattttctttagccgaaaaaggctaacatcacctttcagccaaaagaaaaatcgcttctactttattacggcactcatcttctttctcagtaccatggttattgcttatttgaaataa

SEQ ID NO: 30928 - DNA, 558 bp, Pasteurella multocida
atgaaaccaaatattcctatattccttacgcttttccgtgtcattttaattcctttttttgtcattgcattttatttgcctttctcgtggtcgccttttttaactgtattgattttttttattgctggcgtcacagattggtttgatggttatcttgcacgaaaatggaaacaaacgacacgttttggcgcatttttagatcctgttgcggataaagtgatggtaacagtcgccctcgctttggttgttgaatatcaccattctttttggattactttgccagcagtgatcatgatttctagagaaatcatcatttccgcattaagagaatggatggctgaaattggcgacaggaataaagtggcggtatcttggctcggaaaagtgaaaaccacagcacaaatgttagcgttaggtggattgttgtggcgctataatgtggtgatggaaattgctgcgattgttttactgtatgttgcggcgattttaaccgtttggtcgatgttacaatatttaaaagcggctaaaggcagcttactttcggatattacactttaa

SEQ ID NO: 30929 - DNA, 1749 bp, Pasteurella multocida
atgcaagataaagatctttcaacagtacagacatttaaacggttatggccaattattagcccttttaaacttggattagtggtatctggtattgccttagtgattaatgcattagctgatgcaggattaatttctttattaaaaccgcttttagatgaaggctttggcaaggcagatgtttcttttttacgtacaatgtcatacgttgtggtccttgttatcttcctgcgtggtatcagtaattttatttcatcttattgcttatcttgggtttctggcaaagtggtgatgattatgcgtcgtcgcatttttaaacacctgatgtttatgcccgtccctttttttgaccaaaactccagcggacgactgttgtctcgcatcacttatgattctgagctagtagcgaattcctcttcgggggcgttaattacaatagtcagagaaggtgcctatattatttctttgttagcggtgatgctttataccagttggcagttatctattgttctgtttttaattggtccgattattgccgtgctcattcgttttgtttcaaagcgttttcgcgaattaagtaaaaatatgcaaaactcaatgggagaattgacctctactgcagaacaaatgttaaaagggcataaagtagtactctcttttggtggacaaatagtggaagaagagcgtttcaaccatgtgagtaacgatatgcgccgtaagggaatgaaaatggcagttgccgatgcgatttccaatccagttgtgcaaattatagcttcttttgccttggcagctgtgttgtatttagcgacagtcccaaccattatggatcaaaatctaacagcgggttcctttactgtcgtcttttcatcgatgctagcgatgatgagaccgctaaaatccttgacgaacgtgaatgcacagtttcaaaaagggatggctgcttgtcaaactttgtttgcgttattagatttagaaacggagaaagatctaggaacacataaaggggaaaatgttcaaggctatttgagctttaaaaatgtcacttttacttaccaaagtcgcgatgagccagcattacgtaatttatcttttgatgttgaaaaagggaaaactgtagcacttgttgggcgttctggttcgggtaagtcaacgatcgcgaatttggtgacgcgtttttacgatgttgatcaaggtgaaattacattagatggcatcaatattcaagattatcgtttatccagtttacgtaagaactgtgcggttgtttcacaacaagttcatttatttaatgacaccattgcaaataacatcgcctatgcggcaaaagacaaatatagtcgtgaggaaattattaaagccgcaaaagatgcttatgctatggagttcattgaaaagcttgaacatggcttagatacggtaattggagagaatggggtgaatttatctggaggtcaacgtcagcgtttggcgattgctcgcgcattattgcgaaattccccagtgttaattttagatgaggcaacttctgcattggatacagaatctgaacgctcaattcaattagcgttggagaaattacagaaagaacgtaccgtcattgtgattgcacatcgcttatctacgattgaaaatgctgatgaaattttggtaattgagcatggtgaaattaaagaacgtggttcacatagcgaactgcttgcattaaatggtgcatacaaacagttacatcatattcaagttaatcattaa

SEQ ID NO: 30930 - DNA, 438 bp, Pasteurella multocida
atgtctaaatcctctttaagtatattagccctagctggtgttgaaccgtataaagaaaaggtcggcgaagagtacatgaatgaagtgcaattacttcatttcaaaaaaatcttacaagcatggcgtgaccaaattgtagaggaagcaacccgtacagttgctcatatgcaagacgaagcgtctaacttcccagaccctgcggatcgtgcaacacaagaagaagaatttagtttagagttgcgtacacgtgatcgtgaacgtaaattgctcaaaaaaattgagaacacattgaaaaaattagaaaccggcgattttggttactgtgattcctgtgggattgaaattggtattcgtcgcttagaagcacgcccaaccgctgatctttgtattgattgtaaaacgcttgccgaaattcgtgaaaaacaaatggttggctaa

SEQ ID NO: 30931 - DNA, 1506 bp, Pasteurella multocida
atgaggtctattattttaaaatacatcaaaaatctgtttaataaaaaaacaaaatcctatttagtcgaaagagaaaaaacagattctactccattattatccaaaaacgcacattctgagcccataacaacaagcgagattcggaatgtgtcaaatagcaaacaagccaaactttcgcaccattacaataaatcgatttttaaagcatcgcagtacggtattactccccgcatgattaatcgcaatgccttagggattgtggaaaaactgcatcgccatggttttgaagcctatattgtcggtggctgtttaagagatttattgcttgggaaacacccaaaagatttcgatgtggcgacgaatgcattaccagaacaaattcaaacgatctttcaacgtcaatgtcgtttagtcggtcgtcgtttccgattggcccatatcatgtttggtcgagatgtcattgaagttgcgacctttcgtgcaagtcataatgaaaataatcatgaaagcctcgctaaacaaagcaaagaaggcatgctgttacgggataatgtgtatggcacattagaacaagatgcggaacgccgcgattttaccgttaatgcactgtactataacccacaagataataccctgcgtgattattttcatggtattgaggatctcaaagctggcaaattacgcttaattggcgatccggtaaaacgttatcaagaagatcccgtgcggatgctacgctcagtacgtttcatggcaaaattggatatgttccttgaaaaaccaagcgaacagccaattcgtgagctagcgccgttacttaaaaatattccaccagcaaggctatttgatgaatgtttaaaattactccaagctggatacggcgtaaaaacctataaactgttacgtcaatatggactatttgagcaactcttcccttcactgatgccttatttcacagagaaaggtgacagtcttgcagaacggatgattctcaaagcactgacttccacagatgaacgtgtagctgacaaattacgcatcaatcccgcgttcttatttgccgctttcttctggtatccattacgtgaaaaagtggagatgttgaaaaatgaaggtggattaaataatcatgatgcctatgccttggctagctctgaaattttagatttattctgtgccgcccttgccgcgcctcgtcgtcacactgctgtgatccgagatatctggtttttgcaattgcaattactcaaacgttcaggacagcaacctattcgcacgatggaacaccctaagttccgtgcggcgtttgatctattagcaatgcgctcagaggttgaaggtggagaaaccattgagcttgcaacctggtggcatgaatatcaatttagtaattcagaacaacgtgatcacttggtcaaagagcaacaacgtttacaccctaagccgaagaaaaaatattatcgtgcgagaaagcgtcgtaagcctaaagccatctcgtcctcatag

SEQ ID NO: 30932 - DNA, 498 bp, Pasteurella multocida
atgaagtctgtctatattgcattaggaagcaatttacaaacaccaattgcgcagttagaggcggctctggcggcattagctaacttacctacaactcagttaatccatgtcagttctttttaccaaagcaagccacttggtccacaagatcagccagactacgtaaatgcggtagcgcatttacgaactacgttaccgcccttaacgctccttgatcatttacagcagattgaaaatacacaaggtagagtgcgccttcgccgttggggtgaacgcactttagatctggatattttgctttatgataatgttgtctgtcagactgaacgcttaacccttccccactacgatatgaccaatcgagaatttgtgatcatccctctgtttgaaattgcccctgatttatgtttaccgagtggacaacctctgctggaattaaggaaaaaattcgaagatcaccaaatgcagaaaatacgtacagaacctagtcttgattag

SEQ ID NO: 30933 - DNA, 492 bp, Pasteurella multocida
atgcgtagaattttatcagtattattagaaaatgaatcgggagcattatctcgtgtggtaggcttattttcacaacgtgcattcaatatagaaagcttaactgttgcccccactgatgatcctacattatctcgtatgacaatcgaagcttatggagatgagcaagtactcgaacaaatcgagaagcagctacataaattagttgatatttttaaagtgatcagtttaagcgactgtgaccatgttgagcgtgaagtcttactgattaaagtgagagcgcaaggcgcatcacgtgatgaactaaaacgtttaacagatatttaccgaggtcagattgtggatgtgacaacgaaatcctataccattcagttgacggggacgaaagataaactagatgcgtttatttcagcagtgaaagaggaaacgacgatcattgagattgtacgttctggtctaatcagtttatctcgtggagaaaaaaattgtttataa

SEQ ID NO: 30934 - DNA, 1725 bp, Pasteurella multocida
atgaaaaagttatctggcgcagaaatggttgtgcagtctttgcgagatgaaggcgttgagtttttatttggttatcctggcggatcggttttagatatttatgatgcgattcataccttggggggcattgaacatattcttgtccgacatgaacaagccgctgtgcacatggcagatggttatgccagagcgaccggtaaagtgggttgtgttcttgtgacatccggacccggtgcaactaataccatcactggtattgcaacagcgtatatggattccgtgcctttgattattttatctggacaggtgatgtcaggattaattggcagtgatgcttttcaagaatgcgatatggtgggtatctctcgtccagtcgtcaaacacagttttttagtgaaatctgcggctgaaattcctgaaaccattaaaaaagctttttatattgcgtcaacaggcagaccgggacctgtggtgatcgatttgccaaaggatgtggttaatcctgcacataaatttacttatcattatccagaaagagttgaattacgttcttataatccaacaatacaagggcataaagggcaaattaaaaaagcattaaaagccttattagtcgcgaaaaagccggtgttatttgttggtggtggtgtcatcactgcgaattgtagcgacaaattaacgcaatttgcacaaaccttaaatttgccggtcacttcctccttaatgggattaggtgcctatccaagctcagataagcaattcttagggatgttaggcatgcatggtacttacgaagcgaataatgcaatgcatcatagtgatctcattcttggtattggtgtgcgttttgatgatagaacgactaataacttggcaaaatattgtccacatgcaaaagtgattcatattgatattgatccaacgtctatttctaaaaatgtattggcatctattccaattgtgggcagtgcagaaaaagtcattaatgaatttttagccttattagaggatgacaatttattaaaatcgcaaactgccttggatgaatggtggcagcaaattgatgaatggaaagcagtaaaatgtctctcttttacacgagatgattccgtcattaaaccacagcaagtgatggaagtggtttatcgattaacacaaggtgaggcttatgtcgcctcagatgttggacaacatcaaatgtttgcggcattacattatccgtttaaccaacctcggcgttggattaactctggtggcttagggaccatgggctttggactaccagccgcacttggggtaaagctcgcttatcctgactcaacagtggtgtgtgtgacgggggatggcagtattcaaatgaatattcaagagctttctactgcacagcaatatgatattccaattgtgattatcagtttgaataaccgctttttaggcatggtgaaacagtggcaagatctgatttattctggacgccattcacagtcttatatgaattctttacctgattttgtgaagcttgctgaggcttatggacatgtgggtatccaaattaatacgccagatgaattagaggaaaaactcactcaagcattttcgatgaaagataaattagtatttgtcgatattaatgttgatgcgacggaacatgtttatccgatgcaagtacgtggtggtgcaatgaatgaaatgattttaacaaaaccggagaaggcgaatgcgtag

SEQ ID NO: 30935 - DNA, 837 bp, Pasteurella multocida
atgattgaaaataaaatattattaaccgattgtccagatgataaaggtttaatcgcaaaaattaccaacatttgttacaaacatcagctcaatatcattcataacaatgaatttgtggattttgacacaaagcatttctttatgcgcactgaactacagggcatttttaatgaagataccttattagctgacttaaaatttagtcttccagagggaacaaattgtcgcttaattagtgcgaaaagaaaacgcattgtcattttagtcaccaaagaagcgcattgccttggcgatattttaatgaaaaattactatggtggtttagacgtagaaatcgctgcggtgattggtaatcatgatacgttaagaacattagtagaacgctttgacatcccattccactacattagccatcatgatctcacacgagtagaacatgataagttacttgcagataaaatcgatgaatatacaccagattatattgtgttagcaaaatacatgcgggtactcaaccctcagtttgttgaaaaatatccaaatcgagtgatcaatattcatcattcttttttacctgcatttattggtgcaaaaccttatcaccaagcttatgaacgtggtgtcaaaattattggcgcaactgcacactttattaataacgaattagatcaaggtcctattattatgcaaaatgtgatcaacgtggatcacacttataatgcagaagctatgatgcgtgcaggacgagatgttgaaaaaacagtattaagccgtgcattagatctggctttgcacgatcgtatttttgtttacaaaaataagacggttgttctctaa

SEQ ID NO: 30936 - DNA, 1137 bp, Pasteurella multocida
atgtacgcgtttgttaatgccgtaatttacactgcaaaagacgtactttatggtaaagcgcttgttgtcgatggcgataaaattagtgcaattctacccgtagaagacgtgccagaaaatcttcagaaaattgatttacaagggaataatttaactgcaggttttattgatcttcaattaaatggctgtggtggtgtgatgtttaatgaagatattagcgtgaagacgttagagatcatgcaagaaactaatttgaaatccggcacgacaagttatttaccaacctttattacgtcacctgatgaaggaatgaaagacgcggtgaaggtgatgcgtgagtatttaactcagtataaaaatcaagcattaggtttacactttgaaggaccatatttgagtgttgagaaaaaaggggtacatcgcgaagaatatattcgtgcgataagcccagaaatgaaaacattcttgtgtgataatgcagatgtgattactaaaatcacgttggcagccgaaaatccaacggcacagtatattccagactttgttgaaaaagggattatcgtctcgcttggacactcgaatgcgacttacgatgtcgcacaacaggctattgagaaaggggcgagttttgcaacccatttacataatgcaatgtcaccaatcagctctggacgagcgatgggagtagtgggcgccgtattagattctgatatctatacaggtattattgtggatggtttacacgttgattatggcaatatacgactcgacaagaaagtaaaaggcgacaaattgtgtattgtgacagatgcaactgctgcagccggtgcagacattgactcctttgttttcgtcggtaaaaccgtctatgtgcgtgatggtaaatgctatgatagcaatggtacattaggtggcgctgcaatcacgatgattgagtcagtgaaaaatgcggtacaggaagttggcattccattggatgagacattacgtatgtgtaattactatcctgctaaagcaattggtgtggatcataaacttggctcaattgaagtgggtaaaatcgcgaatttaacagcattcacaaatgattttaacgtgttgggtacagccgtgaatggtgaatggaaagcgaagtaa

SEQ ID NO: 30937 - DNA, 804 bp, Pasteurella multocida
atgcgtttaattccattacacaatgttgatcaagtcgcaaaatggtctgcacgttatattgttgatcgtattaatcaatttcaaccaacagaagcgcgcccattcgtattaggtttgcctacgggtggtactccgctgaaaacctatgaagcgcttattgaactgtataaagctggtgaggtgagctttaaacatgttgtgaccttcaatatggatgagtatgttggtttaccaaaagaacatcctgaaagctaccattctttcatgtataaaaacttttttgatcatgttgatattcaagagaaaaatatcaatatcttaaatggtaataccgaagatcatgatgccgaatgtcagcgttatgaagagaaaatcaagtcttatggcaaaattcatttattcatgggcggtgttggtgtagatggtcatattgcttttaatgaaccggcttcatccctttcctcacgtacgcgtataaaaacgcttacagaagatacgctaattgccaactcacgtttctttgataacgatgttaataaagtgcctaaatatgcactcaccattggtgtggggacgttacttgatgcagaagaagtgatgattctagtcacaggttataataaagctcaagctttacaagccgctgtagaaggtagcatcaatcatttatggaccgtcaccgcattacaaatgcatcgccgagcgattattgtgtgtgatgaacctgcgacgcaagagcttaaagtgaaaacagttaaatattttactgaattagaagcctctgctattcgtagcgtgaaataa

SEQ ID NO: 30938 - DNA, 1458 bp, Pasteurella multocida
atgagcattctaagttacttacaaagaattgggcaagcattaatggtgccagttgctgcactacctgctgctgctatcttaatgggtattggttactggattgacccgaatggttggggtggagaaagccagcttgctgccttcttgatcaagtctggtgccgccattattgacaacatggcaattctgttcgccgttggtgtggcatttggtatgtctaaagataaacatggttcagccgcactgtcgggcttagtgggctttttagttgtcaccaccttgctttctccaggtgctgttgcacaattacaaggcattgctgccgatcaagtccctgccgcatttggcaaaattaacaaccaatttattgggattttagttggggttatttctgctgaattatataaccgcttccatcaagttgaattaccaccagcgttagccttcttcagtggtaaacgtttagtgcctatcgtgacctctgtcgtgatgatcgttgtgtctttcatcctcatgtacttatggccagtcatttttaatggtttagttggttttggtaaatcgatcacggatattggcgcaactggggcgggtatctatggtttcttaaaccgtctcttaattccagtcggcttacaccacgctttaaactcagtgttctggttcaatgtggcgggtatcaacgatattcctaatttcttaggtggtgcacaatctcttgcaaatggtactgccgttcttggtgtaacaggaatgtatcaagctggtttcttccctgttatgatgttcggtttacctgccgccgcattagcaatctatcatagtgcaaaacctggtaaaaaagcacaagttgcctcattaatgattgccgcatcattagcttcattcttcacaggggtaacagagccattagaatttgcgttcatgtttgtggcgccagtcttatacgtcattcacgccttattaactggtctttctgtctttattgcagcctcaatgcaatggatggcaggttttggtttcagtgcaggtttcgttgatatggtactttcttcacaaaacccactggctaaagattggtacatgttactcgtacaaggtcttgtattcggtgtaatttactatgttatcttccgtgctgcaatcaaagcgttcaatttaaaaacaccaggccgtgaagaagaggaagtggaaatcaatgtgaaaaaagacgcctctcgtgaagaacgtgcggctaacttcatcgttgcattgggtggtaaagataacttccaagctatcgatgcttgtattactcgcttacgtttaacattagttgatcgtagcaaagtgaatgaagagcaattaaaagcactaggttcaaaaggtaatgtcaaattaggtgacaatggtttacaagtgattcttggacctgaagctgagctagtagcggatgcaatcaaacaacaagtcaagtaa

SEQ ID NO: 30939 - DNA, 1950 bp, Pasteurella multocida
atggcactcatttctctcaccaatggatatctttcctttagtgatcatcctttattagatcataccgacttgcatattgaagccggtgagcgggtttgtttagttggacgtaatggcgcaggtaaatctacgctaatgaaaatcttggcgggtgatgtcattatggatgacgggcgtttgcagtttgaaaaagagattgtcgtttcccgtttagagcaggatccaccgcgtcatgcgagtggcaatgtgtttgattatgtcgctgaaggcattgaacatttagccgatttattaaaagattaccatcgcatttctttgttattggaacaggactgcagtgatgcggtcttaaatcaattggcacaagtgcaagcgaagttagatcatgcagacgcttggcgttttgaaagtaaaattaaagacgtgttggcgacattatctttacatccggataccttgttatctgaattatcgggtggttggttacgtaaagccgcattagcccgtgcgcttgtttgtgatcctgatgtgttgttattagatgaaccgaccaaccatttagatgtggatgcgattgaatggttagaaaactttttacttggtttttcgggtagcattatttttatttctcatgaccgcgcttttattcgtaaaatggcgacccgtattgtggatttagaccgtggcaaattagtgtcttatccgggggattatgatttatatcttagtacaaaagaagaaaatcttcgcgtagaggctctacaaaatgagttatttgataaaaaattggctcaagaagaagtttggattcgacaggggattaaagcacgtagaacgcgtaatgagggacgagttcgcgccttaaaagctttgcgtgaagaacgtcgtcaacgtcgtgaagtacttggtacggcaaaactccaactcgataattctagtcgttcaggcaaaatggtgtttgagatggacaatgtgacttatcaagtggcaggcaaaaccttattaaaagatttcagtaccaccattttacgaggtgataaaattgccttagtgggaccgaatggttgtggtaagacgacatttattaaattgttacttggtgaaattcaaccaacttcaggtactgtacgttgtgggaccaaattggatattgcttattttgatcaatatcgtgccgaactcgatccagaaaaaacggtgatggataatgtggctgacggtaaacaagatattgaagtgaatggcattaaacgtcatgtcttaggttatttacaagattttctctttcctccgaagcgggcgatgacacctgtgaaagcgttatcaggtggagagcggaaccgtttattgttagcaaaattattactcaaacctaacaacttattgattttggatgaaccgaccaatgatcttgatgttgaaacgctggaactattagaagaaattctaacagactatcagggtacgctattaatcgtgagtcacgatcgccaatttattgataataccgctgcggaatgtttcatttttgaaggcgaagggattgtgaatgaatatgtcggtggattccatgaagcgaaacagcaacaagctaactcttttgcgcataaagcagaacaagctgcgttgaaacagaaaaagcctgctagtttagaaagtgcggtcgatatcacgaaaaattctgtttccaacaaatctcaaaccaaagcaataaaactgacttataaagaacaacgcgagttagaacaattgcctcaacgtttggaaacgttagaagcggaaatcaattccttacaagctgaaattgcgggtagtgaattttttcagcaatcgcatgaatacacctctgcaaaattgcaagcattagccgaagccgagcaagcgttagaagaagcgtttatgcgttgggaaaccttagaggaaaaacaaaatttaagtaaatcaggctaa

SEQ ID NO: 30940 - DNA, 1431 bp, Pasteurella multocida
atgtttcaatattccgcagaatttaaacaagcaaaagtgttggtattgggcgatgtaatgcttgatcgttattggtttggggcgacaaatcgcatttcaccagaagcaccggttcctgtggtacgtgtacaagataacgaagaacgtgcaggtggggcagccaacgttgcgatgaatatcgctgcgttaaatgtgccagtaaaattattgggcttaacgggacgagatgaaaccggtcttgccttagaaagtttattagccaaaagccgtattgaatgtgattttgtacaattacatactcatcctaccattacaaaattacgtattttgtcccgccatcaacaattattacgcttagattttgaagaagacttccaaaatgtgacgagcgatgcgttattgcaaaaattagacagtgcgttacaaaattatggcgcattagtgttatccgattatggtaaaggcaccttaaatcaagtgcaaaaaatgattcaacttgcacgccaagccaatatccccgtgttaattgatccgaaaggaaccgattttgaacgttatcgtggtgcaaccttattaacaccgaatatgtctgaatttgaagcggtggttgggaagtgtgattctgaagaagagattatcgaaaaagggttgaaattaattgagcagatcgacctgagtgcgcttttagtgacacgttctgaaaaaggcatgacgttattgcgtccaaatcaaccggcatttcatttagccaccgaagcgaaagaagtatttgatgtgactggggcgggagatacggtgattagtgtgttagccacaggcttagccgatggtcgttcgtttgaagaagcctgctatttagccaatgtcgcagcagggattgtcgtgggtaaattagggacctcaaccgtttctacggtggaattagaaaatgcaattcacggtcgttctaataccggatttggtattatgagcgaagccgaactgaaacgcgtagtggcgcaagcgaaggcgcgtggtgagaaaattgtgatgactaatggctgttttgacattcttcacccgggacatgtgtcttacctcgaaaacgcacgtaaattgggcgatcgcttaattgtcgcagtgaacagcgatgactcagtcaaacgcctaaaaggtgaaacccgcccaattaatgaccttcaatctcgtatggcagtattggcaggcttatcttcagtcgattggttagtggcgttccatgaagatacaccacaacgtttaattgctgaagtattacctgatttattggtgaaaggtggcgattacaaaccagaagacatcgccggtagccaagaagtttgggcgagtggtggtgatgtaaaagtattaaactttgaaaatggttgttcaaccagtaatgtgatcagtaagattcagcagttaaaagattaa

SEQ ID NO: 30941 - DNA, 615 bp, Pasteurella multocida
atgcatcatctgattatttttgcccatccaaatagccaaacgagttttaatcgggcgattttggaagctactttgcaggctagccaacagttagacgtgcacaccgtggtacgagatttgtacacgctcaatttcaatcccattttatcttgggaggaaatgcaagcggtttaccaagagatcattcctgctgaagtcaagtttgagcatcaactcattgaacaagcgaatttaatcaccttagtttatccattatggtggatgggctttcctgcgatcctgaaagggtatttggatcgtgtattaagctatggttttgcttataaaactgaaaatgaacaatctgtaggcttattaggtggtaaaaaaatgcaacactttatcacgattggcaataacgtagagatttatcaaaatatggggtttgcacaatcgctgaaagattgtttagtggacggattattcaattattgtggcatcactgatattcagcatgagctgtttggtgatattcatttgattgatgatcacgcgcgtcacgctatgttgcaaagggtcagtgagaaaacgcaagaaaatttaaccgcacttttagagagaaagtatgacaactga

SEQ ID NO: 30942 - DNA, 1419 bp, Pasteurella multocida
atgaataaagaaattaaaactcaggttgtggtattaggtgcgggtcctgcgggctattccgccgcattccgttgtgcagatttaggtttagaaaccgtgattgttgaacgttattctacgttaggtggcgtatgtttaaacgtgggttgtatcccgtcaaaagccttattacacgtggcgaaagtgattgaagaagccaaagcgcttgcagagcatggtatcgtgttcggtgagccaagcacagatgtgaacaaaatccgtggttggaaagaaaaagtcattaaccagttaacgggtggtttagcgggtatggctaaacaacgtaaagtgcaagtagtgaacggctatggtaaattctctggtccaaatacgattattgttgcgggcgaagaaggggaaacgacgatcaagtttgatcatgcgattattgcggcaggatcgcgtccaattcaattaccatttattccacatgaagatccacgtatttgggattccacagatgcacttaaattaaaagaagtgccggagaatttacttatcatgggtggtggtattatcggtctagaaatgggaacggtttaccatgcattaggctcaaaaattgatgtagtcgaaatgtttgaccaagtgatcccggctgcggataaagacatggttcaaatctacaccaaacgcgtcgcgaagaaattcaatttattattagaaacgaaagtgactgcggttgaagcaaaagaagatggtatttatgtttcaatggaaggtaaagcttctgaaactcgtcgttatgatgctgtattagtggcgattggtcgtgtaccaaatggtaaattgattgatgccggtgttgcgggtgttgaagtagatgatcgtggtttcattcgtaccgacaaacaaatgcgtaccaatgtgcctcacattttcgccattggtgatatcgtgggtcaaccaatgttagcacacaaaggtgttcatgaaggtcacgtcgcagcagaagtgattgcaggcatgaaacattacttcgatccaaaagtgattccatctattgcgtatactgaacctgaagtggcttgggtgggtaaaactgagaaagaatgtaaagcggaaggtatcgcttatgaagtagcgaaattcccttgggctgcctcaggtcgtgcgattgcatctgactgtgcagatggcatgacaaaattgatctttgataaaaatacacatcgtgttatcggtggggcaatcgtcgggacgaatggtggtgaattgttaggtgaaatcggtcttgctatcgaaatgggttgtgatgcggaagatttagccttaacgatccatgctcacccaacattacacgagtctgttggtcttgcagcagaagtatttgaagggtcaattactgacttaccaaatccaaaagcgaagaaaaaataa

SEQ ID NO: 30943 - DNA, 1899 bp, Pasteurella multocida
atgtcaaaacaaattcaagtaccagatattggtggtgatgaagtgactgtgacagaagtcatggtaaaagcgggtgatacggttgcagttgatcaaagcgtaatcaatgtagaaggtgataaagcctcaatggaagtcccttcaccagaagcgggtgtgatcaaagaagtgttagtgaaagtgggtgacaaagtgtcaacgggttcaccgatgtttgtgttagaaacgggtgatgcaaaacctgctgaaacgccaaaagctgaaacagcaccagtatctgcgccagcgccagcagcaagcgcagtggttgaagtacatgtccccgatattggtggtgatgaagttaacgtgacagaaattatggtcaaagtgggtgataaagttgaggttgagcaatcgatcatcaatgtagaaggtgataaagcctcaatggaagtcccagccccaatcgcaggtgttgttaaagaaattctaatcaatgttggtgacaaagtatcaacaggatcattgattatgaaatttgaaacgggtgatgcgccagcagtagcgacaccagcacaagcgccaacagctgcgccatcagcacctgcacaaagtgcggtaaaagatgtgaacgtgccagatattggtggtgacgaagtcaacgtgacggaaatcatggtgaacgtgggtgacacgatcacagaagaacaatcattaattactgttgaaggtgataaagcctcaatggaagtgcctgcgccatttgccggtgtggtaaaagaaattttagtgaaatctggcgacaaagtctctacgggttcattaattatgcgctttgaagtagcgggagccgcaccttcagcagcaccagcacaacctgcacctgctgcacaagcggcagcaccacaagcagcaacgccagcacctgttgcaagcgcgccagcgggtgatgcagaagtaacaggtagttctgtatttgcttatgccacaccggttgtacgtcgtttagcacgtgaatttggtgtgaacctcgataaagtgaaaggtactggtcgtaaaggtcgtatcttaaaagaagacgttcaagcatatgtgaaagcagcaatcaaagcggttgaatcaggttctgtatctgcagcgccagcgggcagcggtgtagcaaatggtgcaggcttaggcttattgccatggccgaaagtggatttcagcaagtttggtgaagtggaagaagtagaactcacccgtattaacaaaatttcgggtgcaaacttacaccgtaactgggtgatgatcccgcatgttacacatttcgatcgtgccgatatcactgacttagaagcgttccgtaaagaacaaaatgtgttagcggaaaaacaaaaatggggtgtgaaaatcacgccagtggtgtttatcatgaaagcggctgccaaagcattagaagcgtatccacgtttcaatagctcaatttctgaagatggtcaacgtttaaccttgaaaaaatatgtcaatattggtgtggcagtggatacaccaaacggcttagtcgtgcctgtctttaaagatgtcaacaaaaaaggcattatcgaactttctcgtgaattaatggaagtgtcgaaaaaagcacgtgacggcaaattaactgcttcagatatgcaagggggttgtttcacgatttcaagcttagggggcttaggtacgacacactttgcgccaatcgtgaatgcgccagaagtcgcaattctaggtgtgtctaaatcagaaatggcgccagtttggaacggtaaagaatttacgccacgcttaatgttgccattatcattgtctttcgaccaccgtgtgatcgatggtgcggatggcgcacgtttcattagctatatcaatggcgtgttatctgatcttcgtcgtttagttatgtaa

SEQ ID NO: 30944 - DNA, 1728 bp, Pasteurella multocida
atgatttcaggaattccagcttcaccaggtatcgtttttggtaaagccttagtgcttaaagaagaaaaaattgtactggatatgcaaaaaatcagtgaatctcagattgattcggaaattgcacgtttttatcaaggacgaaatgcggcagtagaacagcttagtgccattcgcgatcgggcggcgaagaccttaggtgaagaaaaagcagcaatttttgaaggtcatttgatgatcttggaagatgaggagttggaagaagaaattatcgattatttgcgtacaaataaagtgaatgcgggtgtagctgcaagtaaaattattgatcagcaagtcacgatgttatctgaaattgatgatgaatatttaagagaacgtgccggcgatattcgagatattggtaatcgtttaattaaaaatattttaggcatgcatattgttgatttaggtgatatcaacgaagaagcgattttggtggcttatgatttaacgccctctgagacagcacagcttaatttagacaaagtcttaggttttattaccgacatcggtggacgtacttcacacacatctattatggctcgttctttagagctaccggcgattgttggaacaaatcatgtcacttcacaagtgaatactggcgattacctgattttagatgcggtgaataacgtcgtttacgttaatccatcacaagatgaaataacgcgcttaaaaggcttacaacaaaaactcttagaagaaaaagcagaattagccaaattaaaagatttacccgcgttaaccttagatggtcatcgtgtcgacgtggttgccaatattggtacgattcgtgatgtagatggggcagatcgtaatggggcagaaggcgtaggcttgtatcgaaccgaattcttatttatggatcgtgagcaattaccgactgaagaagaacaatttgttgcttacaaagacgttgttgaagcgatgaatggtcgcctcgtgattttacgtaccatggatattggtggtgataaagagcttccttatttaaatttaccaaaagaaatgaaccccttcttagggtggcgtgcaattcgtatcgcattagaccgtcgtgaaattttacatgcacaattgagagccgtgttacgcgcatctgcttttggtaagttagcggttatgttcccaatgattatttcggtggaagagattcgcgaattgaagtcagtcattgaaaccttaaaacaagaattgcgtaatgaaggcaaggcatttgatgaaagtattcaaatcggtgtcatggtagaaacaccgtcagcagccgtgaatgccaaattcttagccaaagaagtggatttctttagtattggaacaaacgatttaacacaatacacattagcagttgaccgtggtaatgaattaatttctcacttgtataatccaatgtcaccttctgtcttaagtttaattaaacaggtgattgatgcttcgcatgcagaaggaaaatggactggcatgtgtggtgagcttgcgggtgatgaaaaagccgcggtattacttttaggtatgggcttggatgaatttagtatgagtgctatctctgtaccacgtattaagaaattgatccgtaatgtgaattatgaagatacaaaagccttagcaatgaaggcattacagcaaccaacagccgtagaaattgaacaattagttgaagattttttagctgaaaaagcattaaattag

SEQ ID NO: 30945 - DNA, 258 bp, Pasteurella multocida
atgtactcaaaagacgttgaaattattgcaccaaatggattacatactcgtcctgcggcacaatttgtgaaagaagcgaaagcctttgcctctgatattaccgttacttctgcgggaaaaagcgcgagtgcgaaaagtctgtttaaattacaaacacttgcactcagtcaaggtacggtcattacgatttcggcagagggcgaagatgagcaaaaagccgttgaacacttagtcgcacttattccaaccttagaataa

SEQ ID NO: 30946 - DNA, 1230 bp, Pasteurella multocida
atgaaaaaatatcgttttatttcacttttctttgcaacaatactttttatttcaacaccattattcgcaaataatgtgtggaccattgctattgaccctggacatggtggcaccgatccgggtgcgattagtcgtcaattaaaaatgtatgaaaaaaatgtgacactctctattgcgagagagctcaagatgctccttgataaagatccacatttcaaaggggtactcacacgtactggtgattattttatttcggtcccgaaacgttctgaaattgcccgtaaacataaagccaaccttttgatctcgatccatgctgactcaaatttatcgcctttattacgtggcgcatccgtttgggtactttcgaatcgtcgcgcaaacagtgaaatgggacaatggttagaggatcacgaaaaacgttccgaactgctcggcggcgccggcacggttttggcctcccacaatgaaaagtatttagatcaaaccgtcttagatctccaatttggtcacagtcaacgtgttggttatgaactcggttctatcgtcttaaaacgctttgccaaaattacgaccttaaatcgaagtacgccacagcatgccagccttggcgtgttacgctcgccggatattccttctatcttagttgaaacaggctttctctcgaacgtcgatgaagagaaaaaactcagcactttggcttatcgtaaaaaagtggcttatatgatttacgaaagcctagtggaataccgtaaaaaatcagttgcgaatgagccaaaaaccaaatccccaacaacagtcgaaagcagtgcaacacagacgacgctcacagacagtggactacgtcataaagtcaaagcaggggaaaatcttaccggcgttgcacgcaaatatggggtgaaagtgaatgatatcttagcactcaataaattaaaacgacgcgaattatggattggtgaaaccttaaaaattcctgctagcggaaaagccagtgaaaaaaccacaccagctacaaccagtaaagtggcagaaacaaaaacgaaagtcgtaagcaacacaacatcggaatcaaaagagaaactgccgaaataccataccgtgaaaaaagggcaaacactctacgcgattgccagagagtaccatattccaccaaatcagctattaaaattaaatccccatttaaaagatggcaaagtgttaacaggacaaaaaattaaattgagagattga

SEQ ID NO: 30947 - DNA, 1854 bp, Pasteurella multocida
atggcgattaaagttctttctcctcagcttgctaaccagatcgccgcgggcgaagtcgttgaacgcccagcttctgtggtgaaagagttggtcgaaaatagtttagatgcgggcgcaacacgtattcaaatcgatattgaaaacgggggcagtactttaatccggatccgtgataatggtattggtattgcaaaagacgagctaagtctggcactagcacgtcatgctacaagcaaaattgccagtctagatgaccttgataatattttaagccttggctttcgtggtgaagcactcgccagtatcagctctgtttcacgtttaacactcacctcacgtccagcaacacaaaatgaagcatggcaagtttatgctcaggggcgagagatggaaacgactttacaaccggcttctcatcccgttggtacgacagttgaagtagcaaatttattttttaacacgccagcacgccgtaaatttctgcgcacagataaaacggaattcgcccatattgatgaagtgattcgtcgtatcgccttggctaaaatggcaatttcgtttaccctaactcataatggaaaaatcgtacgccagtatcgcagtgctcatgatcgcacgcaaaagttaaaacgggtcgcggcaatttgtggggatgaatttgtccagaatgcgctcgaaattgattggaaacacgatgatctacatttatctggttgggttgctcagccaactttttcacgtacacaaaatgatctaagttattgctatattaatggcagaatggtacgagataagatcattactcatgcgattcgccaagcctatgcagattttttaagcccagaacaatatcctgcttttgtcttgtttattgatttaaatcctaacgatgtggatgtgaatgtccatccaaccaaacatgaagtgcgtttccaccagcaacgtttagtgcatgattttatttgtcaaggaatcagtaacgcccttcattctgaacaagcgagcttatatcaaacgaacgaggcatgtgtctccgcaaactatcaggtagaggaaagcgcgcagcatgaatatcgcccaagttatagcaagccgaatcgtgcagcggcgggacaaaatatctttgactcctccaccactacgccatcaaccgctttatttcaaacgaataaaaaaaatacgcaaaatagaccgcacttttcgactaatatccctgctacgcggataagtaaaacagaacaggcagcttacagcgccctattatccaacagtgaaatggcgacagtcttacctcaagaggatggcgcgttactcgagagaaaaaccccctctattctaaaagctctcgccttagttgaaaacaaagccttgttgctacaacagcaacaacaattttatttattatctttacagcaattacagcgcttaaaaatcgaactgagtttacaacgtgaccccgtattgcaacagccgttactcattccgattgtatttcgattaaatccacaacagctgacttactggcaacaacaaaaaactttctttactcaaattgggtttgaatttcatgaaaacctcggacagcaacgtattacgctaaaccgtgtgccaagctgtttgcgtcaacaaaacttacagaaatgtatcatcgtgttactctcgcagcctcttgataccttttctcatttcttaacaacgctttgtgacgtgatcgaattggaacaaataacggtctatgccgatgccgttaccttactcactgaaacagagcaattgcttaatcagaaacaagctatccgattatccgaattattcatcgagcttaattggcaagcttacttggaaaaaatgtaa

SEQ ID NO: 30948 - DNA, 798 bp, Pasteurella multocida
atggcactattacaagttgaagatctgtcaaaatcttttactgatacgatgagcttatttggcgccagccaatttaatgctgtagaaagaattagttttcgtcttgataaaaaacagacactagccattattggtaaaaatggctctggaaaatcaacgcttgccaaaatgatcgtgggtattatccctccaacttcagggcgtattctctttaatggtcaacctctcctctttggtgattaccaatatcgggcaaaacacatccgcatgatctttcaagatcctaacacggcctttaatccacgcttaaatgtggggcaaattttggatgcacctttgcgtttagtgacacatctcgataaccaagatcgtaaccaaaaaatcttcaatacactcaaattagtagggctgtatccagatcatgcgaatgttaaaatcaacacgatgtcagccagtcagaaacaacgtgttgcgttagcgagggccttaattttagatccacaaatcattatcgcagatgatgcactaggctcactagatgccacggtaaaaacccaactcactaacttgatgttacatttacaagataagttgggtatttcctatatttatgttggtcaacatttaggtatcatcaaacatatggcggataatgtcttagtaatggacgaaggcaaaatgattgaatatggacagaccaaatcactctttactcatccaaaaacagaagtcacaaaacgtctcgtcgaaagccattttggacgcttattagatgaaggttcttgggctacaaaatag

SEQ ID NO: 30949 - DNA, 810 bp, Pasteurella multocida
atgaatagcccttatcaacctactatcctattttttgattccggtatgggcggctttagtgtttataaagaaacaaagcaacttttacccgattgtcactatctttattgtttcgataatgcgttttttccttattcggaaaaaagtgaagaggaaattattcagcgtacgctcaaaatttgtcaaaaaattgaccgcactttccctttagacttaattgtaattgcgtgtaatacggcaagcacggtggtattacccgcactaagagcgcattttgcgattcctgtcgtgggaactgtgcctgcaattaaacccgcagcagaatgttcagaaacaaaacatattggcttattagctacaaaaggcaccgtgaaaagagcctatgtcgcagatttaattgcacagtatgctcgcgattgcacagttgagaaattgggcagtacaaaattagtcgaaattgctgaacaaaagttacatggcaaagcggttgatttgcatgctttaaagcaagagctagcgccttggcagtcaattcagaatcttgatacagtcgtattaggttgtacgcactttcctttaattaaagaagaaattaaatggtgtttaccacaagtgcgtttttttgttgattctggtaaagcgattgctttacgggttaaaacgttattgtctaagatagacattcaatctaaaactaacgagaaaaatcttattttttgtactcaattttttgaggatgaaacacagtttcaaaaggttatccatttttggggatttgaacaactcatcaatttgaacatgaaagcctga

SEQ ID NO: 30950 - DNA, 2124 bp, Pasteurella multocida
ttgtatctttttgaaagtctaaatcgcattattgaggcgtatttaccgccagaacaaatcgaacttgttaaacgtgcgtatattattgctcgtgatgcgcatgagggacaatcgcgttctagtggtgaaccttatatcactcatcctgtcgcagtcgcatcgattattgctgaaatgcgtttagatcatgaagctgtgatggcggcattattgcatgatgtaattgaagacaccccttatacagaagagcaattgaaaacagagtttggtgccagtgtggcagaaattgtagaaggcgtatcaaaactcgataagttgaaattccggacacgtaaagaggcggcagctgaaaactttcgcaaaatgattttagccatgacacgagatattcgtgtggtgttaattaagcttgctgatagaacgcacaatatgcgtacactcggctcgctacgtccagataaacgccgccgtattgcaaaagaaacgcttgaaatttatagtcctttggctcatcgtttagggattgaacatatcaaaaacgagttggaagacttaggctttgaagccatgcacccacaacgttatgcggtgttgcaaaaagtgattcaggtggcgcgtggtaatcgtaaagacatgattcagcgtattaccaatgaaattaaaggacgattagaagatgtgggcattaaagctcgtgtttttgggcgggaaaaacatctttatgccatttatcaaaaaatgaaactgaaagatcaacagtttcattctattatggatatctatgcattccgtgctgtcgttaaagatattgatacttgctatcgtgtgcttgggcaaatgcatgggttatataaacctcgtcctggtcgtgttaaagattacatcgcggtgccaaaagcaaatggctaccagtcattacatacctcaatgatcggtccacatggtgttcccgttgaagtacaaattcgtactgaagaaatggatcaaatggcggaaatgggggtagcagctcattgggcatataaagaaggtggcaaaaatgacagcacgacagtacaaattcgagctcaacgttggttacaaagcttaattgaattgcaacaaagtgtgggaaattcttttgagtttatcgagagtgtcaaatctgaatttttcccaaaagagatttatgttttcacaccgaaagggcgtattgtggaattgccagttggtgcaacgcctgtcgattttgcttatgcggtacacacggatatcggtcatagctgtattgcggctaatgttgatcgtaaatcttaccctttatcacaagccttaacttcaggacaaacggttgacatcattactttaccaaattctcaaccgagcgcgggatggttaaattttgtggtgacagcgaaagcacgaaccaatattcgtaatttccttaaaaatttacgtggtggtgaggcgataacattaggtaaacgtcagttgacacgtgcgttggcaccgacgaagttagaagatcttgataaaaatagagtacaaaatttattaactgagctgaaattagccacattcgatgatttattaatggaaattggtctaggtaatcaaatgagtgcggtaatcgcttatcgcttgctaggagaagccattgaaattgatacggatggtgatcttacaaacaataaagcgaattttgaaattaaaagtgctggtggattacttaccacgtttgcccaatgttgtcacccaattccaggcgatcctattgttgcttatacgagctccggcaagggcttagtgattcatcatgaagcttgcgcgaatttaaaacatcgtaaagacaatcctgaacactatatgccagtggaatgggagcaaagcgataatatgatcgattttgaagcggaattgcgtattgaacttatcaatcagcaaggcgctttaccaaatttaacgacactgatttcgtctttaggcagtaatattcaaagtatttggacggaagaacaagaagggcgtttatatcaaatcgtcgtgttgttgaccgtaaaagacactaagcatttagcgaatattattcgtaaaatcaaagcaattccgggttttgttaatattgaacgtaatatcaatcaatga

SEQ ID NO: 30951 - DNA, 1005 bp, Pasteurella multocida
atggcaattaaaattggtatcaacggctttggccgtatcggtcgtatcgtatttcgtgctgcacaacatcgtgatgacatcgaagtagtcggtatcaacgacttaatcgatgttgaatatatggcttatatgcttaaatacgattcaactcatggtcgtttcgatggtactgttgaagtaaaagatggcaacttagtggtaaatggtaaaactatccgtgtcactgctgagcgtgatccagctaacttaaaatggaacgaaatcggtgtggaaattgccgttgaagcgactggtttattcttagatgatgcaactgcacgtaaacacattactgctggtgcgaaaaaagtcgtattaactggtccatctaaagatgctactccaatgtttgtcagcggtgtaaactttgacacttatgcaggtcaagatatcgtgtctaacgcctcttgtacaacaaactgcttagcaccattagcgaaagtgatcaacgacaaatttggtatcaaagacggtttaatgacaacagttcacgcaacgactgcaacgcaaaaaactgttgatggtccatctgcaaaagactggcgtggtggccgtggtgcggcacaaaacatcatcccatcatcaacaggtgcagcgaaagcagtaggtaaagttatccctgcattaaatggtaaattaacgggtatggcgttccgtgttcctacaccaaacgtatctgttgttgacttaactgttaacttagaaaaaccagcaacttatgctgaaatctgtgcagaaatcaaacgcgcatctgaaaacgaaatgaaaggtgtgttaggttacactgaagatgctgttgtttctacagacttcaatggttgtgcattaacatctgtatttgatgcagcagcaggtattgcattaaccgatacattcgtgaaattagtttcttggtatgataacgaaaccggctactcaaacaaagtattagacttagtcgcacacgtttataactacaaaggttaa

SEQ ID NO: 30952 - DNA, 1263 bp, Pasteurella multocida
atgaccacaaatttacaagaaatgggaaaacaggctaaacaagctgcctttgtactcgcacagctctcacaacaacaaaaaaatcaagcactcgaaatcattgcacagcagcttgaagcacaaagcgataagattttagccgaaaaccaaaaagacatcgcactggcaaaacagaatggattatccgatgccatcattgatcgtcttttactcacaccatcacgattaaatgacatcgctaatgatgttcaccatgtcatctccttagccgatcctgttggtcaactcattgatggcggcatacttgatagcggtttaaaaattgagcgagtccgtgttcctcttggtgtcattggtactatttatgaggctcgcccgaatgtcactattgatgtcgcaagcttatgcctaaaaacaggcaacgccgtcatcttacgcggtggcaaagaaacacaatattctaataaaattttagtcgacgtcgtgcaacatgccttagtccaagccggactaccgaaatatgctatccaagcaattaccgatcctgatcgtcacttagtgatggaattgctgaaattagatcgttatgtcgatatgatcattcctcgtggtggcgcaagtttacatgagctttgtaaacagcactcgactattcctgttattgtaggcgggattggtgtatgtcatctatttatcgagcaaagtgccgatcttgataaagccctgcctttaattgaaaacgccaaaacacaacgtccaagtacctgtaatacattggaaacactgcttgtccaacgagctattgctacgcaattcttacccaagttggcacaacacctctccgctaagcacgtcaaatttcacgcagatccgaccgcacttgctatcttacaatcggtacaagcagatgttgaacctgttcaagcacatcagctacgccaagaatggctttcttatgatttaaatgtcgtgattgttgatgatattgaacaagctattgcacatattcgtgaatatggtagccaacattccgacggtattctgaccggctcacaacggttggctcaacaatttgttgcacaggtggattcggctgcggtttatgtgaatgctagcacacgttttacagacggaggacaattcggactcggtgctgaagtcgctgtcagtacacaaaaactgcatgcacgaggtccaatgggactcgaagcattgacgacctataaatgggtttgtgtcggcgactattgcgtaagaagctaa

SEQ ID NO: 30953 - DNA, 1299 bp, Pasteurella multocida
atgggaaaaagtgttgttatcttaggtgctcaatggggcgacgaaggtaaaggaaaaattgttgacttattaactgaccgagtgaaatatgtggtacgctatcaaggtggtcataatgcaggtcacacccttattattaacggtgaaaaaaccgtacttcgtttaattccatctggtattttacgtgaaaatgtaacctgtttgatcggcaatggcgttgtgctttctcctgcggcattaatgcaagaaatgggcgaactggaaagccgtggtattaatgtacgtgaacgtttattaatttcagaagcctgccctttaatcctaccttatcatgttgcgatggatcatgcgcgtgaagccgctttaggtaaaaacaaaattggaacaaccggacgtggtattggtcctgcttatgaagataaagtcgcacgccgtggcttacgtgtaggtgacttatttaatcgtgaagcctttgctgaaaaactcaaaacgatcttagattactataacttccaattagtcaattactataaagccgaagccgttgacttccaaaaaaccttagatgacgttatggcggtcgctgatatcatcaccggtatggtcgctgatgtcacgacaatgctagataaagctcgcaaaaatggcgacaatatcttatttgaaggcgcacaaggcactatgttagacattgaccacggtacttatccgtttgtgaccagttcaaacaccaccgcaggtggcgtagcaaccggtgccggttttggtcctcgcaacttagattatgtcttaggtattatcaaagcgtactgtacacgtgttggtggtggaccattcactacggaattatttgatgaagttggtagcgaaattgcgcggaaaggaaatgaatttggtgccgttactggtcgtccacgtcgttgtggctggtttgatgcagttgcgattcgtcgcgccattcaacttaattcaatttctggtttttgtatgaccaaactagacgtgttagacggctttgatgaagtcaaaatctgtgtcgcttataaaatgccaaatggtgatattcttgactatgcaccattagcggcaaaggactgggaaggtgtcgagccaatttatgaaacaatgccgggttggaaagaaaatacctttggcgtaacggatgtcaaccaattaccagaagcctgccgtaattatgtcaaacgtattgaagaagtcacgggtgtgccagtagacatcctttcaaccggtccagaccgtgttgagaccatgatcttacgtgatccttttgctgcctaa

SEQ ID NO: 30954 - DNA, 477 bp, Pasteurella multocida
atgaattacgtccaatattatcctactgacatcgtgaatggagaaggaacaaggtgtacactttttgtcagtggctgtacgcatgcttgccgaggttgctacaacaaaaaaagttggtctttttgtgctggtcttccattcgatgaaaaaatggaagcacaaatccttcaagatctcaaagatacccgtattaaacgccaaggattaaccttaacaggtggtgatccgctccatccacgtaatctggcggtacttcttccctttgtcaaacgagtcaaacacgaatgtcctgataaagatctttgggtctggacgggttataccttagcagagctcaaagccgatacattacaacggcaaatactgccttatattgatgtcttaattgatggtaagtttgaacaggataaagcggatccaagccttgtatggcgcggttctgctaatcagattatttatcgtttcacacaatactaa

SEQ ID NO: 30955 - DNA, 1380 bp, Pasteurella multocida
atgctaaaaatttttaatacattaacaagagaaaaggaaatctttaaacccattcatgccaacaaagtgggtatgtatgtttgcggtattacggtttatgatttatgccacgtaggacacgggcgtacattcgtttgttttgatgtgattgctcgttatcttcggtatttaggctatgacttaacttatgtgcgtaacatcacagatgtggacgataaaattatcaaacgggcattagaaaataatgagacatgtaatcaacttgttgaaaaaatgattgcagaaatgcacaaagactttgatgcactcaatgtattacgtccagatgtagaaccccgtgcaacccaccatattcctgaaattatcgcaatgattgaaaagctgatagctcgtcaacatgcttatgtatctgctaatggtgatgtgatgtttgatgtcgaaagttttaaagaatacggaaagctttctcgtcaaaatttagaacagctccaagcaggcgctcgtgttgaaattgttaatgtcaaaaaaaatccgatggattttgtgttatggaaaatgtccaaaccaggagagccaagttggccatccccttggggagaaggtcgtcccggttggcatattgaatgttctgccatgaaccataaagaattaggtgagcattttgatattcatggcggaggctcggatttaaccttccctcaccatgaaaatgaaattgcacagtcttgctgtgcccatagtggacgctacgttaactattggatacattctggcatgattatggttgatcgagaaaaaatgtccaaatcactgggtaatttctttacattacgtgaagtattatcactctatgacgcagaaagtgtacgttactttctactgacagcacattaccgtagccaattaaattacagcgaagaaaacctcaatcttgcgcacagtgctttagaacgtttatatacggcattacgaggaacagacccaactgcagtcgcgacagaagggcaaaactaccttgctgcctttagagaagccatggatgatgatttcaatactccgaaagccatttcagtcttattcgaaatcgcacgtgaaatcaacaaactgaaaaatgaagatatattaaaagccaatgcgcttgcagcccgcttacgtgaattagcgggaatattaggtttactctaccaagatccagaacaattcttacaatcgggttcagacaatgatgaagtcgcgctgattgaggcgttaatcaaacagcgtaatgatgcccgggcagcaaaagattgggcaagtgcggatgccgcacgtaacaaactggctgaaatgggtgtggtattagaagataacgtaaatggtaccacttggcgtaaacagtaa

SEQ ID NO: 30956 - DNA, 1710 bp, Pasteurella multocida
gtgttcttagccgttaagccttttagtgcgttaaaagagagttttcgcgcaggttacacgagtcaatctttaattagagatattatcgccggtttaactattggggtgattgcaattcctttgtcaatggcactggcgattgccagtggcgtagcgcctcaacatggtttatatacagcgattgtcgcagggatgattatagcggtaacagggggatcgcgttttaatgtttctggtcccacggcggcatttgtggtgattttgtacccgattacgcaacagtttggtttgggtggcttgttaatggccacgttgttatcgggcttgattttagttctcatggccttgttccgcttaggacgtctcattgaatacattcctttgcccgttactctaggttttacctgtggaattggtatcgtcattgccacgttacaaattaaagattttttagggctatctattgtggaaatgcctgcgcattatcttgaaaaagtgcaaactattgccactgcattaccgacgatcaattgggctgatgctcttgttgggatcgtgaccttattgatgttaacgcaatggcataaattacgtttacctattccgggtcatttacctgctgtgattattgccacgttattgtctttaggcttaatttctgtaggtcaagatgttgccaccattggttcagcctttcaatacactttatccgatggcacacaaggatttggtatcccaaatgccttacctgaatttatcttgccttggcatattccgaatgcacaaggggaagtgattacttggaatttagagaccattcaagcgttattgccagcagcgttttctatggcagtattaggcgcaattgaatccttattatgtgcggtgattttagataatatgacagacacaaaacaccattctaataatgaattattagcacaaggattagggaatattgccgcaccgtttttaggggggatcacagcgacagcggcgattgcgcgttctgtcgcgaatgtaaaagcaggtggcgtgtcacctatttccagtgttgtacatgcattattggttctgtttgcgctcttgttttttgcaaatgcgttatcttatttaccgctttcgtcgatggcagctttattgctcgttgtggcatggaatatggcaaatgtgccccaaattattcagctcatccgccgctctggtcgtaatgaaatcgcggtgttattaacgtgcttaattttaacagtcatttttgatatggtgattgcgattactgttggcgtcttattagcaagtttactgtttattcgtacaattgcagaaatgacaaagtcgattgaaattgcccatcctgaagatttaaatgatgtgctagtttatcgtattagtggaccgttattttttgctgcagcagataatttatttgccgatttacatgataaaaccgtcaataccgagcatgaaattaaacatattgtattgcaatgcgatgcggtcacggtgctcgatacgggaggtattcatgcgttgactcgttttgtacaacatatgttgccacatcaacagctttatatgtgtaatatgcaatttcaaccgctacggatgattgtcaaatcgaatacggtaaatgaaattcagaaaattaattttgcttcggatttgtcagatgcttttaataaaatccgcgtttttgaacaacaagcataa

SEQ ID NO: 30957 - DNA, 1215 bp, Pasteurella multocida
atgttaccttttcaggccgctcgtcaacgtcaatttgcgcgtgttatcacctttgcgcttgctgggtttgtgtttaatacaacagagtttattcctgttgccttactctctgatattgcgcaaagctttgcgatgcccgtatcacaaacgggtttaataattactgtttatgcttgggtagtgtcattaatgtcattgccttttatgttactgactgcaaaagcagagcgtagagggttattgattaaattactggtgttatttattttaagtcatctgttatcggtgatcgcttgggatttttgggtattagtattagccagaataggtgtcgcattaacccattctattttttgggcaattactgcgtctttagtcattcgggttgcgcctaaagataaaaaatcacaggcaattggactacttgctataggttgttctttggcaatgattttaggcttgcccctcggacgtttgattgggcaattctttggttggcgtgcaacctttgccattattgcccttattgcgataggcattttatgcttgttttatcaacttttaccgcacttaccaagtaagaatgcgggttctttaaatagtctgccaacgctttttaaacgtccattattgcttgggctttatgcgcttactatgattattatttcggctcattttactgcgtatagctatattgaaccctttatgctcaatatcagcacaatgagtcatagtatggcaacttttgttctcttcgtcttcggtctttctggcattaccgctagtttgttatttaatcgctattataatgcaggaccgatccgttttattttgttttcaatgggactactcaccgctacacttttgctcttattcattgcgagccaacaaacgtggacaatgtttttattaaccttcttctggggaattggcatagcaggcattggcttaggattacaaattcgagtgttacaccttgcccctgatgctacagacgtcgcgatggcaatctattctgggatttataatattggcattggggctggcgcattgctaggtaatcaagtgatgcaacattatgggctagcctatattggtgttgctggggcgttatttgcagtattcgggcttgttttatttattttagtccagtggaaatatggtcacttagcgccaaataagctatcgactgaagagaagaaaaagtgcggttaa

SEQ ID NO: 30958 - DNA, 1215 bp, Pasteurella multocida
atgttgaaaaagatcgccatcagtttttgtgctgtcattgtggcgatctttgcgcttgcatattggcaaattgatcgtgtcaatgctgtcttaaccaacgtcctcaatgaaaaacacatcacattttctcaactcgattttaccttctttcctcaagtcgaaatccgattatccgatgtcaaatggcaggaccaacaagtgcggtctgtttttgcgccaaaagtttatttacaatccgagttttggtcactattggcgctagaaaagcgagtgaagacagtacgctttgaacaaatggatgtctggtattcaggtcaacatgaaccagatctggttggaataacaggggaaattacaggggactttctgattgaacccaaccaaattcagctggcgaatatcttgctgaagatgatttttgtgaaacccattttatttaatacacaacaattggagatcgcattacagaaaggttctatcaaacaacattctgcatcagattggcaagtgattttcgatgatgtgaaaatcaatggtgaaaatttcgttcttttcacacttaaggcaacccagcagccgacaatgttgtcaacagtatctgaactgcattatgcccattcacaatctcagtcacaatttgatttacagctcttcaataaagtcaattcaactcagcgagtgcgttttgtagggaaaaatattgcgttagcaccttggcaaaaaatgttgaacttgccttatttgcttactggggaggcagatatttcgggggatttggtgttaaccgacacgaaaacagaaaaaggcaaagtggcaatacgaatggctgaagggcactttaatggtttaaatttattagacttggtgacgaaatatctgcctattcactatgatgaagcgcgttttaatcgcaacgatctcaatacctcatttcaacacttgcaatcctccctttcttgggatacgacaaaattaaacctagatacattgacttttcatattgataaagtccgagtgtctgggcaaggtgccgtaaatttgaaaacgatgacctgtgatgtaacgctgaatttagggttgacttccccgcagtatcagcatttttccttacctatccgctttttcgacagttgttcttctccgcaatataaagtggaatttaatcagaatttacgtcatcaattaaaagatcttattaaagaaaaattgaggtaa

SEQ ID NO: 30959 - DNA, 2058 bp, Pasteurella multocida
atggagcagaaaaacactttcacatttagcacaccattaatttgggtgttattcgccttattaggctttgcccttttaccgtcaaaagccttagattacggcttatgggactctactagcgatgaaatgcttgaagctatgggctggtataatctcaatttgagttggtcttggtttttagccgtgctcatttttcccgttttatctttgatttttccaaaagaaagtacaaaacgtgccaaaatagaacttgctctgattgcagcgattttcttatttgtctttatctctgccacagtagccaagtttagcctagggtattccgtcatcattctcatggtggcacttctcgcccttgcgacaaatgctttagcacaattaaaagtcatgcagggggataaatttgtcatcgcctcgctcattgcgattgtgatgacgatttttttctttatcgtttacccgacttttgccattttactttccatgttctttgataatggtgagtttaaaccgcaacaagtcgctgaaattatccaacaaccttatgtgattcgcgttgtaggaaactcgcttgccgtctcctctgtggtcggtgtgctatccaccatttttggtttagcctttgccctctataccacacgtatcgctaaacgtacggcattcattggtaagattttctctattctgccaattgttaccccgccttttgtggtcggtttaggggttactttaatgcttggacgctcagggtatgtcactgcttttttagtggaatatttaggctttagcagtaactggctatatggctttactggtattgtgattgcccataccttagcactcacccctatgtcttttatgatcttggaaggtgccttaaaatcgatccacccttcgattgaagaggcggcttatacgttacgctcaaatcgttaccaagcgttcttccatattattttcccattgctcaaacctgcattagccaactccttcttagtggtcgtcatccaatccctcgcggacttcagtactccacttgtccttggcggaagctttgatgtcattgcgactcaaatttacttctatattgcgggttcacaattagattatgcttcagccagtacattaggtacgattctcttaatgttctcactggcgattttcgtgattcaatatttatggattggtaaacgttcctatgtgactgtttctggtaaatcgtaccgcggtgatgtgcaagaattgccaaatgggctaaaagggattatcgtctttttccttggcttttggacgctatttaaccttgttctgtacggcagtatcttctacggcagtttcaccgtgaactggggagttgactacacactcaccttgaaaaactatcaaatcctgtttggacaaggtttcagtgacggtgcatggccttctttaattcaaaccgtgatttttgctgccagtgcagcgccagtgaccgccttatttggtttactgattgcttatattacggttcgccgtgaattcaaaggcaagaaaaccttggaatttttaaccttactgtgtttcgctgtacccggtaccgtggcaggggtatcctatattattgccttcaacagctcaccaatttatctcacagggacagcgatgatcattattttatcaatggtcatgcgtaatatgcctgtggggatgcgtgctgctattgcaggcttaggtcaattagacaaatcgcttgatgaagcctccctttccttaaaaggtagctccttcaaaaccatttggtatattgtcttcccactcttaaaacctgctttactttctgctttagtaaccagtttcgtccgctcaatgaccacggtcagcgcgattattttcttggttaccgcagatacacgcgtggcaacctcctatattttaaaccgtgtagaagatggtgaatacggtattgcaattgcatatggttcaatcctcatcgtagtaatgatggcgattatcttattctttgactggatcgtgggcgatacgcgcatttcacgttctaaagcgaaaaaaatgaattaa

SEQ ID NO: 30960 - DNA, 987 bp, Pasteurella multocida
gtgatttctcttgaaagccaagttctacagcgtcatctttctttttttgagcataaatcagttttatttgcggggggtattaatgatcagtttcctcagcaagtgccggcgcgcagcgtgaaggtgtggagttggtattttgattatgccaaaagcaaaagtgcggtcgatttttcattaacttgtgaagaaaaagcggatctcatggtgttttactggactaaaaacaagcaagaagtgcaattccaacttatgcaattactcgctcaagctccgattggtcaagaaatgttgattgtaggtgaaaatcgctgcggagtgcgttctgtggaaaaaatgctcgatgcttatggcgatattgctaaaattgactcggcaaggcgttgtgggttatatcatttttgtttaaaaaacacaccgcactttgcgttagcagattattggaaaacttatcagcatcctcgcttaggtgatttgcgtatttacagtttaccgggggtatttagtgcgaatgagttggatgttggcacagatttgttgctttcaaccttagatcaaccggtgcgaggaaaggtgttagatttaggttgtggtgcgggggtgattggtgcttatattaaacagcaatatcctcaagttgagctgactatggcggatattcatgcgctagctttagcttctagccaacggactttagctgagaaccagttagaggcagaggtgatcgccagtgacgttttttctaatgtggcaggaaaattcgatctgattatttcaaatcccccttttcacgatggcattgatacggcttatcgtgctgtcagtgaattaattatgcaagcgaaatggcatttagtaccaggcggtgaattacgcattgtggcgaatgcattcttgccttatcctgatttattggatcaacattttggctcacattgtgtgttagccaaaaccactaaatttaaagtgtattctgtccgcggctaa

SEQ ID NO: 30961 - DNA, 1170 bp, Pasteurella multocida
gtgcaaagtaagcagaacaataaagacatcagtgcggttattctttccgtcattttgcacgcgatcttatttggcttattgattttaggttccctctatcatcgggttgaaattatgggtggcggtgaaggtgacagcgaggtgatgggggcggtgatggttgatacaggcgcagctgctcaagagtggggacgccttcagcaacagaaaaaaggtcaaaccgataaagcgaaaaaaacggaacctgttattgaagagaaacctgtacagccagatgaacaagagatcattcgtcagcaagaaattgagaagcaaaaagcgttagaaaaacagaaagaaattgaacaacaaaaagaaattgaacgtcaaaaacaacttgctgagcagaaaaagcaagaagaacaagcacgcttggcagcattagaaaaacaaaaacaagcagaagaagcaaaagcgaagcagctagctgaagcggcaaaactaaaggcagaagcagaagctaaacgcttagctgcattggctaaacaagcagaagaagaggcaaaagcgaaagcagcagaagaagccaaacgtaaagcggaaaaagcgaaggcagaggctgaggcaaaagcgaaagtagagaaagcgaaagcagaggctgaggcaaaagtgaaggcagagaaagccaaagcagaagcggaagcgaaggccaaagcagaaaaagccaaagcggaagcaaaagcaaaagctgaaaaagccaaagccgatgcggaagctgcacaacgcaaagcgaatcaagccgcactggatgatttctttagtggaggagatgttggtggtggctctgcaacgagaggatcaaatacggatcgtcagggaagccaaggaagcggtgcagcactgggggctggtgatggtggaaaaacaggcgatcaatatgccggagtaattaaacgagaaattcaacgcagatttttgaaagagccgagttttgcaaataaagtttgcgtcgttgaagtcgagtttttacgggatggaaccattgcaaattatcgtcgagtatcaggacctgatgatatttgtcaagctgcggtaagtgccgtggcaaggacgaagaaagtcccgccagcaccaacagatgatatctatcaaagatataagaaatccccaattgaatttaaattaagataa

SEQ ID NO: 30962 - DNA, 1563 bp, Pasteurella multocida
atgttggacgttgttgaactctctcgattgcagtttgcattaactgcgttatatcactttttgtttgtgccattaacactaggtttatcgttcattctagtgattatggaaacgctctatgtagccacaggcaaagaagtttataaagatatgacaaaattctggggtaagttatttggtattaactttgctctcggtgtcacaactggtattacaatggaattccagtttggtacgaactggtcatattattctcattatgtgggagatatttttggtgcgcctcttgcaattgaagcattattggcattcttcttagaatcgactttcgttggtttattcttcttcggttgggacagattatcaaaaggtaaacacttaattgcgacatactgtgtggcatttggttcaaatttatccgcaatgtggattcttgttgcaaacggttggatgcaataccctgtcgcttctgagtttaattttgaaactatgcgaatggaaatgaccagctttatggatttatggttaaacccagttgcacaaagtaaattcttacatactctctctgcaggttatgtgagtggtgcaatgtttgtattagggattagcgcttattatatcttgaaaggtcgtgatctcggttttgctaaacgttcgttttctattgcttccactttcggtgtgatttctattttctcggtgatcatcatgggtgatgaatctggttatgaaatcggtcaaacacagcctgtgaaattagcagcaatggaaggggaatggcatactcaacctgcaccagctgactggaatttacttgtagtgccaaatcaagcagagaaacgtaatgattttgctattcaaattccttacgctgcagggattattgtgacacgttctttagataaacaatttgcgggtcttgctgatttagaagcgttgaatgtggaacgtgtacgtaatggtgttcaagcatatgacttgttacttcaattacaagcacagaaaaaagcaggtcaaatcagtgaagaaacaaaagcacaatttaatgctgtctctaaagatctcggtttcggtttattattaaaacgttataccgacaaagtggttgatgcgactgaagagcaaattaaacaagctgcggcagatacaattccaaatgtgggacctactttctggtctttccgtatcatgatggcagcaggtggtttattacttcttcttctggttggtgcatttgtacaaaatgtgcgtaaaacagtgggaacaaaaccttggttcttaaaagcgcttttatggtcgattccattaccatggattgcaattgaaagtggttggttcttagctgaatatggtcgtcaaccttgggcgatttatgaagtgttaccagttggtgtggctaactctgcacttacaacaggtgatctttggttctccattggattaatctgtgcactttataccttattccttgtagtagaaatgtatttaatgttcaaatacggtagattaggaccaagttcattaaaaacaggtcgttactactttgaacaatcatctaaataa

SEQ ID NO: 30963 - DNA, 1767 bp, Pasteurella multocida
atgatgcgtacacattattgcggtgcattaaaccgtgacaatatcggacaagaagtaacattgagtggttgggtgcatcgtcgccgtgatttaggtgggttgatttttattgatatgcgtgatcgtgaagggattgtacaagtgtgtttcgatccagtatatcaagaagcactcaccacagcagcaagtttacgtaatgagttttgtattcaaattaaaggcgaagtgattgcccgcccagataatcaaatcaacaaaaatatggcaacaggcgaagtagaagtgttagcaaaatccctgtctatttataacagtgcagagccattacctctcgactttaaccaaaataatacagaagaacagcgtttaaaataccgttatttagacttacgtcgcccagaaatggcgcaacgtttaaaaacacgagccaaaattaccagctttgtgcgtcgctttatggacgaacatggtttcttagatattgaaacaccgatgttaaccaaagcaacgccggaaggagctcgtgactatttagtaccaagccgagtacataaaggtaaattctatgcattaccgcaatcaccacagttatttaaacaattgttaatgatgtcagggtttgaccgttattatcaaattgtgaaatgtttccgtgatgaagatttgcgtgcggatcgtcaacctgaattcactcaaatcgatgtagaaacctctttcttaacggcaccagaagtgcgtgagataatggaaaaaatggtacatggtttgtggcgggaaacccttggggtagatttaggtaaattccctgtgatgacctttgcagaagcgatgcgtcgttttggctcagataaacctgatttacgtaatccattagaaatggtggacgtagcggatttattaaaagaggttgagtttaaagtattcaatggtccagcgaatgaccctaatggtcgtattgccgtcattcgtgtaccaaatggcacagacattacgcgtaaacaaattgatgaatacacgcaatttgttgggatttatggggcaaaaggtttggcttggttaaaagtcaatgatcttgctgcggggatggatggcgtacaaagtccaatcgcaaaatttttatctgaagcggtgttaaaagcccttttagagcgtgtacaagcacaaaacggcgatattcttttctttggtgccgataactataaagtaacaactgatgcaatgggcgcgttacgtttgaagttaggacgtgatttgggcttaacgaaattagaagaatggcaaccactttgggtgattgatttcccaatgtttgagcgtgatgatgaaggtgatcttgccgctatgcaccacccatttacttcaccaaaagatttcagcccagaacaattagaagcggatccaacttcagccgttgctaatgcttacgatatggtgattaatggttatgaagtgggcgggggatcggtgcgtattttcgatccgaaaatgcaacaaacggtattccgtattttagggattaatgaagcagaacaacgtgaaaaattcggtttcttattagatgcgttaaaatttggtacaccaccacatgcaggcttggcttttggtttagatcgtttaacgatgctattgactggaacggacaatatccgtgatgtgattgcgtttccgaaaaccacagccgccgcctgtttaatgacagaggcgccgagttttgcaaacccacaagcattgaatgaactgtcagttcaagtaattaaatctgaataa

SEQ ID NO: 30964 - DNA, 726 bp, Pasteurella multocida
atgacaaaagatactctattttcgactcccattgctaaattgggggattttacttttgatgaaagcgtagctgaagtctttcccgacatgatccaacgctctattcccggctatgccaacatcattaccgctattgggatgttggcatcacgctttgttacggcgaatagcaacgtctatgatctggggtgctcgcgcggtgcagcaacattatctgcacgtcgtcatattaatcagcccggcgtcaagatcattggtgttgataactcacaacccatggtcgatcgttgtcgccagcatgttagtgcctatcaaagtacaatacctgtggacattatttgtgatgatatacgccatatcgaaatcgaaaatgcctctatggtaattttaaatttcactttgcaatttctgccacctgaagatcgtcgatccttattaagtaagatttaccaaggcttacaaccgaatgggatcttggtactatccgagaaatttcattttgaagatcaaaacatgaatgccttgttgattgatttacatcatcaatttaaacgcgcgaatggatacagtgaacttgaagtcagccaaaaacgcaccgcacttgaaaatgtgatgcgtacagacagcattcaagcccataaaatgcgtttagccgaagtcggttttcaacaagtggaattatggtttcaatgctttaattttggctcaatgattgcagtgaagtaa

SEQ ID NO: 30965 - DNA, 555 bp, Pasteurella multocida
atgaaaaaaacagaacttattcgaatcttaacaaacaagatcacgcaacttgatcacaaacagcgtacagcgacagaacagccattaaaaacgcgttttgcccctcatttatttagtgaaaataaccaagtcttttctttttattttcaagaactaaagcaaacgctaacacaactagaaaatgcaccggaaacggacattgcactctgcgccttttttgcagaaaagttactatcacagtatgttgctttatctgaagccttaactcatactcaaatcaaaacagaaaccttcactccgaccaataaagcaacacatcatgttcatcaactcccacctagagaacgtttagaaaaatattatgaggcattacaagcattaaatgaaaaattgatgtcactacaagatagccaacaaaaaacacaagcagagcaagaaaaaaaattgttaggacaaaaaatccaactaactcagcaacgaaaagcaaagtgtctggtagccattgaaacgttagaagaatatttagtattcaaaaatacacaagataaaaagtaa

SEQ ID NO: 30966 - DNA, 1110 bp, Pasteurella multocida
atgacacaacattattcaattgaaacgttattagcgcaggctggaaatcgaacggatgagcgtactggtgcagtttctacaccgatctttttatcaacagcttatgcccaccatggaattggtgaaagtacaggctatgactatacacgtacgaaaaatccaacacgtagcgttttagaagaaaccattgctaaattagaaggtggggaacgaggctttgcttgtgcttcaggaatggcggcaattcaattaatcatgtccttatttacgtcccctgatgagtggattgtttcgcgtgatgtgtatggtggcacctatcgtttattggatttcgcgtacaaaaatacacaaggcgttaaaccagtttatgtgaatacatcagaggtatcctgtatcgaagcggcgattacgtctaatacaaaagcaatttttgtagaaactccttctaatcctttgatggaggaatgtgatgtagctgcgattgcaaaaattgcgaaaaaacataatctgcttttgattgtcgataatactttcttaacaccggttttatttagaccaattgaggctggtgcagatattgtgattcatagtggaactaaatacttggctggtcataacgatgctttggttggactggttgtggcaaaaggtgaagaactctgccaacgtttattctatattcagaatggggcaggtgcagttctgtcgcctttcgattcatggttaacgattcgaggcatgaaaaccctcgccttacgtatggaacgtcatgaacaaaatgccaaacagctggctgcgtttctggcttctcagccacaagtaaaaaatgtgttatatccaaataagggcggtatgctttctttccgcttacatgaagcacattgggttaatccttttttgaaagcgctgaaactaatcacttttgctgaaagtttggggggaacagagagctttattacttatccagcgacacaaacccatatggatattccagaagaggagcgtattgcgcgcggtgtgtgtaattgtcttttgcgtttttctgttggtttagaaaatgtagaggatattaaagcggatttattacaagcgtttgcacaattaaactaa

SEQ ID NO: 30967 - DNA, 825 bp, Pasteurella multocida
atgtatttaatatcagaattcatcttccaattcattttatacgaggtttgtatgaaaaataaaagtaaattgttagcatgttgtttaatggctcttccaatatccagtttttcaattggaaataacaatttaattggtgtcggtgtatctgctggaaatagtatttatcaggtaaaaaagaagacagccgttgaaccgtttttgatgcttgatttatcttttggcaatttttatatgcgtggtgcggcagggttaagcgaactaggttatcagcacgtttttaccccgagttttagcacttcactgttcttgagtccctttgatggtgcacccataaaaagaaaagatcttaagcctggttatgattctattcaagatcgtaaaacacaagttgctgtagggttaggtctagattatgacttaagtgatttgtttaatttaccaaatacgaacatttcacttgaaatgaaaaaaggacgtcgggggttcaatagcgatattactttgacccgtacttttatgttaaccgataaacttagtatttccccttcttttggtttgagttattattctgcaaaatatactaattactatttcggtattaagaaagcagaactgaataagacgaaacttaaatctgtgtaccatccgaaaaaagcgtattcaggacatattgcattgaatagtcattatgcgattactgatcatattggtatgggactttctttttcctgggaaacttattctaaagcgataaaaaaatcaccgattgtgaaacgaagtggtgaaataagttcagccttaaatttctactatatgttttaa

SEQ ID NO: 30968 - DNA, 1176 bp, Pasteurella multocida
atggacgtcatacaaaaagacatgatcgtggttggcggtggcatggttggtgcagcctgtgcgcttggcttaggtaaacaaggacatcaagtccagcttatcgaacacgccccactcccacagtttcaacctaattcgccttacgatcttcgcatttctgcgatcagtgttgcttccgttaatctcttaaaacaattaggtgcttggcagtatatcgaaaatactcgtatttgcccgtatcgcgccttagaaacctgggagatcgaaggatttgggaccactttccatagtcaagaattaaacttacctgagctgggttttatgatagaaaataatgttgtacaacttggtttgtggcaggcaatttcaagcattgaaaacatccaaacttgcgtaggatgtactatccaaaaagtcgaaaagtgcggtgaaaattggcaaattttgttagctaatggtacaacttaccaagcccctcttatcattgccgctgatggggcaaattcacagttacgccaaattgctaatattgggacgagtggttggcaatatcgtcaaagctgtttgcttattaccgtcgatactgaacttgaacaacaagatgtcacctggcaacaatttttcccttctggaccaagagcctttctaccattattaggcaaacaagcctgcttagtttggtatgattccccacaacgtatccaaaccctcaaacaactttctcgcgaaaaattagcggcgcaaattgagcaagctttcccggcacgattaggaaaaatcaaagtccaagcagcaaatagctttgagctgactcgaacccatgcgcaagattactttaaacaaggtattgtgctagtaggtgatgctgcacacaccattaatcctcttgctggacaaggtgtgaatctaggttttaaagatgtcaacattctgcttgaagtactacagcaggcgagtcagaaaaaagagcctctcgccagtgatgatgtacttatacgttatcagcgtaaacgtaaacccgataacctattaatgcaaacaggtatggatgtattttataaaacgtttaaagaagatatcttaccgctcaaaatagtacgtaatgcctcattattcctcgccaacaaagcaacgccattgaaaaagcaggcattgaaatatgcattgggtttataa

SEQ ID NO: 30969 - DNA, 1035 bp, Pasteurella multocida
atgtttaaaaataaaacacttttaattacaggtggaacgggttcttttggtaatgctgtactcaaacgtttcttagaaacagatattcgagaaattcgtgttttttcgcgtgatgagaagaaacaagatgacatgcggaaaaaatataatgatgcaaaattaaaattttatattggcgatgttcgtgactacgatagcattttaaatgcctcgcgaggtgttgactatatttatcatgctgccgcattaaagcaagtgccttcatgcgagttttatccgttagaggcagtgaaaaccaatattttaggtacggcaaatgtcttagaagccgccatccaaaaccagataaaacgcgtcgtctgtcttagcacagataaagcggtgtacccaattaatgcgatgggcatttctaaagcaatgatggaaaaagtcatcatcgcaaaatcgcgtaacctagaaggcacaccaacgacaatctgttgtactcgctatggcaatgtcatggcctctcgtggttcggttatcccattatttgtcgatcaaatacgtcaaggcaagccttttactattactgatcctgagatgacacgctttatgatgacattagaagatgctgtggatttagtcctatatgcatttaaaaatggtcaaaatggtgatgtttttgtacaaaaagcccccgcagcaaccattggtacccttgccaaagcaattaccgaattattatctgtcccaaatcaccctatttccattataggtacgcgtcatggagagaaagcattcgaagctttattaagccgtgaagaaatggttcatgcaattaatgaaggtaattattatcgcatcccagccgatcaacgcagtttaaattacagtaaatatgtcgaaaaaggggaaccaaaaattaccgaagtcaccgactacaactcccataataccgagcgtttgactgtcaaggaaatgaagcagttactgcttaaacttgaattcatacagaaaatgattgagggtgaatacatctcaccggaggtataa

SEQ ID NO: 30970 - DNA, 1131 bp, Pasteurella multocida
atgaaaaagctaaaagtcatgacggttgttggtactcgaccagaaattattcgcttatctcgagtcattgtggcttgtgataaacactttcagcacattcttgtccatactggacaaaactatgactacgaattgaacgaggtctttttccatgatttaggtattcgcaaacctgactacttccttaatgctgcgggaaaaaccagttcagccaccatcggaaatgtcattattgccgttgatcaattactggaggaaacccagccagaagcattattagttcttggtgataccaatagctgccttgccgtattacccgccaagcgtcgaaaaatcccaacgttccatatggaagcaggaaatcgttgttttgatatgcgtgtgccagaagaaatcaatcgtcgtattgtagatcatacagccgacattaacctgacttacagcactatcgcaagagattacctcctcgctgaaggactaagtccagatctcatcatcaagacagggagtccgatgtttgaagtactgcatttctatcatgagcagattaagcactcaaaaatattagataaattaggattaacccctttccaatattttgtagtcagtgcgcaccgcgaagaaaatattaattcagaaccgcactttttggatttaatccatacattaaatgcggttgcgaaaaaatatcaatatcctgtgatcgtttcgacacatccaagaacccgaaaacggatcgaggagttaaacatcacttttcatccattaattcagctattaaaaccgttaggcttccttgactacaacaaattacagctcatggcaaaagccactctatctgatagtggaacgatcaatgaagagtcctctattttaaattttcctgcattaaatctacgacaggctcatgaaagacctgaaggaatggaggaagcggctgtcatgttagttggactacaagctgaacgtgttttacaaggtttagctattcttgatgagcaacgtcgtggacaagagcgagatttacgcttagtcgcagattacagtatgccgaatgtaagtgccaaagtgatacgtatccttttaagttataccgattatgttaaccgcgttatttggaaaaaatactga

SEQ ID NO: 30971 - DNA, 1221 bp, Pasteurella multocida
atgaagattttactattaactcaatggtttgagcccgagccagctattaaagggttggcatttgcaaaagaattaaaagcgcagggacatgacgtacaagtcttaactggctttccgaattatcccggcggaaaaatatatgaaggttataaacttcgatttttccaaaaagaatgcattgaaggcattcctgtattaagggtggcgctctacccaagccatgatagctcagccataaaacgcattctcaattatgtcagctttgcctttatggcaatgttattcggtatctttgcgaccaaaaaatgtgatgttatttatgcctatcaccctcctttaacaacaggcatcgccgccatcatgattaaactttttagacggacacccgttatctatgatattcaagatttatggccagatactttaaaagccactggcatgctaacgcatgatcgattactaaaaatcgtcgattacgtctgccaatgtgtttataaatgtgttgatcatattgtggttttaagccccggctttaaagaaaaactcatccaaaaatccgttcccgcaaataaaatcagcgtgatctataactggtgtaacgaaactgcgctaatcaacactgaaacgtcacagactgttcatttatgtcaccaaaaattcaatgttctttttgctggcaatatgggaaaagcgcaagccctcgatacgatactggatgtcgcagctaatatgcatccttatcctgatattcattttacctttatcggttctggtacagaaacaacacgcttaaacacgagaaaagatgatgaaaatttaacgaatgtgacttttataccacgtgtaccgatgtctcaaatcggtcatgtattacaacaagcagatttattactagttcatctgaagcaagacgcgttatttgaaatcacggttccctcaaaaatacaggcgtatatggcaataggaaaacccattttagttgcggtaccaggagatgcgagcaatttagtgaggctcgcacaatgtggagaaaccgcgctatcagaaaatatcgagagcatacaacgtgccattttgaaaatgtatcacttgccggcacaaacacgccatcttttaggcaaaaatgggaatactttctattttaatgaattatctttgcaaaagggtactgagaaatttattgaattgtttaaaaaaataaaacctgaaaaatcagtttga

SEQ ID NO: 30972 - DNA, 603 bp, Pasteurella multocida
atgctaaaacgttttctcgatattgtgatttcagccactgcgctaattttactttctcccctatttttaattattgcttatcaagtaaaaaaaaatctagggacgcctattttatttcatcagatgcgccctgggcgatatggtaaagcatttaacatgatcaaattccgcacaatgaaggacagcagaaatgaaaaaggcgaacttttacctgatagtgaacgattaacaccctttggtcatttcctacgttcaagtagcctagatgagttaccggaattatggaatgtcttaaaaggcgatatgagtttagttggacctcgtcctctcttaatggaatatctccccttatacaatgctgaacaagctaaacggcataacgtgcgccccggcattaccggttatgcccaagttaacgggcgtaatgcaatcagttgggaacaaaaattcaaattagatgtttggtacgtagaaaatcaatcgttgtggctagatatcaagattctcttgaaaaccctcaacgtcgtcatttttcgcaaaaatgttaacgatcaatcggggcattcgatgccgagatttttaggtgatacggagaaaaaataa

SEQ ID NO: 30973 - DNA, 1947 bp, Pasteurella multocida
atgaatatgcattatttaatcacttccttaacactgctttctaaaacgaataaaaagatttttttattggtgttagatttcattgcatgcccaattctgctttggcaatgttatatgctgagatattggagtatagaaatttcagtaaatttaccatttttattgggtatttcgttactcactgtaggaagcctccttttgtttggtgtgtatgacttcattatccgtagttttagcgaaacgttaattttacgcttaggtttagccaccattatcaccgtgcttaatctttatcttgtgacgttcattgcggaagaaatgttaccgagatcgattccgctaatgtatggttttttaatgttcacttggatttggctcagccgtggcattatacgctttatcgtaaaagcacacttaactacaaaagcccccaaaatacgtattgttgtttacggtgcaggcgcatcaggacaacaaattatcagcgcactacaacgttcttgtgagtacttacctttattttttattgatgataataagcaactttggggaagaaccttaggtggtttcaaagtctattctttcgaaactgccatgaccttgttaaaagactatcgtgttgatgaaatcttaattgcgcttccttctgtcagtcgggaacgtcgaagagagctcattaaaaagctgaataaaacaccttgtaaaataaaagaattaccgagcttacaacaactcgtggatggcgaagtagggctttctgacattcaagaaattgctatcgaagatctcttagggcgcgatccagtccccccaatcaccgctttattaaataaaaatatccaacataagtccgttatggtaactggcgctggcggttcaattggttccgaattatgtcggcaaattctgttaaatcatccgacgaaattagtgctatttgatgtttcagaatatgccctctactctatccatcttgagttattacatattcagcaagagaaaggaacacacgtggaaattatcccactgttaggctctgtacaaaatctcaagctgcttatcaaagtcatgcaaacttttgaagttaatacggtataccatgctgctgcgtataaacatgttccattagttgaatacaatgtcatacaagcggtatacaacaacatttttggcacatataacgcagctaaagcggcgatgcgatgccaagtcgatgcctttgtattaatttctaccgataaagccgtaagacccacaaatgtgatgggcacaacaaaacgtgttgcagaattgtgtttacaagcctgtgccgatacctatggtaaaaccctagacggcgtcgtccataaaacccttttctgtatggtccgttttggcaatgtattaggttcctcaggctctgttattcctttatttaaacaacaaattaaagaagggggaccgattactgtaacagacgaacgtatcatccgttatttcatgacgatccctgaagctgcacagcttgttattcaggcaggggctatggcaaaaggaggagatgtgtttatcctcgatatgggcgaacccgttaagattcttgaattagcgaagaaattaattttactttccggtctcagtatcaaaaatgaaaacaatccaaatggtgatattgaaattaaattcacgggcttacgtcccggagaaaaactttatgaagaactcctcattggcggagaaaatgtcagaaaaacgttgcatccacgaatcctaaccgcgcaagaaacatgtcttcctttttcggagttgtccttactcttagacgaattggagcgtgcatgtaaaaaatcagattatcaaaaaattcatgacattttgcgcaatgcaccgacaggatatcaacctgtcacagaattagcagacttaatttacactcaacaaaataatcacatacatctatgggggtaa

SEQ ID NO: 30974 - DNA, 831 bp, Pasteurella multocida
ttgttcagcacttatagatatgatacatcagcggaggtgttcaaaatcattcaaattaccgatcctcatttgtttaaagatgagcatggggaattattaggcatcaatacatttcaaagcttttctcaagttttacacgaaattaaagccagtcgttttgactatgatctggtgttagctacaggggatctggttcaagatagtagccgtgaaggctacttacatttttgtgaacaagtgaaaagcttagaaaaaaccgtcttttggattcccggaaatcatgattttcaaccaaaaatgtttgaaatcttgaatcaggatcaaggtaatttaaatccgaaaaagcacattcttttaggcaaatcttggcagattttaatgttagatagtcaagtgtttggcgttccacatggtgaattaagccaatatcaaatagactggttggtcgcaaaattaaaagatcatccagaacgttatacgttaattgtcttacatcaccacattttgcctacccattcaacttggttagatcagcataatttacgtaatgctcatgaattggcgtatgcattagccccttttgataaagtgaaagggattttacatggtcatattcaccaagaaatggatgctaactggcaaggttatagagtgatggcaacacctgcaacctgtatccaatttaaaccagatcataatacgtttacacttgattcagttcagcctggttggcgagagcttgaattatacagtgatggtcggattgaaacacgcgtaaaacgcattcaagataagacgttcttcccgaatatgcatgaagatggctattaa

SEQ ID NO: 30975 - DNA, 1896 bp, Pasteurella multocida
atgtcgacgaatcaagaaacgcgtggttttcaatcagaagtcaaacaacttcttcaactaatgatccattctctctattccaataaagaaattttcttacgtgaattaatttccaatgcctctgatgcggcagataaattgcgttttaaagccttgtctgtgccagagctttatgaaggtgatggggatttaaaagtgcgtattcgttttgatgaagagaaaggtaccttaaccattagtgataatggcattgggatgacgcgtgatgaagtaatcgatcatttaggtaccattgccaaatcgggtaccaaagaatttttaagtgcattaggacaagatcaagccaaagatagccaattaattggtcagtttggggtcggtttttattccgcctttattgtggcagataaagtcactgtgaaaacgcgtgcagcaggcgtaagtgcagataaagcggtgctttgggaatcggcaggcgaaggtgagtattctgtggcggatattgacaaaaaagaacgcggtaccgaaattacccttcacttacgtgaagatgaaaaagcctttttaaatgattggcgcttacgtgaaattatcggcaaatattcggatcatattggtttgccagtagaaattctagccaaagaatatgacgatgaaggcaaagaaaccggcattaaatgggaaaaaatcaataaagcgcaagccttgtggacacgtgcaaaaaatgagatttcggaggaagaatatcaagagttctataagcatttaagtcatgattttaccgatccgttactttgggcacacaataaagtagaaggaaatcaagaatataccagtttactttatgtgccagcaaaagccccttgggatttatttaatcgcgaacataaacacggcttaaagctgtatgtgcaacgtgtctttattatggatgatgcgcaagtctttatgccaaattatctgcgttttatgcgtggtttattagattccaatgatttgccactgaatgtatcgcgcgaaattttacaagataacaaagtcacgagtgctttacgtaaagccctaacgaaacgtgcattgcaaatgctcgaaaaattagccaaagacgatgcagagaaataccaacgcttttggcaagagtttggtttggtgttaaaagaaggtccagcagaagattttgcaaataaagaaacgattgcaaaattattacgttttgcttcaacacacaatgacagcagccaacaaagcgtgtcgttagaagactatgtggcacgtatgaaagaaggacaaaaggcgatttattatattacggcagatacttatgtcgccgcgaaaaactcaccgcacttagaattgttcaataagaaaggcattgaagtattattgttgtccgatcgtattgatgaatggatgttaagctacttaacggaatttgatggtaagccactgcaaaccatcagtaaagcggatttagatctaggtgatttagcggataaagaggaagacagtcaaaaagcacaagatgagcaatatgcttcttttgtggaacgtgtgaaaaccttgcttggcgagcgcgtgaaagaagtgcgcttaactcaccgtttaacggatacgccagcggttgtttcgacgggtgatgaccagatgaccacccaaatggcgaaattgttcgctgcggcgggtcaagcgatgccagaggttaaatacaccttcgaattaaatccagaacatggtttagtacaaaaagtagcagaaattgccgatgagcagcaatttgccgattggattgaattgctacttgaacaagcaatgttggctgagcgtggtagccttgaaaatccagttgcctttattaaacgcatgaacaccttgttaagtaaactcacaagtcattaa

SEQ ID NO: 30976 - DNA, 1155 bp, Pasteurella multocida
atgtctcgttatttattcacttccgaatccgtatcagaaggacatccagataaaattgccgatcaaatttccgatgcggtattagacgaaattttaaaacaagatcccaaagcccgcgttgcttgtgaaacctatgtaaaaacagggatggcattagtgggtggcgagatcacaacatcggcttgggtagatattgaaaacttaacccgccaggtgatttgtgatattggctataaacattctgatatgggctttgatggtcattcttgtgccgtgttaaatgcaattggtaaacaatcttccgatattaatcaaggtgtggatcgtgaaaatccattagatcaaggtgctggtgaccaagggattatgtttggttatgccactaatgaaactgaagtgctgatgcctgcagccattacttatgcgcaccgtttaatggaacgtcaagccaaggtgcgtaaagagggtaccttgccatggttacgtcctgatgcaaaaagccaagtcacgctaaaatatgaagatcacaaaattgttggggtcgatgcggtcgtcctttctacgcaacactgtgacagcatttcacaacatgatttgcatgaagcagtgatggaagaaattattaagcctgttttacctgcagagtggttatcaaaagaaaccaaatatttcatcaacccaacaggacgctttgtgattggtggtccgatgggtgactgcgggttaacagggcgtaaaattattgtggatacttacggcggtgccgcgcgtcatggtggcggtgcattctcgggtaaagatccttccaaagtagaccgctcagctgcttatgcggcgcgttatgtggcgaaaaatattgttgctgcggggcttgcagatcgttgcgaaattcaactttcgtatgcgattggggttgctgatccgacgtctatcatggtggaaacttttggtaccggtaaagttgctaacgaattattagtagcattggtgcgtgaattctttgatttacgtccgtacggtttaattaaaatgcttgatttaattcagcctatttaccgtgaaacggcggcttatggtcactttgggcgtgaacaattcccatgggaaaaagttgatcgtgcagaagaattacgcgctgcagcaggacttaaataa

SEQ ID NO: 30977 - DNA, 219 bp, Pasteurella multocida
atggcaaaagaagattgcattgagatgcaaggcacaattttagaaaccttgccaaacacgatgtttcgtgttgaattagaaaacggtcacgttgtgacagcccacatttcaggtaaaatgcgtaaaaactatattcgtattttaaccggtgataaagtgaccattgaaatgacaccttacgacttaaacaaaggtcgcattattttccgtagccgctaa

SEQ ID NO: 30978 - DNA, 1563 bp, Pasteurella multocida
gtgcttcattatttaaagaagatgaaaaaaaagatttttacttattttattgcgattttttcaggcattatcggggtgttagccttttccccttttgattattggggttgtgcttacttatcgcttttaggtcttatttttgttgctaaaacagcggaaaaaaagaccgcactttggtcggcatttttgtggggattagcttttttcacttttgggataaattgggtacacgttagtattcatcaatttggtggtgcctctgtcgtggtgagctatgtgttagtccttgtcttagccgcctatcttgcattgtatccgatgctctttgcttatttgatccagcgttttcaaatcagtagcttagcgatgttccccgtgatttggacctttaccgaatttttacgcggctggctctttaccgggtttccgtggttacaatttggttatagtcaaatcgatagcccatttgctcatctcgcgccgatgtttggtgttactggcgtcactttctttgtaatgtgggtcagtgcggtgatttttaatttactttccgtcttgcttattaaaccaagaaagtggaatgttgtgatagctaatctccttttactcacactagttggtggattgtcagcttattcttccaaggctgagtatgtcagaaaaatagaagacagggatttgcttgtgacgttagcacagggcaatattgagcaaaatttaaaatgggaaccagaatatctgtatcaaactttagatatctatcataagttaattagtcagcatctcggtaaaactgacgtcattattttgcctgaatctgcattgccagtgttagaaaatcatattcagccttttttccaagggctacaagcacatgcacaacaagctggaacggaaatcgtcatggggactatctatcaagataaaacagcaaataagttattaaattcaattattaccttgggaaatacggatttcccttattcattagaaacgacaaatcgttacagtaagcatcaccttgtgccttttggtgaatatgttcctttagagacattattgcgtccattagggagtgtgtttaatttacccatgtctgctttccaaagtggtgatgaaattcaatcgccgttagtggtcaaaaatcgccagctaagtgcggcaatttgttatgagattattttgggtgagcaactaaggaagaatgtgaaacaagacacggatttcattctcacagtctcaaatgatgcgtggtttggtgactctattggaccttggcaacatttacagatggcaagaatgcgtgctttagagtttgggaaaccagtcattcgtgccactaatactggcattagcgtgtttattgatgagcaaggtaaaattgttgcacaagcgccgcaattcattgaaacgacgttaacgcataaagtggcggctacggaaggtcaaacgccttacgctgtgtttggtaataccgctatctatggactgtcgttgctactgctcttaatgcgtgggttcggcgcactgattcgtcgtcgtttattcatgccccgtctgtaa

SEQ ID NO: 30979 - DNA, 903 bp, Pasteurella multocida
atggctaacgaagaacaatcaaatacttactctactgaatctcaccagaaaaaaagtttttttcaatcgctgtttgggcgctttttccaaggtgaattaaaaaatcgtgaagagctggtcgaagtgattcgcgattcagagcaaaacgagctgattgatcaaaatacacgggagatgatagaaggtgtcatggaaatcgcggaattacgcgtgcgtgacattatgatcccccgctcacaaatagtatttattcacacggatcaaaatttagattcttgtttggatacgatcattgtgtcagcacactcgcgtttcccggtgattacggatgagcgtgataatatcgcagggattctacatgcgaaagatttgctccgctttttacgttccaatgcggaagaatttgatttaatgcctttattacgtcctgcggtaattgtgccggaaagtaagcgagttgatcggatgctcaaagatttccgttcagaacgttttcatatggcgatcgtggttgatgagtttggcgcagtgtctggtttggtgacaattgaagatattcttgagcaaattgtaggggatattgaagatgaattcgatgaagaagaaattgtcaatattcgtcagctttctcgccatacttatgcggtacgcgctttaacggatattgaagactttaatcaacagtttaatactcactttgctgatgaagaggtggataccattggtggggtggtcatgcaagcctttggttacttaccaaaacgcggtgaagaaatcaccattgagaatatcggttttaaagtgacttctgcggatagtcgtcgtttgattcaattacgcattactgtcacggatgagcagttagctgaaattgaaaaagccgaagaactaaaggaagattaa

SEQ ID NO: 30980 - DNA, 1521 bp, Pasteurella multocida
atgacaactcaaattccaaatcaagacagtgaaatactgctcacaatgaccaatgtctgtaaatcctttcccggtgttaaagcgttagacaatgcaaacctaactgtgcgctcgcattctgtccatgccttaatgggcgaaaatggggcgggcaaatcaaccttattaaaatgcttatttggtatttacagtaaagatgaaggtgacatccttttcttaggcaagccagtcaactttaaaacgtcgaaagaagccttagagaacgggatttccatggtgcaccaagaacttaacttggttaaacaatgtactgtaatggataatctttggttaggacgttatccattaaaagcaggctttgtcgatcacggcaaaatgtatcgtgataccaaagcgatttttgaagaattagatatcgatatcgatccaaaggaaaaagtggccaaattgtcagtgtcacaaatgcaaatgatcgagatcgcaaaggccttttcatacaatgccaaaatcgtaatcatggacgaaccgacttcttcgctttcagaaaaagaagttgaacacctatttaaaattatcgcgaagctgaaacaacgtggctgtggcattatttatatttcgcacaaaatggacgaaatcttcaaaatttgtgacgaaattacgattttacgcgatggtaaatggatcaatacagtcgctgttaaaggcaccacaatggatcagattgtatccatgatggttgggcgtgaactcacacaacgtttcccaccaaaaaccaataccccaaaagaaaccatcttaacggtggaaaatctgaccgcacttaatcagccatctattcaagatgtcagttttgaattacgcaaaggcgaagtgctcggcattgcgggactggttggggcaaaacgtaccgatattgtggaaacgatcttcggggtgcgtgaacgtaaatctggtgtgattaaactgcacgataaggaaatgaaaaaccgcaatgcgttcgaagccattaacaatggttttgctttggtcacggaagaacgtcgctctacagggatttatgcgaatctcagtattgagtttaactcattaatttctaacatgaaatcctatatcagcaagttaggtttattgagtaacacaaaaatgaaaagcgacacgcaatgggtcattgattccatgaatgtgaaaacgccatctcacaaaaccaatattggctcattatctggtggtaaccaacaaaaagtggtcattggtcgttggttattaacccaacctgaaatcttgatgttagacgaaccaacacgtggtatcgacattggtgcgaaatatgaaatttatcagctgattatggagttagccaaaaaagataaaggtatcatcatgatttcatctgaaatgccagagttattaggggttactgaccgaattcttgtgatgagtaacggtaaagtcgcaggtatcgtgaatactgctgaaacctcacaagaagaaattttacagctcgctgcaaaatatttataa

SEQ ID NO: 30981 - DNA, 3438 bp, Pasteurella multocida
atgacaaccacatatttcgatttcacgattcctacacaagctaatgatcataaaattctgggtaatgttctgatgggcgcagattgccttgcgataagccaaattgcgcagcaatattcaggtctgaccgtagttgtcacagcggatacgcgaagtgcggtacgtttagagaaagtattggcacaatttagttcattacccgtgactttttttccagattgggaaacattaccttacgatgcattttcgccacaccaagacattatttcttctcgtttaagtgcgctatctcaattacagcattgtcaaaaagggattgtcattttacccattagcactttaatgcagcgtttatgcccgccgacatttttacatcataatctgctgttagtgaaaaagagtgatcgcttgcagattaataaactgcgtttgcagttagaaagcgcgggttatcgtgcggtagaacaagtgttagagcatggggaatatgcggtgcgtggggcattattagatttattcccaatggggagtgcggtgcctttccgtttagatttttttgatgatgaaattgactcgatccgcacttttgatgtggatacacaacgtaccctcgaagaaattcaagccattaatttattgcccgcgcatgaatttccaaccgatgagaaaagcattgaatttttccgtacgcaatttcgtgaaacttttggtgaaattcgtcgtgatccggaacatatctaccagcaagtgagtaaaggtactttaatttcaggtattgaatattggcagcctttattttttgaacagatggcaagtctatttgattacttaccaaagaatactttgtggttagatgtaggcgatatccaagagcaggggacgcgtttttatcaagatgctgagcaacgctatgaaagtcgaaaagtggatcctatgcgtccgcttttaccgcctgatcgtttatggttacgtctcgaagagattaatcggatattaaagcaatatccaagaatcagtttcaaactggataaagttcgttcatcggcacgtcaaaagaaccttgccgtgcaacctttacccacactcgctattcaatcgcaacacaaagaaccattacagcaattacgtcaatttagtgatcaatttaagggcaagattgtgttttcggtggaaagcgaagggcgccgtgaaaccttattggatttactctcgccactcaaaataaaaccacaaaaattaaccgcactttccaatatcagtgagaagtgtaatgtcttaataagtggactagaaaacggctttattattgataacgatcagccaattgcggtgatgacggaaaccgagttgcttggtgagcgagtacagcagcgcagtcgagataaacgtaaatcagtcaatcctgatactctaattcgtaatctcgcggaactcaaaattgggcagccggtagtgcatttagatcatggtgtagggcgttatgcgggattagtgacgcttgaaaatggaggcattacggccgaatatttgctgttaaattatgctaatgaatctaaattatatgtccccgtatcctctttgcatctgattagtcgctatgtggggggggctgatgaaacggcaccattacataaattagggagtgatgcatgggtacgtgcacgtcaaaaagccgcggaaaaaattcgtgatgtggcggcggaattgttggatgtgtatgcccaacgcgaagctcaaaaaggctttgctttccattatgatcgtgaagcgtttcaacaatttgcagcgactttcccgtttgaagaaacagtagatcaagaaatggcgattaacgcggtgattgcagatatgtgccaagcaaaagccatggaccgtttagtttgtggtgatgtgggctttggaaaaacagaagtcgcgatgcgtgcggcatttttggcggtaatgaatcataagcaagtggcggtattggtaccgacgaccttattggcgcaacaacattttgagaattttaaagatcgttttgccaatttaccgatcaatgtggaagtgctttcacgttttaaaacagcgaaagaacaaaaagtggtcttgcagaatctggcggaagggaaagtcgatattttgattggcacgcataaactgattcaatcggatgtgcaatttaaagatttgggtttacttgtgatcgatgaggaacatcgttttggggtgcgtcaaaaagagcggattaaacagttacgtgccaatattgatattcttaccttaaccgcgacacctattccacgaaccttaaatatggcgatgcacggtattcgggacttatcgattatttcgacaccgccagcgcgccgcctgacgatcaaaacctttgtcaaacaaagcgatgaatcagtgatccgtgaagcgattttgcgtgaaattttgcgtggtggacaagtgtattatctccataacgacgtagcgagtattgaaaattgtgctgaaaaattgcgtacactggtacctgaggcacgggtgaccattgggcatggtcaaatgcgtgaacgtgagcttgaacgggtcatgtcggatttttatcatcagcgttttaatgtgttggtgtgttccaccattattgaaacggggattgatgtccctaccgcaaatacgatcattattgagcgtgcggataactttggtctagcccaattacatcaattacgtggtcgagtggggcgctcacatcaccaagcgtatgcctatttattaaccccaccgataaaagccatgaccaaagatgcacaaaaacgtcttgaggcgttagagagtttagataatttaggggcgggctttattcttgctactcacgatttagaaattcgtggtgcgggggaactccttggttctgaacaaagtgggcaaattgaatcgattggcttctctttgtatatggatttattggaaagtgcggtgaatgccttaaaagctgggcgtgagccgtccctagaagaactcactcaacaacaagtcgagattgatttacgtttgcctgccttgttgccagaggattacttgggtgatgtaaatattcgtttatctttctataaacggattgctggggcggagaataagccggaattagatgagttaaaagtggagttaattgaccgttttggtcgtttaccggaagccactacatcgctattccgtatcgcagaattacgccagttggcgaaaaagattcagatccagaaaattgatgcgaatgcacagggtggcttcattgagtttgcctctaatgcggatctggatccaatgaaatttttacaattaattcaaactgaaccaagtgtgtatcgttttgatggaccaaccaaattccgctttagcaaaacctttgagggacataaagtgcggttggattttgttgagaatctcgtgaaaggattgagccagtag

SEQ ID NO: 30982 - DNA, 1956 bp, Pasteurella multocida
atgaatcgggtaaataagcaaagaaaagtacaatgttgggtgggggagaatgctacattatttcccccactcgcacgcttatctggaataaaaagtgcggtatggattggcgatgatttaccgccttttttgtcttttgctcatttcgatttcaagcaagcaaaaaacatgttggggcaagagtttgccttgattgtctatgatgcaaggggagggctgaatcttgatgccttagctatcgccagtggcactttgcaacaagacggtgtgttgctgattttattaccacaatgggcgatgctgagcacttggcaagatcctgattccgtccgttggtctggtgaaaatgatcctattttgacaccgcactttctacattattttcaacaaaaagtacgagactacggctttccggtttatcatacttttttcccttcgctatcattgccggataaatcaaccagtgcggtcgattttcaatcagaaccgacagtggaacaagcacagttactgcaccgtatcaacaaggctactgaagcggtattgattgtgacggcgaagcggggtcgaggaaaatcggcgctagcaggtttttgggcaaggcagttgaagcaacaaaaccaaacattgatattaactgcaccgaataaagcggctgtcaggattttacaagcgtttgctaatacggcgttagatttcaagtcaccagatttactttgtgagcaaattgcacaagatccccatgcgtttgctgataaatggttattgattgatgaagcggctatgctccctttaagtttgttagaactgctgacatcaacctttaaaggcatactctgtaccactacgatacaaagttacgaagggaccgggcgtggttttttactcaaatttttagccaatttagaccgcacttttgcgcattttgagcttcaccagcctctacgttggcaagttgatgataagttagaagcctttatggatgatctcttattgctacatgcggaagatttgccttttgccccattggcgtcagctgaaggcgttcaatttcagcgctattcacaacatacattatatcagcaacaaaaaattgctccgctttatggtttactgacgcgtgcccattaccgtacgtcaccactggatttacgccgtttgtttgatgcgccaaatcaacatttttatttagcacaaaaagacgaacatcttcttggtgccgcttggcttgtgcaagagggaagtctgcaatcagaacaacttattggtgagattgagcgcggtttgcgccgtcctcgtggcaatttagtgcctcaattactgtgttttcaagcgcatttaccgcaagcctgccgtttatcctcattgcggatttcccgtattgctgttcagccaaattggcaacagcaaggtattgggcaacagttagtcaaaaatatttgccaagatgcacaggtggattttttgtccgtcagttttggttacaccactaagttggctgcattttggcaaaagtgcggttttttattggtgcatttaggtgaacagaaagaagccagtagcggttgttactctgtaatcggcttaaaaccgttgtcgtccgcagggataagcttttgtcagcaagcgtaccaacagttccaacgtaatctcagtttatcgcgacactccctcgcgacggcgttcccttctttgccctccacatggcaattagatccgcaagattggcgtgcattagtacattttgcttattttcaaggctcatttacagccgccttacctgcgatacaacgtttgttggcacaaactaacaggtgcatttgtccgttattatctgccctgttacaaccgtcatcaaacgagatgaaatttgtgggaggcaagaaaaatgggataaaaatatgccgtgaggaagtcaagaaattgttgcaaaatcatacagccgttttatcataa

SEQ ID NO: 30983 - DNA, 612 bp, Pasteurella multocida
atgttgacagacaaagaaaaacgacatttaggtttagcgcatcagccttatgatccggaattggcagagatgcgtttacgtaataaagaattattgcatgaatataatgtgttaactcgcccttcagataaacaaacaaaagcccgtttgatcttatctattcttggtaaagctgcgaatacacctcacattaatacgcctttttattgtgattacgggcaatttattgaagtcggaaaaaacttttttgcgaattatcactgtactatcctagatacaggaggcgtgaagattggcgatgatgtgttatttgctccgaatgtgagtttatacaccgtagggcatccaattgatcctgaattgcgtaaggcagaatgggaacaagcactacccattgtgattgggaataatgtgtggattgggggcaatgtggtgattttaggcggcgttactattggtgacaatactgtgattggggcgggttctgtggtcacaaaagatattccggcaaattgtgtagccgtgggcaatccatgtaaagtacaacgaatgattagcccgcaggaccgagaggattatttacaacgttttaaaccagactggaatgattga

SEQ ID NO: 30984 - DNA, 2016 bp, Pasteurella multocida
atgaaattaaataaacagcaacaacaagccgtggaatatgtcactggaccttgcttagtgctcgctggggcgggctcgggtaaaacacgggttatcattaataaaattgcttatctcgttgccaaatgtggctatgttccgcgccagattgcggcggtgacttttacgaacaaagctgcacgggaaatgaaagaacgtgttgcccactcaattggtaaagaagccagtcgtggtctaattgtatccacgtttcacactttaggctttgatatgattaaacgtgaatataagcaattaggctttaaagcgaatatgacgttgtttgatgaacatgatcaatatgcgctattaaaagagttaacagcggacttattgtgtgaggacaaggatttattacgtgaattaatttcggtcatttctcgttggaaaaatgatttagttttgccaccacaggcaaaacagcttgcacgtgatcacaagcaacaaatgtttgcagagtgttatgatcgttataaccagcaaattcgtgcatacaatgcattggattttgacgatttaatcatgttaccgaccttattattacaacaaaatgatgcggttcgcacgaagtggcaacagaaaatccgctatttattagtcgatgaatatcaggataccaataccagtcagtatgaattgatcaaattattagtcggggagcgcgcttgctttacggtagtcggagatgatgatcaatcaatttattcttggcgtggcgcgcagccacaaaatatgatgcggttgaaaaccgattttcctcacttaaacgtcgtgaaattagaacaaaattatcgttcaacacaacgcattttacattgtgccaatattttgatcgataataatgatcatgtgtttgctaaaaaactgttttcaacactagatcaaggggaaaagctacaagttatcgaagcaaaaaatgaagaagaagaagcggaacgtgtggtaggggaattaatcgcacaccgatttatgcgcaaaaccaagtataaagattatgcgattttatatcgcggtaatcatcaatcgcgcttgttggaaaaggtgttaatgcaaaaccgtattccctacaaaatttcaggggggacctcctttttctcgcgtgcagaaattaaagacatgatggcgtatttacgtttagtggtaaatcaagatgatgacgccgcgtttttacgtattgtgaatacgcctaagcgcgaaattgggacggtgacgttacaaaaattaggtgagttagcccatgaaaaacattgtagtttatttgaagcaatttttgattttgagttaattcaacgaattacacctaaagcctataatgcgttgcaacatttcggacagtggatcgtgcaattaagtgatgaggtaattcgctcagaacctgaacgcgcgattcgtagcatgctcgcacaacttcattacgaagaatacttatacgaatatgcgaccagtcctaaagcagcggaaatgcaaagtaaaaatgtggcgacactgtttgattgggtcgcggagatgttaaagggaaatgacatggacgaaccaattacgcttaatcaagtggtgacacgtttgacattacgtgacatgttggagcgaggagaagaggatgatgaaagtgatcaagtgcaattaatgacgctacatgcttccaaaggcttagaatttccgcatgtttttttaattggaatggaagaagggattttaccgcatcagaccagtattgatgaggataatgtggaagaagaacgccgtttagcctatgtaggcattacgcgtgcgcaacaaacattaaccttctcgttatgcaaagaaagacgccagtttggtgagttactaaagcctgagccaagtcgctttttggctgaactacccaccgatgatgtgcagtgggagcgcgataagccacctttaacacaggaacaagttcgcgagaataccgccacacaattggcgaacttacgtgcgattttgcggggtaaatag

SEQ ID NO: 30985 - DNA, 1158 bp, Pasteurella multocida
atgaaagcattacattttggtgcgggtaatattggacgtggatttatcggaaaattattagctgatagtggtattcaagtcatctttgccgatgtcaatgatcatgttattgagcaactcaaaacacaacgggcttatccagtcaaaattgttggcgatcgcctgaatgtgattgaaaccgtgtcaaacgtcacaggagtcaattctaaaaatgaggcggatattattgcatgctttactgaagttgatttagtgaccaccgcggtgggacctaatgtattaaaaatcatttcaagcactattgcaaaaggcttaagcgcacgttttcgtgcaggaaatacccgcccattaaatattattgcatgtgaaaatatggtgcgaggtaccagctttttaaaagacaatgtattctcttatctcacccctgaagaacagcaacaagcggaagcacagattggctttgttgattctgccgttgatcgcatcgtgccaccagtacagtttgatcccgccaacccgttattagtgacggttgaagagttcagtgaatggattgtagataaaacccaatttaaaggtacaattccagctattactggtatggagcaaacggataatttaatggcatttgttgagcgcaaactgtttacattaaatactggacacgccacgaccgcctatttaggcaaattaaaaggtcaccaatttgtcaaagacagcattgatgatccagatatcagggaagccgttaaagccacgatgcaagaaagtggtgccgtattaattaaacgttatggttttgatcctcatgcccacgcggcttacattgaaaaaatcctgaagcgttttgccaatccgtatttacaagatgatgttgatcgtgtgggcagagaacctttacgaaaactcagctataacgatcgtttaatcaaaccattacgtggcaccttagaatatggattaccgaatcaacatttaattcaaaccattgctagtgccttagcctatcgcaatgagagtgatccacaagcagttgaattagctcaacttttacagcaagatacgctcgaaagtgcggtgaaaaaaatcactgaactgacagaatcaaacattgtgcaacaaatcgtaactgcttataatgccttgcaaaaaaactaa

SEQ ID NO: 30986 - DNA, 519 bp, Pasteurella multocida
gtgcagtcagtcgatcccatttatgaaaaactcaatgaagccacctcaattcgtggtttcattacggcttctgtcgcgatttttgacgaagcggttgataaacttattaatcgcgtttttcgtaaaacagattttgccgtcaaatctgtagttgactcattattatctaattctggaccgctctgcgatttatcgattcgtttaaaagtcttattaggtttagggattatcgagcatcatgtgtttagcgatatcagccattttattgagattaaagaaaagctgaataacgatgaaaaagaatacgattttgccgatctcattattattgattttatccaacagttaagctgtcaaaatgataaatccttgctcaattttccgatggaaaaagacgaaaaccccgactcactactctatcaagtcaaagccttacgtcgagaaaaattgattcgttcttatctcaccttggcaatcactgaaatttacgagcaactccaaatcgaaagtccattgtga

SEQ ID NO: 30987 - DNA, 2793 bp, Pasteurella multocida
atggcaaaaatcgcagaaaaccctttagtcttagtggatggttcttcgtatctataccgcgcatttcacgcatttccgcctttaacgaactcattaaatgagccaactggcgcaatgtacggtgtattaaatatgttaaaaagcctcatttcacaagtacaaccaagccatattgccgtggtttttgatgcgaagggcaaaacctttcgtgatgaaatatttgaacaatacaaatctcatcgtcccccaatgcctgaggaattacgcagtcaaattctgccactgcacaatattattcgtgccttaggcattcccttgttagtggtagaaggtgtggaagccgatgacgtcattggtactcttgcggtgcaagcctctcgtgccggaaaaaaagtcttaattagtaccggtgacaaagacatggcgcagcttgttgatgagaatattatgctcattaacaccatgaccaatactttattagatcgcgagggagtacttgaaaaatatggtctgcctccggaattaatcattgattacctcgcgctaatgggcgatagctcagataatattccgggaattccgggcgtaggtgaaaaaacggcgttaggtctgctacaaggcataggtagcatggctgagatttatgcaaatttagacaaagtcgccagtttatccctacgtggcgccaaaacattaggagcaaaattagccgaggcaaaagatctcgctgatttatcttatctactcgccaccattaaaaccgatgttgcactggatgtcagtccagaacaactgacttttggtgttgcgaataaagatgcgttaattgaatattttgctcgttatgaatttaagcgctggcttaacgaagtgatgaatggaggagaaagctccgtcaccaatggatcggaacaggcagtgaagatcaatccttaccaagccactccaagtacaaatgagagagaaaataccgtttctgtccaaattgaccgtagccaataccaatgtcttctcgaactcagtgaattgaagcgctggatcgacaagcttaatcaagccaaatgtattgcaattgatactgaaacagacagtttagactatatggtggctcatttagttggggtatcttttgcgttagagaatggtgaagctgcttatttaccattacgccatgattatcttggtgcacctcagcaagtagattttcagaccgcactttctttgcttaaacctgttttagagaaccctgaaatccataaagtaggacaaaatattaagtacgatttaagtatctttgcccgtcacggtattgaggtacaaggcgtgagctatgacaccatgttactgtcttatgtgttagacagtactgggcgccataatatggatgaattagccaaacgttatttaggtcaccaaacaattcactttgaagatatcgcgggtaaaggcaaagctcagctcacctttaatcaaataccacttgaacaagcggcggaatatgcggcagaagatgccgatattaccatgaaattacagcaggtcttatgggaaaaagtggcagcacagcctgaattagtgaagttatatcaaaccatggaactgcctttagcctcggtgctgtctcgaattgaacgtcatggcgtgctcattgatagtgacgcactgtttagtcagtcgcaacaaattggcgtaagattgaccgcacttgaacaacaggcgtatgaattggctggacaacaatttaatttggcctcaaccaaacagttgcaagagatcctgttcgataaattgagcttacctgtcttgaagaaaacgcctaaaggcgcgccgtcaacgaatgaagaagtcttagaagagcttgcctacgagcacgccttgccaaaaattcttgtggagcatcgtggattaagtaaattaaaatccacttatactgacaaattaccgctcatggtgaataaagacacgggacgtgtacatacttcctatcatcaggcggtaaccgccacaggccgtctttcatcgagtgatcccaatttacaaaatattccgattcgcaacgaggaagggcgccgcattcgtcaagcctttattgcacctgaaggctatcaaattatggccgcagactattcccaaattgaactgcgaatcatggctcacttatcgcaagataaagggctaattaacgcatttaatgaaggaaaagatattcaccgttcaacagcggcagagatctttggcattccattagcgcaagttagcagtgaacaacgtcgtagcgccaaagccattaactttggtttaatttatggcatgagttcatttggactttctcgtcaattaggcattccacgtcatgaagcacaaaaatacatggacttgtatttccaacgttaccccggtgtacaagcctttatgcatgacattcgcgaaacagccaaagcacaaggttatgtaacaaccttgtttgaccgacgcttatatttacctgatatccaatcttccaatgccattcgtcgcaaagcggctgaacgggttgccatcaacgcgccaatgcaagggacagcggcagatatcattaaacgtgcaatgattactttagatcgtgaaatcgcaggacaacctgacattaaaatgatcatgcaagtacacgatgaattggtctttgaagtacgcacagataaaatcgaacactttcgcacgatcatcaaaaccacgatggaacaagctgctcaacttgtggtaccgctgattgtagatgtgggtgtgggtaaaaactgggacgaggcacattaa

SEQ ID NO: 30988 - DNA, 669 bp, Pasteurella multocida
atgacacctcaaactgagcaagaattattacaacgggcacaggcgattgcaggcttacgctttgctgagctggcacaaagcctgcatatgccggttccacctgacttaaaacgagataaaggctgggtgggtatgttaattgaaaccgctctcggtgcaaccgcaggcagtaaagctgagcaagattttgcgcacttggggattgagttaaaaacgctcccgattaatgcacaggggatgccgttagaaaccacctttgtcagcttagcgcccttaacgcagaatgtgggggtcagttgggaaaactcacatgttaggcataaactcagtaaggtactgtggattttagttgaaggggaaagacagattccgttgtctgaacggcgtgttgggcagccgattttatggcagccttcagcacagcaagaattgcgtttaaagcgagattgggaagagctaatggaatatattagcttaggcaagcttgagcagattaatgcgaccttaggcgaggtgttacagcttcgtccgaaaggggcaaacagtaaagcgttgacccgtggaattggcaaacacggtgaaatgattgatacgttacctttaggcttttatttacgtaaaacctttactgcggaaattttacaacaatttttgcttggcacggggtaa

SEQ ID NO: 30989 - DNA, 543 bp, Pasteurella multocida
atgtcacctgtttattattgctatgaggattctccggttgggcgtttattgatgctgtgtgaagcggagaaacttacgcatcttgattttgttgtcacgcaagttgctcctcgccccgattggattttagatgaaaatcgaccgctctttttacaggttaagcaagccttgcgggactattttgctgggaaacgcgtgtgctttgatgcgattcctttcgcgcctaaaggtacggcatttcagcaacgcgtttggtctgcattacaacagttagcttatggtgaaagcacgacttatggcgagctggctcagcaaattggtcagccgaaggcggtgcgtgcggttggtggggccgttggtcgtaatccaattagcattctgattccttgtcatcgtgttttaggtaaacaacgtgaattgaccggttttggtggaggcttacccatcaaacgccatttgttgcaattagaacaaattgactatgtggatcacggggtagagtttgtaaaacctaaacacctcaaaaaatatcagcaaaaatga

SEQ ID NO: 30990 - DNA, 1332 bp, Pasteurella multocida
atgttttattatacaaataacttaaataacaaaggtctcataattatggcgaaaactagcaaatttactcaaactcttcttgcttccgcgttagcggtggtcgcgggtagcgcttctgctgccgctttccaactagcagaagtgtcaacatccggtttagggcgtgcttatgcgggggaagccgcgattgcagataatgcggcagtggttgccacgaacccagcattaatgagcttattgaaacaacctgaaatttctgttggggcaatttatgtggacccaaatattaatttaacctcaccaatgccaggattcgcctataaaaatattgcgccgaatgcgttagttccgacagtgtatggtgtgtatccaattaacgaaaaattcgctgtgggcggtggattgaatgttaactatggtttagccaccgagtttgatgacaaatatgcgggcggctttttaggcggtaaaaccgatttgaccgcaattaactttaacttaagcggtgcctatcgtgttacggagaagttcagcgttggcttaggcttaaacgcagtgcatgcgaaagcgaaacttgagcgttatgcaggtgtggctttgaaattaaaagtaccaaatgtagctcaacttgcagcattaccagcgaataccgtaatttcaaagctacaaggtgataaatggggctttggctggaatgccggtttggtatatgaatttaatgaacgtaaccgcattggtatcgcctatcattcacaagtggatattaactttaaagggcagtattcaaatcacttcccattagccgctgcagctttgctccagaccaagggcattaccgcgacaggtggcaaagaaatcccgggtaccttacatttaccgctaccagcttactgggaaatttctggttatcataaaatgaccgatcgttttgcaatgcactatagctataaatatacgcaatggagcaaatttaaagagttacgtgcaaaaggtacggacggtaagaccttatttagcaaaacagaagagtttcgtgattcttcacgtattgcccttggtgcgagctatgatgtaaccgatgcattaacggtacgtacgggtattgcgtatgatgaaagtgctgcagatgagcataacaccatttctattccagatacggatcgtacttggtttagtgtgggggccacttaccgctttacgccaaatgtatctattgatgccggttttgcacatttaaaaggcaagaagaatacctttaaagaagaaggggttccatttactagcaaagccagtgcgaacctttatggtttaaacgtgaattaccgtttctaa

SEQ ID NO: 30991 - DNA, 327 bp, Pasteurella multocida
gtgctaaatatttcatcaaaattagaaggaaaaggtatgagtaaattaaaatgcaatccagaagaagccaaagcctgttgctgtgttgatgtgggtactattattgatggttctgactgtacggtagaatttgaacaagtatatgcctcgcaagcacaagccgaagaagcactggcttatttaactgaaaaagcaaaagccgcagaaagcgatccttgcgaaatcacaagtgatatttcagccgtagaacaaggagccttgcttaaagcacaatttgtgtttagctgccaagcagaagccatgattttccaactttcgacacgataa

SEQ ID NO: 30992 - DNA, 1656 bp, Pasteurella multocida
atgtcaatctttacccttgctcaacattggttagcacaagatcctgatcctgaaacacatgcagaacttaccgcacttcttgacgcggcaaaaacgggggatgcgaaagcaagcacagaattaaatgcacgctttgatggtcgtttacagtttggtactgcaggcttgcgtggtcgtttacaagccggaccaatggggatgaaccgcgtgttagttgcacaagcagcggggggcttagccgattatttaaaagactatgataaaaccccttccattgtcattggctatgacgggcgtaaaaattcagatgtatttgcacgcgatactgccgaaattatggcaggcgcaggcatcaaagcctacttattaccacgtaaattgccaaccccagtccttgcttatgcgatcaaatattttgataccacagcgggggtcatggtgaccgcaagtcataacccaccagaagataatggctataaagtctatttaggtaaagccaatggtggcggtcaaattgtttctccagcagaccaagacatcgctaaactgattgataaagtggcggctggctccattaaagatttaccacgtagccaagattttatcgtactggatgacgaagtcgttgatgcctacattgcgaaaacagctagccttgccaaagaaccccaaacagacattaattatgtctataccgcaatgcacggtgtcggctatgaagtattgagcaaaacgttagctaaagcaggtttaccacaaccacatttagtggcggagcaagtgtggccagatggcacgttcccaacagtaaacttcccgaatccagaagaaaaaggcgcattagacttagccattaaagtggcgaaagagaaaaatgccgaatttatcattgcgaatgacccagatgctgaccgcttagccgtcgcggtaccagatgcagaaggcaactggaaaccgttgcatggtaatgtggtcggttgtttcttaggttggtacttagcgaaacaatatcatgcacaaggacaaaaaggcattcttgcttgttcattagtttcttcgccagcactggctgagattgcgaaaaaatacggtttccaatcagaagaaacactcactggctttaaatatattggtaaagtcgatgggttattattcggctttgaggaagcattaggttatttagttgacccagacaaagtccgtgataaagacggtatttctgccgctatttcgtttttagatttagtacgttacttgaaaaaacaaggcaaaacactcgccgactatgccgatgaattcactcaagaatttggtgcttatgtaagtggacaaatctcgattcgtgttgatgacttatctgaaattggcaaattaatgagtgcactgcgtcaaaatccaccaagcgatatcggcggtttcaaagtcgcacaattcttggatcacaccaaaaccgatcgccaaagtgatattttagttttcgttcttgaaaatggtagtcgtttgatcgtacgcccatctggtacagaaccaaaaatcaagttctacctcgatgcgaaagggaaagatccaaaagatgctgagcaagtgttagcccaatttgatgaaagtgttcgtcacattttacgtcaagatgaatttggtaagcaggattgctaa

SEQ ID NO: 30993 - DNA, 3894 bp, Pasteurella multocida
atgttacaaatttttcgtggttctcccgcactttctgaatttcgtttaaatcaacttgctgtgcgttttcaaaaagccaatcttcccgtgagcgcgtgttatgcggaatatatccattttgctgacttatctgaccgtttaactgaagaagaaacagcaaaattagaccaactattacactatggtcccactcttgcggggcatgatcctgttggtcactgctttatcgtgattccgcgtattggcactatttcatcttggtcatctaaagcaaccgatattgcgcacaactgtggcttaaacaaagtgaatcgtttagagcgtggattagcattttattttgaatttgaccgcacgttatcgtctgaagagcaacaacgcttggtttcacacattcatgaccgaatgttagaaggcatcattcatacccctgaagaagccaaagtgctgttcgaccaacaagcaccaaaaccatttactacggttgatattttgagcggtgggcgtcaagcgttagaaaatgcaaacgtggaattaggtctggcgctcgcagaagatgaaattgattatttagtcgaaaatttcaccgcactaggtcgcaacccaaatgacatcgaactgtatatgttcgcacaggcaaactctgaacactgccgtcataaaatttttaatgcggattggatcattgatggcgaaaaacaagaaaaatccttgtttaaaatgattaaaaatacctttgagaaaaccccagatcacgtactttcagcctataaagataacgcggcggtgatggaaggctcaaaagtgggacgattcttcccggatcaagatgggcaatatcgctatcacaatgaagatgcgcatatcttaatgaaagtggaaactcacaaccacccaactgcgatttcgcccttcccaggcgcggcaaccggttctggtggtgagatccgtgatgagggcgcaaccggtcgtggtgcgaaaccaaaagccggtttagtgggcttctcggtgtctaacttagtgattccaggttttgaacaaccttgggaaaatccagtgtcgaaaccaaatcgtattgcttcagcactcgatattatgattgaaggacctttaggcggtgccgcatttaacaatgaatttggtcgcccagcgttattaggttatttccgtacttatgaagaaaaagtcaatagctttgcgggtgaagaagtacgtggttaccataaaccgatcatgttagcgggtgggattggcaatatccgtgcagaacatgtacaaaaaggcgaaattcctgtcggggcaaaactgattgtattaggtggacctgccatgaacatcggtttaggcggtggagcagcttcttctatggcttctggtaaatcaaaagaagatttagattttgcctcggtacaacgggataacccagaaatggaacgtcgttgccaagaagtgatcgaccgttgctggcagttaggtgaggacaacccaattctctttattcacgatgtgggggcaggtggtttatccaatgcgatgccagaactcgtacatgatggcggtcgtggcgggaaatttgaactacgcaagatcttaagtgatgagcgtgggatgagcccattagaaatttggtgtaacgaatcgcaagaacgttatgtgttagcagttgcgccagaaaaactcgaattatttaccgcactttgtgaacgtgaacgtgcgccctttgcggtgattggtgaagccaccgagcaagagcatttaaccttacacgatgatcatttcgacaataacccaatcgatttaccgatgaatgtgttgttgggtaaaacgccaaaaatgacccgtgatgtgaaatcaaaaacggtagaaggtagcgctttagatcactctcaaattgacttaaaagaagcgtttcaccgtgtgttacgcttacctgtggtggcagaaaaaaccttcttaattactattggtgaccgttctgtgaccggtatggtggcacgtgatcaaatggtcggtccatggcaaattcctgtggcagactgtgcggttaccacagctagtttagacagctatcacggtgaagctatgtcaatgggtgaacgtgcgcctgtggcattattagattttgctgcatcggcacgtttagcggtagcagaatcgattaccaatattgcagcaactaacattggtgatattaaacgtattaaattatcagcgaactggatgtcagcagcaggtcacgaaggcgaagatgcaggcttatatcaagcggtgaaagccgtcggtgaagagctttgtccacaacttggcttaactattcctgtgggcaaggactccatgtcaatgaaaaccacgtggcacgaaaacggtgaacaaaaaaccgtgacggcgccattatctttagtgattagtgcttttgcacgtgtggaagatgtacgcaaaacagtcacgccacaattacgcaccgacaaaggacacagtcgcttattattaattgacttaggcgaaggcaaaaatcgcttaggtgcgaccgcacttgcgcaagtgtataaacaacttggtgataaacctgcggatgtggtgaacgttgaaagcttgaaaaacttcttcaatgccatgcaagcgttggtggcagagcaaaaactcttggcgtaccacgaccgttcagacggcggtttaattgccacccttgccgaaatggcgtttgcgggtaactgtggtttatcgatccatatcagtgcattaggcgataacgatcttgccgtgttattcaatgaagaattaggcgcggtgattcaagtgcgtgagagcgatttaagctatgtgcgtgatgttttatcacaacatggtttaatccatttaaccaaagagttaggggaagtgaccacagaagatcgtatcgaaatttctcgtggtaccaaattattattcagccaaaaacgttctgaattgcgtggtatttgggcggaattaacccaccaaatgcaacgtttacgtgacaatccagaatgtgccgaccaagagtttgcagcgaaaaaagatccagaaaacaaaggtttctccgcccatttaacctacgacattaacgaagatatcgccgcgccttacattgccacaggcaagaaaccgcgcattgcaatcttacgtgaacaaggggttaacagccattatgaaatggcggcggcatttgaccgtgcagggtttgaggcgattgacgtgcatatgagcgatttacacaacgcacgctaccgcttaaaagacttcaatgccttagtagcctgtggtggtttctcttatggagacgtgcttggcgcgggtggcggttgggcgaaatccatcctatttaacccaatgttgcgtgatcaatttagcgaattctttgccaacccaaataccctcactttaggggtgtgtaatggctgccaaatggtttccaaccttgctgaaattatcccgggtacagatgcttggccacgtttcgtgcgtaataaatccgaacgtttcgaagcgcgtgctgcattagtgcgtattaatgagacaaattcactctggttccaaggcatggcgggttcacatatgccaattgcggtatcgcatggtgaaggacgtgtcgagtttaaacacgatcaacagttacagatgttaaaagatcaaaacttaatcgtggcacaatacatcgacaacaacctcaacccaacggaaatctacccagctaacccgaacggctccgtagaaggcatcaccgcactctccaaccaagacggacgtgtcgctatcatgatgccacacccagagcgtgtattccgcacggtttctaactcatggcatccagaagattggagtgaagatggggcatggatgagattgtttagaaatgctagggtggtgttggagtaa

SEQ ID NO: 30994 - DNA, 1005 bp, Pasteurella multocida
atgacagtgcggataggttcttatcagcttaaaaatcgcatttttcttgctcctatggctggcatcactgaccaaccatttcggcgaatctgcactcattatggggcaggtttaactttttctgaaatgatgtcaacgaatccgcaagtctggcataccgaaaaatcgaaactgcgcttggctcatcatcaagaagcaggaattaatgctgtgcaaatagctggttgtgatcccgatgagatggcgaaagctgctcaaatcaatgtagaatatggggcagaaattattgatatcaatatgggctgcccagccaaaaaagtgaatcgtaaaatggcgggctctgcgctgttacaatatcctgatttggtcaaacaaattcttaataaagttgtgaaatctgttactgtaccagtgacattaaagataagaacaggctgggataaagacaaccgaaattgtttagaaatcgctaaaattgcagagcaatgtggtattcaagcactgaccatccacggacgaacaaggagttgtatgtttgagggggaggctgaatatgacaatatcaaggcggtcaaagagcaactttctattccgattattgccaatggcgatattacttccgctgaaaaagcaaagtatgttcttgattataccaacgcagatgcaataatgatcggacgtggttcattaggcaatccgtggcttttccgagttatggaaagcttaattgaaaaagactcgattgttttagagccaagtttaaacgagaaatgtaatgtgattttacagcatatccaagaactgcatcaattttatggtgtggagaaaggatgtcgtattgcacgtaaacacgttgcttggtatttacagggaatccaacctaatcccgtttttagacaggcttttaatgcaattactgatcccaaagaacaattaattgctttagaaggtttttttaatttgattctgatggataaagaaaaaaatgttagaacaacaacgtaa

SEQ ID NO: 30995 - DNA, 1434 bp, Pasteurella multocida
atgaactatagcattcttattcctttattcctgtatttatgctttgtgtttgcagtggcttattatgcctatgctaaacgacaaaaggggagctttttaagtgaatattatgttggaaatcgctctatgtctggttttgtattggcgatgacgacggctgcaacttatgtaggggcgagttcatttattggtggaccgggtgccgcgtataaatttggtttaggctgggttttattggcgatgattcaagtccccgtggtgctttttacccttggtgtattggggaaaaaatttgccatgtgggcaagagaacataaaagtttaaccattaatgacattttattttctcgctataaaagcccaaccattgtgttgttagccagtttatccttgttattttccttctttattatgatggcagtacaattcattggtgttggacgtttattagaaaccacattgaatattgactaccgtctttctgtactaatctttgccacaactgtgggaatctatactttcattggtggctttagagcggtagtattaacggacacgattcaaggtctcatcatgatgatcggtacgttcctactgttatttggtgtgatttatgctggtggcggagtcagtcaaatcatagatacattagaaacgattgatccacgtttgattacgccttatggcattgaagcaagaccgcttgattttacttttatggcgtctttctgggtgttggtctgttttggattgttagggcttccacatacggttatccgcgcgatgtcatataaaaacagtaaagcattacatagtggaattgtgattggtactgtggtgattgccttattaatgttagggatgcatttagctggcgcactaggacgagcggtggtgccagaattatcagttacggataaaattattccaactttgatgattcaagtgcttccgcctgtggttgctgggattttcttagcggcgccgatggcagccattatgtcatctattgactcgatgcttattcaagcgtcttcgacgttaattaaagatttatatctacgttttaaacctgagcaaattcgtaatgagcgacgggtcaaaattttatcgacagttgctacattattcatgacgattttagtcactgtcgcgacattaaatccaccggatatgctgatttggttaaacttatttgccttagggggattagaaacaacgttcttatgggtgatgttgctaggcttatattggcagaaagcaaatgcatatggtgcggtatgttccatgatagttggtttgggctcttatgtgaccttaactgcggcttcaattaaattattggatttccatgcgattgtgcctgctttattatttggtttgatcgctttcctaattggtaaccaatacggtgagcgtaagattcagcactaa

SEQ ID NO: 30996 - DNA, 1347 bp, Pasteurella multocida
atgttagagaaagtggttattgccaatcgtggtgaaattgcgctacgtattttgcgtgcttgcaaagaattaggcataaaaactgttgcggtgcattccacagcagaccgtgaattgaaacatgttttacttgcagatgaaactgtttgtattggtcctgcgccttcaacgaaaagttatcttaatattccggctatcattgcagcggctgaagtaacaggtgcggatgccattcaccctggttatggttttttatctgaaaatgcagattttgcggagcaagttgaacgttctggatttatttttattggtcccactgcagacgtgatccgtttaatgggtgacaaagtttctgcgattgaagcaatgaagaaatcaggtgtaccttgtgtaccgggctctgatggtcctgtgggtagcgatatggtaaaaaataaagaaatcgccaaacgtattggttaccctgtgattattaaagcttcaggcggcggtggtggtcgtggtatgcgtgtagtgcgtgatgaggcctctttagaagaatctatcgcgatgaccaaagcagaagcaaaagcggcttttaataacgatatggtgtatatggaaaaatacctagaaaatccacgtcatattgaaattcaagtcttagccgatacccatggtaatgccatttatttagcggagcgtgattgctcaatgcaacgtcgccatcaaaaagtagtagaagaagccccagcaccgggtatttccgatgaagttcgtcgtgatattggtgaacgttgtgccaaagcatgcgtagaaattggttatcgtggggcaggtacgtttgagttcttgtatgaaaatggggagttctatttcattgagatgaatacccgtattcaagtagaacatccagtcacagaaatgatcacgggtgtggacttggtgaaagaacaattgcgtatcgcagccggattgccgatctccattaagcaagaagatgtgaaagtgcgtggtcatgcgatcgaatgccgtattaatgcagaagatcctaaatccttcttgccttcaccgggtaaggtggatcatttacactctccgggtggattaggtgtgcgttgggattcacatgtttatgcgggttataccgtcccaccacattatgattcaatgattgcaaaattgattacttatggtgatactcgtgaagtcgcgattcgtcgtatgcaaaatgcactgggtgaaacgattttaaccggtattaaaaccaatattcctctgcacgaattgattctggcagatgaaaattttcaacagggtggcacgaatatccattacctagagaaaaaacttggcatgcgtgactaa

SEQ ID NO: 30997 - DNA, 462 bp, Pasteurella multocida
atggacattcgtaaaattaaaaagctgatcgaattagtagaagaatcgggcattatggaattggaaatttctgaaggggaagaatccgttcgtattaatcgtggttcagctgcaccaagtgcggtgcaatatagcctacctgtacaagctgctccagcaccggttgcagcccctactgcaccagccgtatcggcgccagctgcgccagtcaatgcagaagaagtgtctggtcactttattcgttcaccaatggtagggaccttttatcgtagtccaagtccagaagccaaaccatttgttgaaattgggcaggcagtaaaagtgggtgatgcactttgtatcgttgaagcgatgaaaatgatgaaccgtattgaagcagataaagccggcgtggtgaaggcaatcttagtcaatgacggtgaagccgttgagtttgatcaaaaacttatcatcattgaataa

SEQ ID NO: 30998 - DNA, 903 bp, Pasteurella multocida
atgacaaaatttaatgtaaaaaccttccaaggcatgatccttgccttacaagattactgggcaaaccaaggttgtgtcatcgttcaaccctttgatatggaagtaggtgccggcacatcgcacccaatgacttgcttaaaagctttaggtcctgagccaatggcagcagcctatgttcagccatcacgtcgtccaactgacggtcgctacggcgaaaacccaaaccgtttacagcactactaccaattccaagtggtaatcaaaccgtcaccagataatattcaagaattgtatttagacagcttaaaaatgctcggttttgatccaacccaaaacgatattcgtttcgtggaagataactgggaaaacccaacgttaggtgcatggggcttgggttgggaagtgtggttaaacggcatggaagtgacccaatttacttatttccaacaagtgggcggtttagaatgtaaaccggtgactggagaaattacttacggtttagagcgtctagccatgtacattcaaggtgtggacagcgtgtacgacctcgtttggtctgatggtccattaggcaaaactacctacggcgatgtattccaccaaaacgaagtggaacaatcgacctataactttgaatacgctaatactgacttcttattctactgtttcgatcaatacgaaaaagaagccagcgaattgttagccttagaaaaaccgttgccattaccggcttacgaacgcattttaaaagcagcacatagctttaacttgcttgatgcacgcaaagcgatttccgtgacggaacgccaacgttatatcttacgcattcgtgcgttaaccaaaggcgtggcggaagcctactatgcaagccgtgaagccttagggttcccaggctgtaaataa

SEQ ID NO: 30999 - DNA, 624 bp, Pasteurella multocida
atgaaactctggcattccaacaccagtccttatgtacgcaaagtgatggcggtgattaaacatcatcagcttgaggatcaaattgaattacacacgattcaatcttcttttgatcctaattcaccgcacaatcaagacaatccgcttggacgagtgcctgcgttacaactggataacggtgaatggctgtataacagtcatgtaatttgtgaataccttgatcatcttggtgcacaaactcagtcagagagtcatttattgcctcgtaacagccaacgctggaaggtattgcaactgcacgcgctaactgacggtattatggaaaacaccttgccgattatttccgagcgtttactccgccctgaaaacgaatggtggactgcacgtcatcaacaattaagcgaacgcaatatccgcagtttcaaagagttagaacgttatttagtacaattcggcgatgaactgaatttaggcaccatttctgcagtgtgtttaattgattggtatgcgttgcgtggcgaaaaacttggcgttaatttgaaagaaatcgcaccgcacttagtgcaatgggcaatggagatgaatgacaaatatcctgagctaaaagaaacacagcctaagtga

SEQ ID NO: 31000 - DNA, 2070 bp, Pasteurella multocida
atgacaacacaaaacttcctcgccgagatcggcactgaagagctgccaccgaaggcactcaaaaaattagcgactgcgtttgcagagaatatggaattggagctaaaccaagcgggtttggcgtttgaaagcgtgcaatggtttgccgcaccacgtcgtttggcggtgaaagtgttggcgttagccaccagccagccaagcaaagagattgaaaaacgtgggccggcagtgtctgcggcatttgatgcggaaggtaaaccaactaaagcggctgaaggttgggcacgtggttgtgggatcagcgttgagcaagctgagcgtgttgccactgacaaaggtgagtggttagtgcatcgtgccacaatcgaaggtcaaccgaccaaaaacttattgaaagacatggtggcgaatgcgttggcgaagttgcctattccaaaaccgatgcgttgggcggacaaaactgtgcaatttattcgtcctgttcacacggtgacgatgttactaggcgatgagctgattgaaggcgaaattttaggcgtggaaagcgctcgtacccttcgtggtcaccgtttccttggtgagcgtgagttccaaatttcacacgcggatcaatacccggcgctattaaaagaaaaaggctcagtagtagctgacttcaatgatcgtaaagcgttaattttggcgaaatcgcaagaaaaagcgaccgcacttggtggcgtagcagatattgaagacgatttacttgatgaagtcacctcattggtggaatatccaaatgtattagcggcgaaatttgaagaacgtttccttgctgtcccagcggaagccttggtttataccatgaaaggtgaccaaaaatatttcccaatttatgacaaagacggcaaattattaccgcactttatttttgtgtcgaacattaaccctgacgatccaagcaagatcattgaagggaatgaaaaagtggtgcgtccacgtttaaccgatgcggaatttttctttaaaaccgacttaaaacaacgtttagaagatcaattaccacgtttagaaaccgtgttattccaacaacagcttggtacattacgtgataaaacggcacgtattgaacaactggctggcgaaattgcaaaacaaatcggtgctgatgaagtcaaagccaaacgcgctggtttattgtcaaaatgtgacttaatgaccaacatggtgtttgaatttactgacacgcaaggtgtcatggggatgcattatgctcgtcacgatggtgaagatgaagaagtagcagtagcattaaatgaacaatatatgccacgttttgctggcgatgagttaccaaaatccttagtcgccagtgcggtagcattagccgataaattcgatacgctcaccggaatcttcgggatcggtcaacaacccaaaggcagtgcagacccgtttgccttacgtcgtgccgcattaggtgcattacgcattattgtggagaaaaatttaccgctagatttagccgaaattgtgaaaaaatcgagcgccctttttggcgataaattaacaaatgcgaatgtcgtggaagatgtagttgagtttatgctcggtcgtttccgtgcttggtatcaagatgaagggattgccgtggatgtgattcaagcggtgcttgctcgtcgtccaaccaaaccatcggactttgatgcccgtgtacgtgcggtgtcacacttccgtgcgttagaggcggcagaggctttagcggcagccaataagcgtgtaagcaatattttagcgaaagttgaaggggaattaccagccaatattgataccacattatgtgcagaagcagcagaaaaagtgttagctgaacaggtgattgcgttacaagctgagcttgcgccactatttgctaaaggcgaataccaagtggcactggatcgtttagcggcattgcgtgagcccgtggatactttcttcgataatgtcatggtgaacgcggaaaatccacaattacgccaaaaccgtttagcaatcttaaataacctacgtaatctattcttacaagtggcagatatttccctcttacaataa

SEQ ID NO: 31001 - DNA, 1572 bp, Pasteurella multocida
atgactacaacacaacaacaaaagaaaggcagtaaatttcttcatacggtggaatggctcggtaacatgttacctcaccccgttaccctttttatgatttttattgttttattattaattacttctgcattaggggaatattttggtctagccgttgcagaccctcgtccggaaggcgttaaaggacgtgcggctgacgggatgatttacgtcgtcagtttgctaaatgccgaaggcttaagcagaattttgactaatttggtgaaaaactttaccaactttgccccattaggcacagtattggtggcattattaggggtcggtattgctgaaaaagcagggcttctttctgccgttatgcgtttattggtcaccaaatcaccacgtaaattgacaacgttcactattgtttttgcggggattctatcgaacacagcctctgaattaggttatgttgtcctcattcctttagctgccattatttttcactcattaggtcgccatccattagcgggtcttgctgctgcatttgcgggggtatctggtggttactccgccaacctcttattaggtacgattgatccattactcgcagggatcacgcaacaagctgcacaaattatcgatccaacttatacggtaggtcctgaagccaactggttcttcatggctgccagtacctttgtgattgcgtttattggttatttcattacagaaaaaatcgttgaaccacaattaggtccttataacagtcatctttcacaagaggaattggatttacagcactcgaatgaagtctcaccattagagcgtaaaggattaagatacgcgggtttagtcttcttaattttatgtgcactattagcttggactgtggtccctgaaaatggcattttacgtgatccaaaaacaggtttagtcacaggttcaccattcttaaaatcgatcgttgcctttatcttcattctctttgctattccgggtacggtttatgggattgtgacaaaaagtattcgtagcgaaaaagatgtggtcaatgcgatggctgaagccatgagtacattaggactataccttgtgattatcttcttcgcgtcacaattcgttgccttctttaactggactaatattggtcaatatatcgcggtaaaaggcgctaacttcttaaatgaagtaggcttacatggcggtatcctctttatgggcttcatcttgatctgtgccttcattaacttaatgattggttctgcctctgcacaatgggctgttactgcaccgatctttgtgccaatgctgatgttaaccggttattcacctgaaatcattcaagcggcttaccgtatcggtgactccgtaaccaatatcatcaccccaatgatgagctactttggcttgatcatggcaaccgtattgaaatataagaaagatgcgggggtcggtacgcttgtgtcaatgatgttaccgtactctgttgccttcttggtggcatggtctgcgatgttctttatttgggtcttcgtgttaggcttaccggtcggtcctaactcgccaatgttctacccagcgcaataa

SEQ ID NO: 31002 - DNA, 1644 bp, Pasteurella multocida
atggcagcaaaagacgtaaaatttggtaatgatgcacgtgtcaaaatgttagcgggtgtcaatattcttgcggatgcagtaaaagttaccttaggtcctaaaggtcgtaatgtcgtattagataaatctttcggtgcaccgactatcactaaagatggtgtatcagtggcgcgtgaaatcgaattagaagataaattcgaaaatatgggtgcacaaatggtaaaagaagtggcgtcaaaagcgaatgatgcggcaggtgacggtaccacgacagcaaccgttttagcacaagctatcgtcaatgaaggcttaaaagcggtggcagcgggtatgaacccaatggatttaaaacgtggtatcgacaaagcggtaaccgcagtggttacagaattaaaagccctttcaaaaccttgtgaaacctcaaaagaaatcgaacaagtgggaacaatctctgctaactcagacagtattgttggtcaaatcattgcacaagcgatggataaagtaggtaaagaaggcgtgatcaccgttgaagatggcacaggtttagaagacgaacttgccgttgtagaagggatgcaattcgatcgcggttatttatcaccttacttcatcaacaaaccagaaacagcaacagttgaattagacaatccatttattttattagtggacaaaaaagtgtccaacattcgtgaattgttaccggtgttagaaggtgtagcaaaagcgggcaaaccattattaattatcgcagaagatgtcgaaggtgaagcacttgcaaccttagtcgtgaacacaatgcgtggaattgtgaaagtcgcagcagtgaaagcacctggctttggtgaccgtcgtaaagccatgttacaagatatcgcgatcttaacggctggtacggttatttctgaagaaatcggtatggaattagaaaaagccacacttgaagatcttggtcaagcaaaacgtgtagtcatcaacaaagacaataccacgattattgatggtatcggtgacgaagcacaaatccaaggtcgtgtggcacaaattcgtcaacaaatcgaagaatccacctctgattacgacaaagaaaaattacaagagcgcgtagctaaactcgctggcggtgtcgcagttattaaagtgggtgcagcaaccgaagtagaaatgaaagagaaaaaagcgcgcgtagaagacgcactccacgcaacacgtgcggcggttgaagaaggtatcgttgctggtggtggtgttgccttaatccgtgccgctagcaaagtcgctggtcttcaaggtgataatgaagaacaaaatgtgggaatcaaacttgccttacgtgcaatggaagccccattacgtcagatcgtagccaacgcaggtgaagaagcgtctatcgtagcaagtgcagtgaaaaatggcgaaggtaacttcggttataacgcaggtacagaacagtacggcgatatgatcgaaatgggtatcttagacccaacaaaagttacccgttctgcattacaatttgcggcttctgttgctggcttaatgatcaccactgaatgtatggtcactgacctaccaaaagaggataaagccgacttaggtgctgctggtatgggtggcatgggtggtatgggcggtatgatgtaa

SEQ ID NO: 31003 - DNA, 1833 bp, Pasteurella multocida
atgactgaaacaacaatgactttcaatgatttaggcttgcctgaatttcttcttaacgccgtctctgacttaggctttgaaaccccttctccaattcaacaaagttgtatcccaaacctgttaaatgggcatgatgtgctaggtatggcacaaactggaagtggtaaaaccgccgccttttcactccctttattagcacaaattgatttagataaaaaatatccacaaatgttagtgatggcaccgacacgtgagttagccatccaagtagcagatgcctgtgagcacttttgcaaatatgcgaaaaataccaatattgttaccctttatggtggtcaacgctatgacattcaattgcgtgctttacgccaaggtgctcaggttgtagtggggacacctggtcgtattttagatcacattcgtcgtggcactttagatttgtctaatttacgttttatggtgttagatgaagcggacgaaatgttacgtatgggctttattgatgatgttgaaacggtgatggcagaattaccagaacaacatcagactgcacttttctcagccaccatgccagatccaattcgtcgtattactaagcgttttatgaaagatccgaaagagattaaaattaaatcgacgcaaacgacgaatccagatattacacagagttgttggtatgtgcatggtttccgtaaaaatgatgccttattacgtttcttagaagtagaaaaatttgatgccgcgattatctttactcgtactaaaacggggacattagatgtaacggaattgttggaaaaacatggtttccgtgccgcagcattaaatggcgatatgacacaacaattacgtgaacaaacgcttgatcgtttaagaaatggtagtttagatatccttgtggcaaccgatgtggcggcgcgtggtttagatgtggagcgcattagcctcgtagtgaactatgatattccattagatgctgagtcttatgttcaccgtattggtcgtacagggcgtgcaggacgtacagggcgtgcattgttatttgttgaaccaagagaacgtcgtttattacgtaatattgaacaattaactaaaaaaccgattacggaagtcgaagtgccaaatcatgaggtactacaagcttgtcgccgtgagaaatttaaagccaaaattacagtccaattagagcatcatgatttaggactttatcgtagcttactagaagatatgttcaccgcggatcaagatcaggaagatattgcggcggcgatgttgatgttgttgcaaggtaaacaaaagcttattttaccagccgatccaattattgatcgtaaaacttcacgtggtgatcgtggcgagcgtcgtgaacgtggtggacgtgaaaatccacgttcagcagagcgtcgtggttacggtacaccgcaggcgatggatttatatcgtattgaagtaggacgtttagatggcgcggaagtccgtcatattgttggggcgattgccaatgaaggtgatatcaatagtcgttatattggtcatattaaattatatgatgattacaccacgattgaattaccacaaggtatgccgaaagaattattaggtgtatttgcgaaaacacgcgtgatgaacaaacaaatgcagatgtcatttgtgggagcgtctaatgcaggttcaagccgtgatcgcgatgatttcgctgaccgccgtggtggaaaacgtaaaggacgcggcgatgaaccacgttttgggcgtgaagatcgtaaatttaaagaaaaaagtcagcgcacttttaatgatcgcccacgcagagaaagacgtgaacgccaaaagtaa

SEQ ID NO: 31004 - DNA, 2145 bp, Pasteurella multocida
gtgaatccaattgttaaacaatttaaatatggtcaacatactgttacgttagaaacgggtgcaattgcacgccaagcaacggcagcagtgatggcaagtatggatgatactactgtgtttgtcacagtggttgctaaaaaagatgtgaaagaaggtcaagacttcttcccattaaccgttaactatcaagagcgtacttatgctgcgggtcgtattcctggtggctttttcaaacgtgaaggtcgtccttctgaaggcgaaaccttaattgcacgcttaattgaccgtccaattcgtcctcttttcccagaaggtttttataacgaaatccaaatcgtggcgacagtggtgtctgttaatccgcaaatttgcccagatttagtggcaatgatcggtgcatctgcggcactttctttatcaggtgtgccatttaatggccctatcggtgcagcacgtgttggttttattgatgatcaatttgtgttaaacccaaccatgaacgagcaaaaacaaagccgtttagacttggttgtcgcgggaacagataaagcagtgttaatggtggaatctgaagccgatgtattaaccgaagaacaaatgttagctgcggtggtgtttggtcatcagcaacaacaagtggtgattgacgcgatcaaagaatttaccgcagaagccggtaaaccgcgttgggattgggtggcacctgaaccaaataccgcgttaattgaaaaagtgaaagcgattgcagaagcgcgtctaggcgaagcataccgtatcactgaaaaacaagcacgttatgaacaaattgatgcgattaaagctgatgtgattgcacaaatcacagctgaagtggcagaaggcgaagacatcagtgaagggaaaattgtcgatattttcaccgcacttgaaagccaaatcgtacgtagccgtattattgctggtgaaccacgtattgatggtcgtacagtagatactgttcgtgcattagatatttgtactggtgttttaccacgtacacacggttctgcgattttcacccgtggtgaaacacaggcgttagctgttgcgacattaggtacagaacgtgatgcacaaattattgatgaattaacaggtgagcgttcagatcatttcttattccactacaacttcccgccatattctgtgggtgaaaccggtatgattggttcaccaaaacgtcgtgaaattggtcatggtcgtttagcgaaacgcggtgtggctgcagtgatgccaacacttgccgagttcccgtatgtggtacgtgttgtctctgaaatcacagaatcaaatggttcttcttctatggcatcggtttgtggtgcgtctttagcattaatggatgcgggtgtaccaattaaagcggcggttgcaggtattgcaatgggcttagtcaaagaagacgaaaaatttgtggtgctttcagacatcttaggtgatgaagatcacttaggtgacatggattttaaagtggcgggtacacgtactggtgtaacggcattacaaatggatatcaaaatcgaaggtatcacagcagaaatcatgcaaattgcgttaaaccaagcgaaaagtgcacgtttacacattttaggtgtgatggagcaagcgattcctgcgccacgtgcggatatttctgattttgcaccgcgtatttacaccatgaaaattgatccgaagaaaatcaaagatgtgatcggtaaaggtggtgcaaccattcgtgccttaacagaagaaacaggtacctcaattgatatcgatgatgatggtacagtgaagattgcggcggttgatggcaattcagcaaaagaggtgatggcgcgtattgaagatattactgcagaagttgaagcgggtgcagtgtataaaggcaaagttactcgtttagctgattttggtgccttcgtttctatcgtaggtaacaaagaaggcttagtgcatatttctcaaatcgcggaagagcgtgttgagaaagtgagtgattatcttgcggtgggacaagaagtgactgttaaagtggttgagattgatcgtcaaggtcgtattcgtttaaccatgaaagaagttgcaccaaagcaagaacacgttgattctgttgtcgcagacgttgccgcagaagaaaacgcataa

SEQ ID NO: 31005 - DNA, 1443 bp, Pasteurella multocida
atgaaagcagaagcattatttgatttagatcctggtgtgaaagtgcgcactcgttttgcgccaagtccaacaggctatttacatgtagggggcgctagaacggcactttattcttggctctatgcaaaacatcaccaaggcgaatttgttttacgtattgaagataccgacttagagcgctcaacaccagaagcgactgctgccattttagaaggaatggcgtggttaaatttagcttgggaacatggtccatattttcaaaccaagcgttttgatcgttataaccaagtgattgatcaaatgatcgaacaagggttagcctaccgttgttattgttcaaaagaacgtttagaagatttacgcaacacgcaagaacagaataaacaaaaaccccgctatgatcgtcattgtttaggtgatcataagcactcgccagaacaaccgcatgtggtgcgtttcaaaaatccaacggaaggctccgtggtgtttgaagatgcagtgcgtggacgtattgagatcagtaacgcagagttagatgatttgattattcgccgtaccgatggctcaccgacttataatttctgtgtggtggtggatgactgggatatgggcatcacgcatgtggtgcgcggtgaagaccatatcaacaatacgccgcgtcaaattaatattttaaaagctttaggcgcacccattccaacttacgcccatgtgtcgatgattttaggtgatgatggacaaaaattatccaaacgtcatggcgcggtgagcgtgatgcaatatcgtgatgatggttacttgcctgaagcgttattaaattatttggtgcgtttaggttggggacatggcgatcaagagattttctccgtagaagaaatgatcaagttatttgagcttgaaagtgtgagtaaatcagccagtgcgtttaatacggaaaaattattgtggttaaatcatcactatatacgtgaattgccagcagaatatgtggctaaacatttagcatggcactatcaggatcaaggcattgatacctccaatggacctgcattagaagacatcgtaaaaatgttggctgaacgttgtaagacactcaaagaaatggctgccgcaagccgttatttcttcgaagatttcgacagctttgatgaagccgcagtgaaaaaacatttcaaagtcgccgcgattgagccacttgagaaagttaaagaaaaattgaccgcacttgatagctgggatttacacagcacgcatcaagccattgaacagactgccgctgaattagaattggggatgggcaaggttgggatgccattgcgtgttgcggtaactggttctggtcaatcaccttctatggatgtaactctagtgggcattggcaaggcacgtacgcttgtgcgtattcaaaaagcgattgattttattaaaagtcaaaatgtctaa

SEQ ID NO: 31006 - DNA, 1374 bp, Pasteurella multocida
atggcactttggggtggacgttttacacaagccgcagataagcgttttaaagattttaatgactcattacgtttcgattatcgtctcgcagaacaagatattgaaggttccattggctggtcaaaagctttagtcagcgttggagtattgaccgtgcaggagcaacaacagttagaaagtgcactgaatactctcttaattgaagtgcgatcaaatccacaagcgattttgcaagatgacgctgaagatattcacagctgggtcgaaagtaaattaatcgataaagtcgggaatttaggtaaaaaattacacacgggacgtagccgtaatgatcaggttgcactggacattaagatgtggtgtaaacaacgtgtgattgaactgcaatcctcgcttcacgccttacaatgcaaacttgtcgaaacagccgaaaataaccaacatgcggtgatgccgggttatacacacttacaacgagctcagccgattacttttgcccattggtgcatggcttatgtggaaatgcttgatcgtgattactcccgtttaaccgatgcttaccaacgcatgaatagctgcccactcggcagtggtgccctcgctggcaccgcttacgcgattgatcgtgaacaattagccctcgatctcggttttgacgttgctacacgcaacagtttagacagtgtgtcagaccgcgatcatatcgttgaactgctttctactgcctcactaagcatggcacatctttcacgttttgcggaagatatgatcatttttaacagtggtgaatctaacttcgtggagctttccgatcgcgtgacatctggttcttccttgatgccacagaaaaaaaaccccgatgcttgtgaattaattcgtggtaaagcaggtcgtgtaatgggtgctttaacaggcatgctgatgaccttaaaaggcttgccgcttgcttataacaaagatatgcaggaagacaaagaaggcattttcgacgctctagatacttggcaagactgtatcgacatggcggctcttgtgttagacggcattcaagtcaatgtagaacgtaccaaagaagctgctttaaaaggttattccaatgccactgaactggccgactatttggtcgccaaaggcgtaccattccgtgactctcaccatattgtgggcgaaaccgttgtttatgccatccaacagcacaaagcgcttgaagcactcagcgttgctgaatttaaacaatttagtgatgttgtcgaagaagatgtgtatcagatcctatctctgcaatcttgtttagataaacgctgtgccaaaggtggcgtatcaccacttcgtgttgcagaagccatcgctgaagcgaaagcaaggttgagttaa

SEQ ID NO: 31007 - DNA, 3099 bp, Pasteurella multocida
atgcgatttaccgatatttttattcgacgccctgttttagcggtttctattagcttgctgattattattttaggattacaagcgattgcgaagttagctgtgcgcgaatatcccaaaatgactacaacggtgattaatgtttctacggtatacccgggggcagatgcaagtcttatccaagcgtttattacttcaaaactagaagaagctgttgcacaagccgataacattgattacttatcttcaaaaagtagcccaaataactcgttaattacaattaaaatgaagctaaataccgaaccgaacggggctttagcagacgtgttagcgaaagtgaactctgtacgttcgcaattaccacgggggattgatgatccggtcattacgtcttcgacggggggaacggggatgatgtacatccagtttagctccactaaactggatgctagtcaggtaacagactacattgaacgtgtgattaaacctcaattctttacggttgaaggggtggcggaagtacaaatctttggtgcatcggattatgcgctacggatttggttagatcctgccaaaatggccgcacagaatttatccgcgatggcggtcagaaatgcgttatcttcgaataatgtgcaaacggcggcggggaatgacaatggtttttatgtcacctataaaaataaagtggagacaaccaccaaatcagtggaagagctggggaatctgattatttcctcacaaggcgataagttagtgcgtttacgtgatatcgctgacgtagaattaaataaatcgagtgatagctcaagagcggttgctaatggttttgaatctgtggtgttagcgatcaatccaacttcttcagccaacccacttgttgtggcagaaaatgtgcgtccattgtatgagcaaattaagcaaaatttgccagatagcatgcaggcagaaattctttatgacaccacgatagcaattaatagctcaattgatgaagtaatcaaaaccattttagaggcgacaatcattgttttagtggtgatcacattatttattggttcattgcgtgcaattctcattccggtgattacgattccgatttctttgatcggcgtaatcatgctgttacaggcgtttgatttctccattaatttaatgactttacttgccttaattttggcgatcggactcgttgtggatgacgccatcgtggtgcttgagaacgtggatcgtcacattaaattaggcgaaacacctttccgtgctgccattattggtacacgtgaaatcgccgtgcccgtgatttcgatgaccattgccctcatggcagtttactcgccaatggcattaatggatggcattacgggttctttgtttaaagagttcgctttaaccttggctggtgcggtatttatttctgggatcgtggcgttaaccctttcaccgatgatgagcagtaagttgcttaaaccgcatactgacccaagtaagttggaacaatgcatcgaaaaaatgctcaccaccattaatcatggctataactatgctttaaatctggtgatggcaagccgtcgttgtatgttagcttttgcggcggttatttttgctacgctgcctttcttgtttaatgggttagcgagtgagttaaccccagcagaagataaaggggcgttcatggtgattggtcgtgcaccgtccaatgtcaatgtggattatgtacaagaagcaatgcatgagtatgaacagattttgaaagacacaccggaagtggatttttccatggtgatttcaggggcaatgggaagtaaccaatcctttagtgtggtgacattaaaagattggaaagaacgtacccgtagccaagcggaaatcttagcggagttaaataaaaaatcggcgcatattccagaagtggcgttgacgggatttaacttcccagaaatcaacacgggagagcaaggtccaccaattggttttgtgatcagtactgcgagtggctatgaagatttagccaatgtagcagaaaacttcctacaagaaatgaaaaaatccggtcactttgtttataccgcgttggatttaaaatttgatacggcgcagatgcggattaaagtcgataaagaaaaagcaggtacctatggtgtcacaatgcaacaaatcagtgccacattagggagtttcttgtctgccgccacgattgaacgagttgatattgatggacgtgcttatcgaatcatcatgcaagttaaacggggtgaacgtttgtcaccagaaagtttaaacaactattatgtgacggcaagtaacgggaaatcagtaccattaagcagtttcttaaccatgacgttagaatcacagccaacttctttacctcgttttagccagcttaattcagcggtcattagtgcagttcctctcccaaccaaaagtacaggtgaggcgattgcatggttaaaaatggcagcaaaagagtatttaccgcaaggctataattatgactttactggtgaagcgcgtcagttagtccaagaaggcaatgcattagccgttactttcgtacttgctgtggtgattatcttcttggtcttagcgattcaatttgagtcaattcgtgatccgttagtcattatgatttcggtgccacttgccgtgagtggggcgctattaatgctgaatttcttaggcttcttccgtattccaggaaccagtcttaatatttactcacaggttggtttaatcacgctagtagggttaattactaagcacgggattttgatgtgtgaagtggcaaaagaagagcaattacagcatggtaaaaatcgtattgaagcgattactgaagcagcgaaagtgcgtttacgcccgattcttatgacgaccgctgcaatgattgcaggtcttatcccgctcttgtatgcttcgggcgcaggtgcggtgtcgcgctttagtattgggattgtgattgtatcaggtttagcgattgggacattatttaccctgtttgtgttacctgtgatttatagctatattgcaacggaacataaaccactaccggaatttgatgaaagcataaaaccgttaacggataatagcgcacattaa

SEQ ID NO: 31008 - DNA, 1164 bp, Pasteurella multocida
atgaaaatcattctcggcgttattgtcttactttttgctggggtcattatttttaatgtgatcaaaggcaaaatgattgaaaaatttattgcgggtgctggggaaaaaatttatcccgtaactgcaatgactattcagcctcagcaatggacacccgtgattgaaaccactggcattgtgcgtcctaatcagggtgcgatgttaagtgcacagacatcaggtacagtacagcaagtcttagttcaatctggacagcacgtgaagaaaggcgaggtgttagtggtattagacagttcagtagaactagcgaatctgaaagcatcccaagctcaacttttatctgtgaaagctacataccaacgttatttaagtttgtataaaaccaagagcgtgtcgcaacaagaacttgataatgcgaaatctgcctatgaagcattagagtcaaatatcgctgctttaaaagcgggcattgcacgtcgtcagattttggcgccttttgatggacaaacaggtattgtgaaagtcaacgtcgggcaatatgtcaatccaggaatggaaattgtgcgtgttgaagacaccagtagtatgaaaattgatttcgccctttcacaaacggaattggaacacttacatgttggacaaaaagtgacagcgactgccgatgcgcgtagtggtgaaacctttgcggcaaagattactgccattgaacctgcgatcagcgcaacaacagggttaattgatgtacaagccacctttgaaccagaagatggacgtaaactcctttctggtatgtttactcgcttacgggttgctttgccgacaaaatatgatcaagtcgttgtgccacaagtcgcgattaattacaacatgtatggggaaattgcttatattcttagcgaactttctgcagaagagcgtgaaacattagtcgcacgacaggatttcgaccgcgaaaaaattgacaatgcctatcgggttaaacaagtcactgtatttacccaagatcgtcaagggatttatgcccagttaaaaggggaagaaattaaacccggtgataaaattgtaaccggtggacaacaaaatttaagtaatggcagtttagtactcgtcgctgataaagccggggtgggaaccatgcaacctgctgtaaaaaataacctataa

SEQ ID NO: 31009 - DNA, 1014 bp, Pasteurella multocida
atgagctatttggatcaaccattagtttcagtattaatctgtgcttataatgcagataaatacatagaagagtgtattgacgcgattttaaatcaaacatataaaaatctagaaatagttgttgtgaatgatggttcaacagacactactttgtcaaagcttcattattttgctggaaaagatcctagaattaaaattattaataatgaagaaaataagggtttcattgcttcgctaaatatagggattgcttctatcaatggtgattatttagcgcgaacagatgctgatgatattacgaaacctgaatggattgaaaaaattttaggatatatgttgtctcatcctcaaattattgcaatgggatcgtatctaactattttgtcagaagatgggaatgggagtaatttagctaattattatgaacatggtgacgagtggagaaatcctttaagtcatagagagattgttgaggcaatgttattccgtaatcctattcataataactcgatgattgtaaaaagtactgtctttagagagcatggattacgctttgatcctgcttatcaacatactgaagattaccaattttggttagaagtgagccgtttgggagaattggcaaattatcctgaatctttagtttattatcgtctacacaatacacaaacttcttctttacataataaatatcaaaatctcatggcaaagaaaattagaaaaagagcgatcaattattatttgcaagatttgggtgttattcataggctaggtgaagatatatttttccatgatattgaaacgattcaggcagaactggctagcttatcacttttagataattgtattattaaaagaatactgtatgattgttatttatcattagtggataataaattaataaatattctttattttttgagagataaaaataattcatatttcaataaaaaacagaaaataaagattatcaaaagaattatccgtccttataaatatgaatctgtattgtga

SEQ ID NO: 31010 - DNA, 813 bp, Pasteurella multocida
atgccagaattacctgaagttgaaaccacaaaaaatggaattagcccttatcttgaaggggctatcattgaaaaaattgttgttcgccaaccgaaattacgctggatggtaagcgaagaattagcgcaaattacacaacaaaaagtcatcgcattaagtcgccgtgcgaagtatttaattatccaacttgaaacaggctatatgattggacatttagggatgtcagggtcattgagagttgtggagaaaggggatcttattgataaacatgatcatcttgatatcgtagtgaataacggaaaagttgtgcgttataacgatcctcgtcgttttggcgcgtggttatggacagagaagttggacgaatttcctctttttctgaaattaggtccagagcctctgtctgaggaatttgattctgattacttgtggcaaaaaagtcgtaaaaaacagaccgcacttaaaacttttttaatggataatgctgtcgtcgttggcgttgggaatatctatgcgaatgaaacgttatttctttgtaacctacatccgcaaaaaacagcaggaagtttaactaaggcacaatgtgggcagttagtagaacaaataaaacaagtgctgtctaacgcaatccaacaaggtggtacgacgctaaaagattttctccaaccggatgggcgtccaggttattttgtccaagaattgcgggtttatggtaataaggataagccttgtccaacatgtggcacaaaaatagaaagtttagtgatagggcaacgaaatagtttctattgccccaagtgtcagaagagataa

SEQ ID NO: 31011 - DNA, 1023 bp, Pasteurella multocida
atgaagtctatgttagcaaatcagcgaggttttataacatcgctgatttttatcttgtttatcatcgtattgttcactttaaatattggcactttttcgttatcaaccggaaaagtgctgtccattttatctaagccttttctttcgcaacacgcgtcttttacacccatggaataccatattgtttggcatgtacgcttaccacgcatcattatggcatttttttcaggggggattttagcgatgagtggtgcaacattacagggcgtttttcataatccccttgttgatcctcatattattggtgtcacatcgggggcggcttttggaggcagtttagcgattttattgggattcccatcttatttattgattctctccacattttcttttggtttattgacattattcttgatctatgtcaccacgatgttcatcggaaaagggaatcgtattgtattagttttagctggtgtcattttaagtggtttctttagcgctctagtgagcttaatccaatatttagcggatgcagaagaagttctgccgagcattgtattttggttattaggaagttttgccaccgctagttgggcaaaactagctatattgttaccctgcgtttttattgcagcttatttattatttcgtttacggtggcatattaatgtgttatcgctaggtgatatgcaagcaaaaatgttaggcgtttccattaagaaaacgcgttggtttgttttgctactttgtgcattgcttgtagcaacacaagtcgctgttagtgggagtattgggtggatagggcttgttattcctcatttgacacgtttttttgtaggaagtgatcaccgttatctattgcccgcctcctttttgattggtgggattttcatgattgttattgatacacttgcacgcacgctaacttctgcagaaattcctgtaggtattatcaccgctcttttaggggcacccatttttaccttgctcttattaaaaacttatcgaaagaagtcgttatga

SEQ ID NO: 31012 - DNA, 171 bp, Pasteurella multocida
atggcagctaaaggacctcgtgagaaaatcaaattagtttcaactgcagaaactggtcatttttacactacaacaaaaaacaaacgtaatatgcctgaaaaaatggaaatcaaaaaatacgatccagttgtgcgtaaacacgttgtttataaagaagctaaaatcaaataa

SEQ ID NO: 31013 - DNA, 237 bp, Pasteurella multocida
atgtctagagtctgtcaagtaacaggcaagcgtccagcagttggtaacaaccgttcgcacgcaatgaacgcgactaagcgtcgttttctaccaaaccttcacactcaccgtttctgggttgagagcgaaaaacgtttcgtaactttacgcttaacagcgaaaggtatgcgtattatcgataaaaaaggcattgatgcagttttagctgatatccgtgctcgtggcgagaaaatctaa

SEQ ID NO: 31014 - DNA, 675 bp, Pasteurella multocida
atgcagaatcaagtagaaagcctgagtttgatgccacgtgaaaaattattgcgttttggtgcaccggctttaactgatgaagaattgctagcgatttttttaagaacagggataaaaggctgctccgttatgcaactttcgcgacacgttttacagcatttccactcattaaggggattaatgtcagccacacaaactgagttttgtcagctgaaaggattaggaataacgcaatttattcaattacaagcctgtactgaaatgagtaaacgctatctacaagaagaattaaaattaacacaagcatttaagaattctgaaaatgtgcgattttatttacaagcgacattggaaaataaggaacgagaaatttttcaggtcctttttttagataatcagcatcgcttgattaaacaagaagaaatgtttttagggacgattaattgtacaacgattcacccgagagaaattataaaaagtgcacttttttgtaatgcggcggcgttaattttagctcacaatcacccttctggaaaccccgaaccaagtgcctcggataaaatggttaccacaaaaatccaagcggctgctgagttagttgaaatccgaattttggatcattttgtgatagggaaaggctgttactattcgtttgcagaaaatagactcctataa

SEQ ID NO: 31015 - DNA, 1101 bp, Pasteurella multocida
atgcagtttattgtttcaagagaaaatttattaaagccattacaacaagtgtgtggggtgctaagtagccgcccaaatattcccgtattaaataatgtattactacaaattcgtggtgagcgtttagtgattaccggcacggacttagaagttgagctctccactgaaactgcactattacgtacagatgtgcaaggtagttttactattcctgccaagaaatttttagatatttgccgcagtttacccgaagaagcggagatctcagtcagtttcgaagaagatcgtgccattgtgaaatctggtcgcagtaaatttaacttatcgactttaccagctgaagaatacccaaatttaactgattggcaatcagaagttgattttactcttgagcaaagcacattgcgtcgtctgattgaagccacgcaattttccatggcgaaccaagacgcacgctatttcttaaacggcatgaaatttgaaacagaagggaatttattgcgtactgtggcaacggatggtcaccgtttagccgtttgtaccattgcattagaacaagatttacaaacccattcagtgatattaccgcgcaaaggggtattagagttagtccgtttactcgaaaacacggatttgcccgcccgtttacaaattggtacgaataacttgcgtattgatttaggcaatattattttcacttcaaaactgatcgatggtcgattcccagattatcgtcgtgtcttaccacgcaatgcaacacgtattttagaagcggaatgggatgtgttaaaacaggcgtttgtgcgcgcggcgattttatctaatgagcgtttccgtagtgttcgtttacagttaagtgaaaatcaattaaaaattacggcaaccaatccagaacaagaagtggcagaagaaattatcgatgtttcttatgtgggtgaagaaatggaagtcggctttaatgtaagctacattttagatgtattaaatgcgttaaaatgtcagcgagtgcgtatgcgtctgaccgatgcctcgtcaagttgcttaattgaagattgtgacgatgctagcgcggaatatgtcattatgccaatgcgtttatag

SEQ ID NO: 31016 - DNA, 1356 bp, Pasteurella multocida
atgaaaccagacctatcttctctttggcaagaatgccttttacagcttcaagaccagatttcactaacggattttagcacctggttacgtcctttacaggccgattttagcgtacaaaatacgattgttttgtatgcctctaatgtgtttattaaacaaaaagtggacgaaagttatttggcacaattgactaaagttgcacaagagctcagtggcaatgctgagttagtggtacaggtcaaagttggggtgaaacctgaaccgaagcccgcgcaaccttctgctttgccaacacatcacaataaagaagaaaataaaccgcaaacggttattcgttcttatttaaatcccaagcatgtgtttgaaaattttgtggaaggtaaatcaaatcaacttgctcgtgctgttgcacaaaaagtggcagataatcctggtgaaccgagttccaatccgctttttctgtatggtggtacaggtttagggaaaacccatttattgcatgccattggcaatggtattttatctcgtaatacaaatgcgagagtcctgtatattcatgctaataattttatgcaacaaatggtgaatgcggtacgtgataacaaaatggatgaatttaaaaaattctaccgctctttagatgcgctgttagtggatgatattcaattctttgcagaaaaagaaaaaacccaagaagagtttttccatattttcaataatttatttgatacgggacgtcaaattatcctgacatcggatcggtatccaaaagaaattgaaaaactggaagagcgtctgaaatcgcgtttcggttggggattaaccaccgcgattgagccgcctgaactggaaacgcgcgtagcgattttattaaagaaagccgaagaaaagaacatttatttacctgaagaagtggcattttttatcggacaaaaattacgtactaacgtgcgtgatcttgagggcgcacttaatcgagtaagtgcgaatgcggagtttatgggggcggcgattacaattgattttgtacgcgaaaccttaaaagacatgttggcattacaggataaattggtcacagtagagaatattcaaaaagtggtggctgaatattatcggattaaagtttcggatttgaaaggcaagagtcgctcgcgatcgattgcacgtccacgccaactcgcgatggcgttgtcgaaagaattgacaaatcgcagtctgccagaaatcgggaaaaactttggtgataaagatcatacaacagtcttgcatgcctgtcgtaaaattgcagaattgagagaacaagaacattctttagaagaggattggtcaaatttaatccgtacactctctgtgtaa

SEQ ID NO: 31017 - DNA, 135 bp, Pasteurella multocida
atgaaacgtacatttcaaccatcagtgttaaaacgtagtcgtacacacggtttccgtgctcgtatggcaactaaaaacggccgccaagttttagctcgtcgtcgtgctaaaggtcgtaaatcgttatcagcataa

SEQ ID NO: 31018 - DNA, 393 bp, Pasteurella multocida
atcgttatcagcataatcttaatccctattggtgtgattaagctgaatttttcgagggagttacgtttgttaactccccttcattttaaatacgtcttcgaacagccgttccgtgctagtacacctgaacttaccattcttgctcgtcccaataatctcgctcatcctcgcttagggttaactgtcgcgaaaaagcatttaaaaaaagcacatgatcgcaatcgcatcaaacgcttatgccgagaaagtttccgcctagcacagtataaactccccaattgcgattttgttattgtggcgaaacagggaattggtaaattagacaacaggacactcacacaaacattggataaattatggcaaagacacattcgcttagctcaaaaatcttga

SEQ ID NO: 31019 - DNA, 1626 bp, Pasteurella multocida
atggactcaagacgtagcctgttagtcatcgcactactcttcatttcttttcttgtttatcagcaatggcaacttgactaccatacgccaaaacctgttgcaactgaacaagtaaaagtatcttctgatgtacctgcaagttctgcttcttcatcttcggatattgcaacaacagcacaagcacaaggtcgtattatcacattagaaaatgatgtattccgtttggaagtggataccttagggggcgatgttgttcattctgaattattaaaatacgatgcagaattaaattccaataccccgtttacgttgttaaccaacaaagcaaatcatgtctatatcgcacaaagtggtcttgttggtaaagacggtattgataccaaagcgggacgtgctaactatcaggttgatggcgatacgtttaaattagcagatgggcaaaatgaacttgccgtgccattcgtgtttgagaaagacggcgtgactttccgtaaaatctttgtgttaaaacgtggtgcttatgacattgcggtaaactttgaaattgataaccaaagtgataaaactatcgaagttgagccttatgggcaattacgtcatactttagttgaagatactggtaacgtcgcgatgccaacctatacgggtggcgcttattcctcgtctgaaaccaactataaaaaatacagttttgcagacatggaaaaagccaacttgtctatctcaaccaaagctggctgggtcgctgtattacagcactatttcgtttcggcgtggatcccaaatcaagatgcagataatcagctttatagcttaaccgataaagctaataatttggcttcgattggttatcgtggtccagtaactgcaattcctgctggtgccaaagaaacgattcgcagctccctttggactggacctaagttacaagatcaaatggcaactgtcgcaaaccatttagacttaagtgtggactatgggtgggcatggtttattgctaaaccgctattctggctcttaacctttattcaaagtattgtacaaaactgggggcttgcgattattggtgtgactttagtggtcaaagcgattttatacccacttactaaagcacaatacacctccatggcaaaaatgcgtatgttacagccgaaactgcaagaaatgcgtgaacgttttggtgaagatcgtcaacgtatgagccaagaaatgatgaaactttataaagaagagaaagtcaatccattaggtggctgtttacctattcttctgcaaatgccaattttcatcgcattatactggacgttcttagaagccgttgaattacgtcatgcaccattctttggttggatccaagacttatcggcacaagacccgtattatatcctgccgatcttaatgggtgcatcgatgttcttattacagaaaatgtcaccaacgccagtggcagatccaacacaacagaagatcatgaacttcatgccattaatctttatggtgttcttcttgtggttcccatcaggcttggtattatactggttagtgtctaacttgatcactatcgctcaacagcaattgatttatcgtggcttagagaaaaaagggttacactctcgccataaataa

SEQ ID NO: 31020 - DNA, 1398 bp, Pasteurella multocida
ttgttttatcaaagtgcggtcatttttaagagagtttttatgaaagaaaccattgttgcacaagctactgcaccgggacgcggtggaattgggattttacgagtgtcaggtccgaaagcagttgaggttgcccatacggtattaggtaaatgccccaaaccacgtatggcagattatttgccctttaaagatagtgatggaaatgtgctcgatcagggcattgcgctgtacttcaaagcccctcactcctttacaggcgaagatgtgttggaattacaaggacatggcggtcaggttgtactcgatctgctattaaaacgcattttacagttagaggggctccgtttagcccgtcccggtgaattttcagaacaagctttcttaaacgataaattagatttggcgcaagccgaagcgattgctgatttaattgatgccagttcagagcaagccgctcgctcagcattaaaatccctacaaggtgaattttctaataaagtgaatcagctcgttgatagtgtgatttacttacggacctatgtggaagcggcaattgatttcccagatgaagaaattgattttctagcagacggtaaaattgaagcccacctgaatgatatcattacgcagctagatcatgtccgttcagaggcgaaacaaggttcgattttgcgtgaagggatgaaagtagtgattgctgggcgaccaaatgcagggaaatcgagccttctcaatgcactagctgggcgtgaagcagcaattgtcacggatattgcaggaacaacccgtgatgtgctacgtgaacatattcatattgatggtatgccactgcacattattgatacagccggtctgcgagaggctacggatgaagtcgagcgtattggaatcgtacgtgcttggagtgaaatcgaacaagctgatcgcattttgttaatgttagatagtacagaagccgataaccaagatttagaaaaagtgcggtcagaatttttaaccaaattgccaagcaatattcccgtcacgattgtacgtaataaagcggatttaagtggcgaaaatgaaggcatagtggagcaaaatggttatactgtcattactctttccgctaaaacgcaacaagggattgcgctattgcgtgaacatctcaaacaatccatgggttatcaaaccaatatggaaggaggattcctcgctcgccgtcgccatcttgaagcactagaacaagcagcaacgcatttacaacaaggtcatgtgcaattaacgcaattctatgctggcgaattattggcagaagaattacgtcgagttcagaatcatttaagtgaaattactgggcaatttacttccgatgatttactcggcaatattttcagttctttctgtattggtaaataa

SEQ ID NO: 31021 - DNA, 741 bp, Pasteurella multocida
atgtctgacttatcactccagttacacgcgattggtattattcataccccttataaagaaaaattttcggtaccgcgtcagcccaacttagtccaagatggcacagggatcctagaattactccccccttataatcaagcagaaacagtcagaggattagcacaattcagtcacctatggttgatttttcaatttgatcgagtcgctacaggaaaatggcgtccaaccgttagaccaccacgtttaggtggtaatcaacgtgtgggggtgtttgcctcccgttcaacccatagacccaatcctttaggtttatcgaaagtggagttacgccgagtggaatgtcaaaatggcaaggttctccttcatttaggggctgtagatttagtcgatggtacgccgatttttgatattaagccttatcttgcttacgctgacagtgaacctgaggcaaaatcaggttttgctcaagaaaaaccagaatgtacattgcaagtcatatttagcgaacaagcacagaacgcattacaaaaaatcgaaaaaaaacgaccgcactttaagcgctttatcacagaggtaattgcccaagatccgcgcccagcctatcaaaagatgcaatcattagaacgagtttatggtattagactacatgaatttaatattcgttggaaaatggaagcaacagaggaacagcaagcacgcattttagatatagaagaggtagaaaagaaaaagtgcgactaa

SEQ ID NO: 31022 - DNA, 846 bp, Pasteurella multocida
atgctaaataaaatagatagttggctcattcaacacccccaaactcagcatctcacgggtataaaacgattcagtatagaatttttattttttggcttaaaagaaattcgcgcctgcctatttgcaggtttattctttatcgccatgtttatcacaccaaaagcaggtttcttagggctacctcgttatgatgtacttctaatttttgcgattttactacaagttatcatgttttatacaaaatttgaaacactagatgaaatcaaatccattacactatttcatcttattggcttcgcactagaattgtttaaaacctcaagcagtatccaatcttggtcctatcctgattttgcttacagtaaaatctatggcgtccccttatttacaggttttatgtatgctgcagtaggtagttatatcatccaagcttggcgtttatttgacctcaaaattaaaagtcacccaccgtattttttatccacattaactgcaattcttatttacctaaattttttcactcatcattatattggtgattatcgctggtatttagctgtttttgctttagggttatatgcgcgtaccatcgtatatttcaccccttacgataaaccacggaaaatgccattattgtttgcatttatgctaataggtttctttatttggctagctgaaaatatgggaacatttattggcatctggcgctaccctaatcaaattggagcatggtcaatggtacacgtcagtaaatggagtgcgtgggcgctattagttatcatgacctttactatcgtagcgaacttaaaacacatcaaaaaaagtattcgcgtttcacgagactaa

SEQ ID NO: 31023 - DNA, 1851 bp, Pasteurella multocida
atgacagataaaatagatatcaataaattgcgtaatatcgcaattatcgcccacgttgaccacggtaaaactaccctcgttgataaacttttacaacaatccggcacattagaggcatcacgtaatgaaagtgatgagcgtgtcatggactctaatgacatcgaaaaagaacgtggtattaccattttagctaagaataccgccattaattggaatgactatcgcattaatatcgtagacaccccaggacacgcagacttcggtggtgaagtggaacgtgtgatgtcaatggtagattgtgtacttttaattgtagatgcttttgatggtccaatgccacaaacgcgttttgtgactcaaaaagcgtttgcccacggtttaaaaccaattgtggtgatcaacaaagttgaccgtccgggcgcgcgccctgactgggtagtggatcaagtttttgatctttttgtcaacttaggtgcaactgatgagcagttagattttccaattatttatgcttctgcattaaatggtgttgcgggtcttgaacacgatgatttagcagaagatatgaccccattatttgaagcgattgtgaaacatgttgagccaccaaaagtggaacttgagcaacctttccaaatgcaaatctcccaattagattacaacagctatgttggggtaatcgggatcggacgtattaaacgtggttcagttaaacctaaccaaaccgtgagcattattgatagcgaaggtaaaacccgtaccggtaaaatcggtcaagtactcggtcatttaggtttgcaacgttatgaaacagagcgtgcttatgccggggatattattgcgatcacgggattaggtgagttaaatatttctgataccatttgcgatattaaccatgttgaagccttacccgcattaagcgttgatgaacctacggtgactatgttcttctgtgttaatacttcacctttctgtggtaaagaagggaaatatgtgacgtctcgccaaattcttgagcgcttaaataaagaattggtacacaacgtggcattacgagtagaagaaacagaagatccagatgctttccgtgtttcgggtcgtggtgaattacacctttctgttttaatcgagaatatgcgtcgtgaaggctatgaattggctgtgtcacgcccacgtgttatctataaagaagtagatggacgtaagcaagagccatttgagcaagtgacgattgatattgaagaacagcatcaaggttcagtcatggaagcactcggtattcgtaaaggtgaagtacgtgatatggtgccagatggtaaaggacgtacccgtttggaatataacattccaagccgtggcttaattggtttccgcggcgaatttatgacgatgacctccggtaccggtttactttattcaagttttagtcactatgatgatattaaacccggtgaaattggacaacgtaaaaatggtgtcttaatttctaatgcgactgggaaggcattggcttacgccttatttagtttacaggagcgtggtaaattaatgattgaacatggtaccgaagtgtatgaagggcaaatcatcggtattcatagccgttcaaatgacttaactgtgaactgtttacaaggtaaaaaattaactaacatgcgtgcctcaggtaaagatgaagccgttgtgttagtgccacctgtacgctttagtttagaacaagcgattgagtttattgatgatgatgagttggtggaagtgacaccaagctcgattcgtatccgtaaaaaattgttaacggaaaccgatcgtaagcgtgcaagtcgtacgacaaccagtactagcactcactag

SEQ ID NO: 31024 - DNA, 1419 bp, Pasteurella multocida
atgtcagacaccaccgctatcgccaacgtattcaagctgattgaagaatacgatatcaaatttgttttacttcgctttaccgatattaaggggaaagaacacggtgtttcgcttcctgttaatcttgttgatgaagatttatttgaagacggtaaaatgttcgacggttcttccgttgaaggatggaaggcaatcaataaagcagatatgctcttgatgccaatgccagaaacagctgtggttgatccttttgctcaaattcctaccctttccctccgttgcagtatctacgaaccttctactatgcaaagctacgatcgtgatccacgttctattgcgattcgtgcagaaaactatatgcgttcaacgggaatagccgatgaagccctctttgggcctgaaccagaatttttcttatttgatgatgttcgtttcgatgtctcgatgaaccgtagcagttattctgttgatgatattgaggctgcgtggaatacgaataaaaaatatgaagacggtaacaacgcttatcgtccactcaaaaaaggcggttattgtgcggtcgccccgattgatagcgcacatgatatccgctctgaaatgtgcttaatcttagaagaaatgggcttagtgattgaagcacaccaccatgaagtcgccacagcaggacaaaatgaaattgcaacgcgctttaataccttaacaactaaagccgacgaaacccaaatttataaatatgtagtacaaaacgtcgcctacgagcacggtaaaactgcctgctttatgccaaaacccatcactggcgataacggctccggtatgcattgtaatatgtcattaagcaaagacggcaaaaacgttttccaaggggataaatacgctggactgtctgaaaccgcactttattatattggtgggattattaaacatgcaaaagcgttaaatgcgttcactaatccttcaaccaactcttataaacgcttagtgccgggctttgaagcacctgtcctattagcgtattctgcaagtaaccgttcagcctcaattcgcatccctgcggtcaccaatccaaaagcgattcgtattgaagcgcgtttcccagatccattggctaatccttatcttgcgtttgctgcattattaatggcgggtctagacgggattatcaataaaattcaccctggcgatgcgatggacaaaaacctgtatgatctgccaccagaagaactacaaaatatccctgcggtagcaagctcattagaagaagctttaaatgcattagaacaagattatgaatttttaaccaaaggaaatgtgtttactcaagcttttattgatgcgtttattacaattaagcggaaagaagtagaacgtttaaatatgaccccacaccccgtggaattcgaaatgtactatgcctaa

SEQ ID NO: 31025 - DNA, 450 bp, Pasteurella multocida
atgcaagtaattcttttagataaagtggttcaccttggtaacattggtgatcaagtgaatgtgaaatcaggttttgcacgtaacttcttaatcccacaaggtaaagcagttatggcaaccaaagcgaacatcgagtactttgaagctcgtcgtgctgagttagaagcgaaagctgctgaagtgttagctgcggcacaagcacgcgctgcgaaattagcagaattaggttctgtaactatcgcatctaaagcaggtgatgaaggtcgtttattcggttcaatcacaacgcgtgatgtggcagatgcagtaacggctgcaggtgttgaagtagcaaaaagtgaagttcgcttatctacaggcccgattcgcactttaggtgatcacgaagtgaaattccaacttcacggtgaagtatttgcaacaatcaatgtgattgttgttgctgaataa

SEQ ID NO: 31026 - DNA, 228 bp, Pasteurella multocida
atggcacgttatttccgtcgtcgtaagttctgccgtttcacagcggaaaatgtagtagaaatcgattataaagatgtggctacattaaagaactatatcacagagagcggcaaaattgttccaagccgtattaccggtactcgtgcgaagtatcaacgtcaattagcgcgtgcgatcaaacgtgcacgttatttagcgttacttccgtacactgacaatcatcagtaa

SEQ ID NO: 31027 - DNA, 327 bp, Pasteurella multocida
atgctgaagagtaatttaaatattgataatcgtttttcgttgataggcatcgtcgcgagtcaaccaaaacgacaccaaagtccgaatggcatttatcattgccaatttgtattagaacatcgttctatacaagaagaagccggattaagccgtcaggcgtggtgtaaaatgccagttcaaatgagtggcaatcaatttagagaaaaaactcaaagcattacggtcggcagtcagcttttggtggtgggatttattagttctcacaaaaccgcaaatggtttaagccaattagtattacatgccgagcaaatcgaatttatagattag

SEQ ID NO: 31028 - DNA, 378 bp, Pasteurella multocida
atgcgacactacgaaatcgtgtttatggttcatccggaccaaagcgaacaagtaccaggcatgattgaacgttatacaggttctgtaaaagaagctggcggtcaagttcatcgcttagaagattggggtcgtcgtcaattagcgtacccaatcaacaaattacacaaagcacactatgtgttaatgaatgtagaagcgcctcaagaagtcatcgacgagctagaaacaactttccgttacaacgacgcagttcttcgtaacgtaatcattcgtactaagcacgccgtaacagaagcgtccccaatggttaaagcaaaagacgatcgtaaagctttagctgaagttgaaaacaacgattttgaggatgctgaagagtaa

SEQ ID NO: 31029 - DNA, 1377 bp, Pasteurella multocida
atgtttgagaatttgtcggatcgcttgtcaaaaacgctacgtaacattagtgggcgtggacgtttaactgaggacaatattaaggaaacgctacgtgaagtccgcatggcattattagaagcggatgtggcgttaccagtggtacgtgactttattaataaagtgaaagaacgcgcaattggagtggaagtcaataaaagcctcacaccaggtcaagaattcgttaagatcgtgcaagcggaacttgaagcggcaatgggagaggcgaatgaaagtttacatctttcgacccaaccacctgcagtgattttaatggcgggtttacaaggggcgggtaaaaccaccagtgtgggtaaactggcaaaatttttaaaagagcggcataagaaaaaagtattagtggtgtctgctgacgtatatcgccctgctgcgatcaagcaattagaaacgcttgcgcaagccgtcggtgccgatttctttccttccgatgtctcacaaaacccagtgcaaattgcccaagcagcattaagtgaagcaaaattaaaattctacgatgtgttaattgtggataccgcaggtcgcctacacgtcgacggcgaaatgatggacgaaattaagcaaattcatgccgcacttaacccaattgaaacgctctttactgtggatgcgatgacggggcaagatgctgcaaatacggcaaaatcctttaatgaagcgttgcctttaacaggggtggtattaacgaaagtggatggtgacgcgcgtggtggtgctgccttatcaattcgtcagattactggtaaaccgattaaattcttaggggtgggcgaaaaaaccgatgcactagaacccttccatccagaacgtgtggcatcacgtatcttgggcatgggtgatgtgctgtcgttaattgaagatcttgaacgttctgtcgatcgcgaaaaagcggagaaaatggcgcagaagttcaaaaaaggtgataattttacccttgaggatttccgtgagcagcttatccaaatgaaaaacatgggtgggatgatgtcgatgttagataaattgcctggtgccaaaaatctaccggatcacatcaagaataaagtagatgacaaaatgttcagtaaaatggaagccatgattaattccatgacgttgaaagagcgcgcaaatccagaaattatcaaaggttctcgccgtcgtcgtattgcaatgggttcaggtacgcaagtgcaagatgtgaataaattactcaaacagttcgatgaaatgcaacgtatgatgaaaaaaatgcgcaaaggtggcatggcaaaaatgatgcgcggcatgcaaggcatgatgggcggactcggcggtttaggcgggatgtttagacgctaa

SEQ ID NO: 31030 - DNA, 804 bp, Pasteurella multocida
atgtggctttcaattttttccgtgtttttttatctattgagtgtcttactcattacccctatgttgttaaaaattcaagcgggcgaacccgcatcggttcccaatagaatgccttttttaacggcggcattactcgccattcttctgcactttatcaatcttattcctctttttaccgatttaaccagcggtcaaaatttctcggttatcgaaatcagttccttaatcagtgttatgacagcaacgatcgccacattagcgtttttatttcgcatacacactttatggtttttattaccgattatttattctttcgccatcattaatctggtcctcagtaccttaatgccggcgcattttttatatcatcttaatcaagatatgggcttatttattcatgtaggcttatcactgttgacttattcggtctgttcgattgtcgcgttatattccattcagttagtttggatcgatcgcgccttaaaaaataaaaaactacctttttcaccaatgattccaccgttaatgaccgtagagcgccatttttttcgtttaatgctgataggtgaaatattactcacaattgtcctcatttcagggagctaccatttatcgaaaacctttgccccacaagacattcagaaagctgttttttctttcttggcttggatagtctttgggagtgcactggttggtcattggaaactccattggcgtggaaaaaaagtggtgtattatgcgcttttaggtatcattctcctgactatcgcctattttggtagtcgtgtaatgcttgaaatataa

SEQ ID NO: 31031 - DNA, 1650 bp, Pasteurella multocida
atgaaaaaattaacaaaattgagtgcaatcgccctgtcattagggttaatcagtcaagcttacgcttatacccaagacaaaacctacaatattacggtattacatgccaacgacacacacggtcatttctggaaaaacagtcacggcgagtatggttttgctgcacataaaactttaattgataacattcgtaaagaagtcgaaggcaaaggtggctcagtgattttgctgcatgcaggtgatttcaacacaggcgtacctgaatctgatatgcaaaatgcgaaacctgatatcgagggtatgaacatgattggttatgacgtagcagtactcggtaaccatgaattcgatttcccgatgcaattgcttgaaatgcaagaaaaatgggcgaagttccccctcatttcagctaacgtcatcaataaaaaaaccaacaaacctttagtcaaaccttatgtgatactaaacaaagaggatgtcaaaattgctgtcgttggtttgaccacagaagataccgctaaattaggtaatcctgatgtggttgatcacgtgatctttaacaacccaattgaaaccgccaaaaacaccttggctgaaattaaccaaaccgaaaaaccggatatccgtattgcgttaacccacatgggctactattttgatggtaaacacggacataatgcgccgggcgatgtcaccatggcacgtaccctagataaaggcgcgtttgatttaattatcggtggtcatacacacgacacggtgtgtattgatgaacaaggtcaattcaaactgaaatacacgccgggtgaagcatgtaaacctgatttccaaaacggcacttggattgtccaagcgggcgaatggggaaaatacattggtcgtgcagattttgaattcaaaaatggcgaaaccaaattggtgaaatacgagttaattccaattaacttaaaacaaaaaatcaaattggaagacggcaaatcagaatacaaactgtatcagtctgaaattgctgaagatccagccgtctttgcccatttgaagaaataccaagacgaaggcgatcgtttattaggggtgaaagtgggggaagtaaaagggaaatttatcggtgatcgtaaaattatccgcttccaccaaactaacttaggacgtttaattgctcagtcacaaatggagcgtgtgaaagcggatgtggggatcatgaactcaggcgggattcgtaccgacatcaacgaaggagaaacgacatataaagatctccttactgtacaacctttcggtaatatgattgccactgtcgatttcacggggcaagagttattagactacctcaatgtggtggcattaaaacaagtagatagtggtgcttacccacaatttgctgggctttctatggtagttgaccgcaccgcacaaaaagtatcggatgtcaaagtcggtggcaaagcactggatttaaacaaaacctataaagtatctgtaccagactattgcgccggtggtggtgatggctatcctgtcttgaaaaaacacccaagttatgtcaatacgggttttatcgatgcggagatgctgaaaaaatactttgaagaaaacaaagtgttagatgcgtctaaatacgatccaaaagatgacatcatcttcaaataa

SEQ ID NO: 31032 - DNA, 900 bp, Pasteurella multocida
atgattgaaagtaaaagactgcgcattgcgatgcaaaaatcaggacgcttaagccaagaatcacaagccttattgaaacaatgcggtgtaaaaataaatttacaggaacaacgcctaattgcttacgctgaaaatatgccgattgatattttacgggtgcgtgacgatgatattcccggtctcgtctttgatggtgtggttgatctcgggatcattggtgaaaacgtcttagaagaggaagaactcactcgtcaagctgctggtgaaacagtcaattacaaaaaattacgccgtttagattttggcggttgccgtttatcaatcgccataccgcaagacgaagcttacaatggcataagtgatctcaaaaatgcacgtattgctacctcttacccgaatttactcaaacgttatatgcaacaacaaggtgtggattttaaaacctgttcactcacaggatcagtggaagtcgcgccccgtgccggacttgccgatgcgatttgtgatttagtgtcttctggtgccacacttgaagctaatggtttaaaggaagtggaaatcatttaccgctcaaaatcctgcctcattcaacgtgccgctgaacttagcccagaaaaacaagccttagtggataagttactcacacgcatccaaggtgtacaacaagcggcagaatcaaaatacatcatgcttcacgccccaaaagaaaaactggaagaaatcaccgcacttttacccggcgtggaaaaccccactattttgccattagcacacgacaattcgaaagtcgctatgcatgtcgtcagtcaagaaaatctgttctgggaaaccatggaacagctgaaagatgctggcgccagttcgattttagtgctaccaattgagaaaatgatggggtaa

SEQ ID NO: 31033 - DNA, 624 bp, Pasteurella multocida
atgcgatttcctgataaagatcagattttccctatcaaacattatcaccgactgtgctttttaaaaaacttagttcgtcatcctaatattattgtgggggattttacctactacgatgatgcagagaatgtggaaaattttgagaaaaatgtgaaataccattttgactttttaggcgataaattgatcatcggtaaattttgcatgattggatcggatgtgaaatttattatgaatggcgccaatcatcaaatgaatgccatctccacttacccatttgggatttttggttatgaatgggcaaaagcgttaccggagaaagccgaattatcgagcaaaggggatacggttattgggaatgaggtttggattggctataacgccacgattatgccaggcgtaaaaattggcgatggcgcgatcattggcacaaattcggttgtcaccaagaatgtgccaccttatgcgattgtcgcaggaaatcccgctcgcgtgattagaaaacgtttctcacctgaaaaaattgaacaattattagcattaaaatggtgggattgggagattgagaaaatcacgcgtaatcttgactttttaactggcaaaatcagtgacccgattgagtaa

SEQ ID NO: 31034 - DNA, 867 bp, Pasteurella multocida
atgaattcaaaaaaacatttaggtcataccgcccgtaaacgttttgggcaaaactttttacatgataataatgtcattcatggcattgtttccgcgatttatccccaaaaagatcaatttttagtagagatcggtcccggtttaggggcattaactgagcctgtgggcgaattggtcgatcatttaaccgtggtggaattagaccgtgatttagctgagcgtttacgccaccacccgttcttgcaccataaaatcaccgtgattgaaacagatgcgatgcagtttgattttggacagctttatcgtgatgcaaatttagcagaaaaaaagcaaaaaatgcgggtgtttggtaacttaccttacaacatttcgaccccattaatgttccacttatttaaatatcacgattgcattcaagacatgcactttatgttgcaaaaagaagtggtaaaacgtttatgtgcaggtccaaacagcaaagcttatgggcgcttaaccattatggcgcaatatttctgccaagtgatgccggtgcttgaagtaccgccaacggcatttaaacccgcgccgaaagtggattctgctgttgtacgcttagtaccacacaaagtattaccgcatcccgtgaaagacctatattggttaaaccgcgtatgtagccaagcttttaatcaacgccgtaaaactttacgcaatgcgttatcaactttatttagtgcggatcaattaacggaattgggtatcgatctcaccgcacgcgcggaaaacttatcgatcgccgattatgcacgcttagctaactggttaacagacaatccaccagccgatgttaacaaagacgaaatgattgaacatctagacgattaa

SEQ ID NO: 31035 - DNA, 2583 bp, Pasteurella multocida
atgcaagaacaataccgtcccgatttgattgaagcggaagttcaacaatactgggctgaaaataaaacatttaaagcgattaaagatactaataaaccgaaatattactgcctctcaatgttcccttacccctctggtcgtctgcacatgggacatgtgcgtaactacaccattggtgatgtggtgtcacgttatcaacgtatgaacggcaaaaatgtgttacaaccgatgggctgggacgcttttggtttgcccgcagaaggcgcagcgatcaaaaacaaaacggcacccgcaaaatggacttacgagaatattgattatatgaaaaatcagctcaaaattttgggctttggttttgactgggatcgtgaagtgaccacctgtaaacccgactactacaaatgggaacaatggttcttcactgagttatataaaaaaggattagtgtacaaaaaaacctcaacagtaaactggtgtccaaatgatgaaactgtcttagccaacgaacaagtgcatgaaggttgctgctggcgttgtgataccccagtagaacaaaaagaaattccacaatggtttatcaaaatcacagattatgccgaacaattattaggcgggttagatcaccttccattatggccagatcaagtaaaaaccatgcaacgtaactggatcgggcgttctgaaggggtggaaatcaccttccagttagccaattcagaagacaatttaaccgtttatacgacacgtccagatactttctttggcgtctcttatgtggccgtggcagctgcacatcctttagcagaaaaagcggcagaaaataatcctgaattagctcaatttattcaagaatgcaaaaataccaaagtggctgaagctgagcttgccacaatggagaaaaaaggcatggcgactggtgtgtatgccattcatccattaacgggggaaaaagtgccggtctgggtggctaactttgtgttaatgcactacggtacaggggctgtaatggcagtgcctggacacgatgaacgtgatgctgagttcgctcgtaaatatggtttaccactgcttaatgtcattaagccgattaatggtgagcctttacttgaacatgaattaccttattgtgagcatggtattttgtttaattcaggtgaatttaatggtctagactttgatgccgcatttaatgcgatcgcagacaaattagaagcgcttggcaaaggaaaacgtcaagtgaattaccgcttacgtgactggggtgtttctcgtcaacgttactggggagcgccaattccaatgcttaccttagaaaatggtgaggtggtgcctgcgccattgcaagatctgccaatcgaattaccagaagatgtggtgatggacggcgtgaaaagtccaattaaagccgatccagaatgggcaaaaaccacttacaacggtcagccagcactgaaagaaacggatacctttgatactttcatggaatcctcatggtattacgcccgttatacctcaccaaaatttgcggaagccatgttagatgcggacgaagcaaactattggttaccggtggatcaatacattggtggcattgagcatgcgacgatgcacttgttgtacttccgtttcttccacaaattattgcgtgatgcaggttttgtcacgagcgatgagcccgcagataaattattgtgccaaggcatggtgttagccgatgcattctactacacctcaccaaccaatgagcgtatttgggtgtccccaacagaagtcactcttgagcgtgatgagaaagggcgcatcctgaaagcctttgataaagaaggacgagaactagtgcattctggtatgactaaaatgtctaaatcgaaaaataacgggattgacccacaagaaatggtggaaaaatacggtgcggataccgtacgtttattcatgatgttcgcttcaccagcagaaatgacccttgaatggcaagaatcaggcgtcgaaggagcaaaacgtttcttgggacgtttatggaatctcgtgtttgaatataacaaacatcccgcagaaactaccgtagaaccgaccgcactttcaagcgcacaaaaagctttacgtcgtgatgtacacaaaacgattgctaaagtgagtgatgatatcggtcgtcgtcaaaccttcaatactgccattgccgcgattatggagttaatgaataaattaaccaaagcgccattagtggaagtacaagatcgcgcgattatggcagaagcattaagtgccgtcgtacgtatgctttacccaatcacaccacatatttgtttccaattatggaaagacttaggtaatacagaagcgattgactttgccccttgggtagaagccgatgcagcagcgatggttgacgatgaaaaattggttgtggtacaagtgaatggtaaagtgcgtgccaaagtgaccgtccctgcagaaatgtcagaagacgatatcaagcaagtcgcattagcagatagcaatgtagccaaacacttagaaggtttaaacattgtgaaaaccatctatgtaccgggaaaattatttagctttgtggcaaaataa

SEQ ID NO: 31036 - DNA, 2688 bp, Pasteurella multocida
atgtttagaagtattctcaccaaaatttttggcagccgtaatgatcggattttacgtcgattgaataaaattgttattaagattaatcagttagagcctgagtttgaagccttaagcgatgatgatttaaaagcgaagactgatgcctttaaagcacgtttagcacagggtgaaacattagagcaacttttacctgaagcatttgccacagtgcgtgaagcaagcaaacgtgtattaggcatgcgccattttgatgtgcaattgttggggggaatggtactgactaaccgttgtattgcggagatgcgtacaggggaagggaaaacattaaccgcgaccttaccttgctatttaaatgcgctaacggggaaaggtgtgcatgttgtgacggtgaatgattatttggctcgtcgggatgcggaaacgaatcgtccactttttgaatttttaggtatgacggtgggcgtgaatgttcctggtttatcaccagagcaaaaacgtgaagcttatgcggcagatgtaacatatgcaaccaatagtgaattaggctttgattatttacgtgataatttagctcatactgcacaagaacgttttcaacgttatttacattatgcgttagtggatgaggtggattctattttaattgatgaagccagaacaccgttgattatttcagggcaagccgaagatagctcagaattgtatatgacggttgataaattgattccggatttaatcaaacaagataaagaagattcagaagaatatcaaggtgaaggagacttcactttagacttaaaaaccaagcaagcgcatttaactgagcgaggtcaagagaaagtcgaacaatggctgactgaacaagggttaatgagtgcggaggaatctttgtattcgccgtcaaaaatttccttgttgcatcatgtgtacgcggcattacgtgcccatactttatttgagcgtgatgtagattacatcgtgaaagacggtgaaatcgtgattgttgacgagcacactggtcgtactatggcgggtcgtcgttggtcagacggcttacaccaagcgattgaagccaaagaaggtgtgcgcattcaaagcgagaaccagaccgttgcctcaatcacctaccaaaactatttccgcttgtatgaaaaactagcagggatgaccggtactgcggacactgaagcctttgagttccaacaaatttatgggctagaaactattgtcgtgccaactaatcgtccgatgattcgtgatgatcgtactgacgtcatgttcgagaatgaagagtataaatttaatgcgattattgaggacattaaagattgtgtggcacgtaatcaaccagtgttagtcgggacaatctccattgaaaaatcagaattactctctcatgcattgaaaaaagccggcattaaacacaatgtgctaaatgcgaaattccacgcacaggaagccgaaatcgtggcaaacgccgggtatccaggtacggtgacgattgccaccaatatggcaggtcgtggtacagatattgtactaggtggtaactggaaagccgaaattgcgaagttggataatccgacagaagcacaaattgaggcaattcatactgcttggaaagcgcgtcatgagatcgtgaaagccgcggggggattgcatattattggaacggaacgtcatgagtcacgtcgtattgataatcagttgcgcggtcgttctggtcgtcaaggtgacccaggatcttcacgtttctatttatcgttagatgacgcgctgatgcgtatttatctaaatgaaggtaagttaaacttaatgcgcaaagcctttagcaccgcaggcgaagcgatggagtcaaaaatgttgaccaaagtgattgcctccgcacaagctaaagtggaagcgcataactttgatggtcgtaaaaacttacttgagtttgatgatgttgctaatgaccaacgtcatgctatttatgcacaacgtaatacgttgttagataatgaggatatttctgacacgattgatgtgattcgcgcggatgtctttaatcaagtgattgatcaatatattccaccacaatctttagaagaaatgtgggatgtacctgcactagagcaacgtttgaaacatgactttgccttagatttaccgcttgaaaaatggttagaagaagataatcattttgatgaagatgcattacgtcagcgtgtattagatgcagcgattgaggaatacaagcaaaaagaaagcattgtgggtgaacaaaccatgcgtagctttgaaaaaggcgtgatgttacaaactcttgatgaattgtggaaagaacatttatcagcaatggatcatttacgtcgtggtatccatttgcgtggttatgcacaaaaagatccaaaacaggaatacaaaaaagaatgtttccaaatgtttacggatatgcttgatgccttgaagttgagtgttgtgacgacgttaagtcgtgtacaagtacgtacacaagaagaggttgaacaagcggagcgtcagcgtcaagagatggcaaaacgcgaaacggccagtatgcaatataatgcagacgaagacagtggcgaagagaacacacgtcgtgtgggacgaaatgagccatgtccttgtgggtctggcaagaaatataaacattgccatggcagtaaagctaaatattaa

SEQ ID NO: 31037 - DNA, 2562 bp, Pasteurella multocida
atgcggatcgcaaaactaatactcagtaccctgctcacgctcatcgtactaggctgtctcgcgctaggtgcgatctatgtttatttaaaggcggacttaccggatgtagaaagcctaaaaacagtcgaattacaacagccaatgcaaatttatacggctgatggcaaactgattggcgaagtgggagaacaacgtcggattccagtgccactggataaaattccaaaacaactgattcatgctgttttagcaacagaagataaccgtttctatgaacatcatgggctcgatcctattggcattgcgcgtgctattatggtcgcggttacgaagaaaggcgtttcacaaggcgccagtacaattactcaacaattagcacgaaattttttcttaacccctgaaaaatcgcttgaacgcaaagctaaagaagccgttttagccattgatatcgaaaatacactaagtaaaaatgagattttagaactctatctgaacaaaatttatttaggctatcgttcttatggcgttgccgctgccgccaaaacctattttggcaaagagctcgatcaactaagcttgtccgaaattgcgattatcgctggcttacctaaagcaccttccacaatgaacccgatttattcattaaaacgggcgcaagaacgccgtaatattgtcttaggacggatgttaaccactaaatacatcacacaagaagaatatgacgcggcaatcaaagaacctatcgtcgcgcgctaccatggtgcacaaattgatttccgtgcagactatgtcactgaaatggcacgtcaagaaatggtcagacgttttggtgaagaaaaagcctacactagcggttttaaagtttatactacggtgctttcgaaggatcaggctgaagcgcaaaaagccttacgtaataacttaattgattacgatatgcgccatggttatcgtggcggtgcgccactttggcaaaaagacgaaacggtgtgggacaatgatcgtatcataggtttcttaaaaaaattaccacattctgaaccgctcttaccggctgccgtcatgaatatcagcaaaaccggagcagaacttcttctagcctcaggtgaacgcatgaccttatcacacaatgctatgcgttgggcgggtaaaaaaacaccaaaagtaggcgaacaaatttggattcgtcaaaaagagaaaggggaatggattctggctcaagtgccggaagtcaactctgccttggtatccttaaatagtgataatggtgcaattgaagccttagttggtggatttagtttcgaacaaagcaaatttaaccgtgctacacaatctttagtccaagtgggctcttcaattaaaccgtttatttatgcggccgcattagaaaaagggttaacgctttcaagcgtcttacaagactcgcctcttgtcatacaaaaagcaggacaaaaaccttggcagccaaaaaactcaccaaatcgatttgatggaccaatgcgcttgcgggttggcttaggattatcaaaaaatatgattgcgattcgtgcgatgcaaatggcgggcattgattttacagcagaattcttacaacgctttggttttaaacgcgatcaatacttagccagtgaagcccttgccttaggtgcggcctcttttactccacttgaaatggcaagaggctacgcggtctttgacaatggcggtttcttagttgatccctttattattaatcgtattttagacaatacgggcaaagagattttcttagccaatccgaaaattgcctgtattagctgtcataatattcctgtgctctatggtgaaactgaaaaactggatgcatttaaaaactacgacttaagcttaacggagaatttcgataccaatatcaatggggaagaagaaaacgatgtcggtgatttgatccctgacttgccagaacttcaaccaacggcacaaacacaattagatgaaaataatcttagctttatggctgcggctaaaacagataatgctgaaacccaatatgcaccgcgcgtgattagcggtgaattggcctttttagttcgcagtgctttaacctccgctatttatggcgagccgggtaaaagctgggtggggactagctggcgcttatctaaagcctttaaacgtcaagatatcggtggaaaaaccggtactacgaataattcgaaagttgcttggtacgctggctttggcgcacatttaaccaccgctgtgtatgttggcttcgacgacaataagcgtaatttagggcgcggcgaagcaggggcaaaaacggctttacctgcgtggcaagcctatatgcaagtaagcttagaaaatattccagaacgtaaattgagtccaccacccaatattattgaaaaacgcattgatacgggttctggcttactcacggaatctggtggacgaatggaatattttatcaatggtacagaacctaaacggagttatgtagaagaacaaggctactacatcccatctgatgagataaacgaaaattccccaatccaagaacgggaagaacttttctaa

SEQ ID NO: 31038 - DNA, 888 bp, Pasteurella multocida
atgaatacgattttaggttctgataccgtcaaaagaggtatggcacaaatgcaaaaaggcggtgtgattatggatgtggtgaatgccgaacaagcacgcattgccgaagcggctggtgcggttgctgtcatggcgttagagcgagtgccttctgatattcgtgcggcgggcggtgtcgcacgcatggcaaatccgaaaattgtcaaagaggtgatgaatgcggtatcaattccagtcatggcgaaagctcgaattgggcatatcaccgaagcccgcgtgttagaggcaatgggtgtcgattacattgacgagagcgaagtattaactcctgctgacgatgaatttcatctgttaaaatgtgaatttactgtgccgttcgtatgtggttgccgtgatttaggcgaagcattacgccgtatcggtgaaggtgcctcaatgttgcgcaccaaaggtgaaccgggcacaggtaatattgtggaagcggtacgtcatatacgtaaagtcaatgcacaaatccgcaaagtcgtcgccatgaaccatgatgagctcatgaccgaggccaaaaatcttagcgcaccctttgaattactattacaaatcaaagcattaggtaaattaccggtagtaaattttgccgcaggtggggtggcaacgccagccgatgctgctttgatgatggaattaggtgctgatggcgtctttgttggttcaggaatttttaaatctgaacatcctgaaaaattcgccaaagccattgtacaggcgaccactcattatcaagattatgatttgatcgcccgtttatcggaagaattaggcgaaccgatgaaaggcattgagatttcccgcctgcaacaacatgaaagaatgcaagagcgtggctggtaa

SEQ ID NO: 31039 - DNA, 582 bp, Pasteurella multocida
atgaaagactattcacatttacacattggcgtgttagctctgcagggagcagtaagcgaacatttgcgccaaattgaacaacttggtgccaacgccagtgcaatcaaaaccgtctcagaattgaccgcacttgatggtttagtgctcccgggcggtgaaagcacgaccattggcagattaatgcgtcaatatgggtttattgaggcaattcaagatgttgccaaacaaggtaaaggtattttcggcacctgtgccggcatgattttactcgcaaagcaattagaaaatgatcctacggtgcatttaggtttaatggacatctgtgtgcaacgcaacgcctttgggcgacaagtggatagctttcaaaccgcccttgaaattgaaggctttgctacaacgtttcctgcagtttttatccgtgcaccacatattgctcaagtcaatcatgaaaaagtgcaatgtctagcgacttttcaggggcatgttgtcctcgcgaaacaacaaaatttgttggcttgtgcctttcacccagaactgacgacagatctgcgcgtcatgcaacactttttagaaatgtgttag

SEQ ID NO: 31040 - DNA, 846 bp, Pasteurella multocida
atgctgagttatcgtcacagtttccatgcgggcaaccatgctgatgtgttaaaacaccttgttttaatgctaattatcgaaaatcttcaacaaaaagaaaaaggcttttactatctagatactcatgccggcgttggacgctatcgtttatttagtgaagaggcggaaaaaaccgcagaatttgaacaaggcattgctcgcctttggcaacgcgatgatctacctgaggaagtggctcgctatatcaaattaattaaacaagtcaattatggcggcaaagcattacgttattacgcgggttctccgctgattgcggctaagatgttacgtccacaagatcgtgctttactcacagagttgcaccctagcgattacccactcttacggaataattttaaagaatttgacaatgtcaccacgaaacgcgataacggttttcaacaactgaaagcgaccttacctcccaaagagcgacgtggcttggtgcttatcgatcccccttatgaattgaaagaggattatgacttggtggtcaatgcgattgaagaaggctacaaacgttttgccactggcatttatgccatttggtaccctgtggtgctacgtcaacaaacaaaacgtatccttaaaggattggaaaagactgggatccgtaagatcttacaaattgaacttgccgtacgtccagacagtgaccaacgtggcatgacggcaagtggaatgattgtgattaatccaccttggacattaacacagcaaatgcaaaacatcctaccttatttaactaatgtcctggttccagaaggaacgggaagctggacagtaaaatggattaccccagagtaa

SEQ ID NO: 31041 - DNA, 1356 bp, Pasteurella multocida
atgacaaaacattatgattatctggcgattggtggcggcagtggtggaattgcttccattaaccgtgcagcaagctacggcaaaaaatgtgccattattgaagcaaaagcattaggtggcacctgtgtgaatgtcgggtgtgtaccaaaaaaagtcatgtggtatggcgcacaaattgccgaagccattcatcagtatgcgccagattatggttttgatctgcaagtgaataaatttgatttcgccaaactggtagaaagtcgtcaagcctatattagccgcattcacacctcttatcacaacgtgttagccaaaaataatgtggatgttattcaaggttttgcaaaatttgtgaatgccaataccgttgaagtcaatggtgaacacattaccgccgatcatattctgattgccactggtggacgcccaagtcatcctgccattcctggcgcagaatatggcattgattcagatggcgtctttgccttatccgaattaccaaaacgggttgcggtagtcggtgccggctacattgcggttgaacttgccggtgtgatgaatagctttggtgtaaaaacccatttatttgtgcgtcaacacgccccattgcgtcacttcgatcccttaatcgtagataccctattagaagtgattcaacaagatggcattcaattacatactcaagcgatcccacaagaagtggtgaaaaatgcggatggttcactcacgattaaactcgaagatggacgtagccaagaggtggattgtttgatctgggcaatcggtcgccatccagctaccgataccattaaccttgaagcaagcggagtggaaaccaacgcacgtggttttgttaaagtggataaataccaaaacaccaatgtggaaggtatctatgcagtgggtgacattattgaagggggaattgaactcactccagttgccgtggctgctggacgtcgtttatctgagcgtttatttaacaacaagcccaatgagcatttagattacaatctggtgccaaccgtagtattcagccaccctcctatcggcaccattggtttaactgaacccaaagcgattgagcaatacggtgaagaaaatgtgaaagtgtataaatcctctttcaccccaatgtacagtgccgtgacgcaacaccgtcagccttgtcgcatgaaattagtttgtgtcggcaaagaagagaaaatcgtcggcttgcatggtatcggttttggtgtcgatgaaatgatccaaggttttgctgtggcaatcaaaatgggcgccactaaagcagatttcgataataccgtggcaattcacccaacagggtcagaagaatttgtgacgatgcgttaa

SEQ ID NO: 31042 - DNA, 579 bp, Pasteurella multocida
atggcaaaactttatttttattattcaacgatgaatgcggggaaatccaccaccttattacaatcgtcctataactaccaagaacgcgacatgaataccttagtctatacggcagccattgatgatcggtttggtgtgggaaaagtaacctcacgtattgggattagccaagaggcacaactgtttcataaagaaagtgatctttttgttgaaattgcacaacatcttcaacaacaacctttacattgtattttagtcgatgaggcgcaatttttaaccaaaacacaagtgtatcagcttagcgaagtggtggataaattaaagattcctgtgctgtgttacggtttacgcacagatttccaagcagaattgttcgagggaagtaagtaccttttagcgtgggcggatcaattagaagagctcaaaaccatttgttattgcggacgtaaagcaaactttgtattacgtttaaatgacaaaggggaagttgtacgtgacggtgcgcaaattcaaatcggtgggaatgacagttatctgtcggtttgtcgtttacattacaaagagaagattgcactttaa

SEQ ID NO: 31043 - DNA, 1032 bp, Pasteurella multocida
atgcgcgtgttaggcattgaaacctcctgtgatgaaacaggggtcgcgatttatgatgaagaaaaaggtttagtggcaaaccagttatacacacaaattgctttacatgctgattacggcggggtcgtgcccgaattagcatcgcgcgatcatattcgaaaaaccgctcctttgatccaagcggcgttagcacaagctaatttaacgcccgacgagatcgatgggatcgcgtatacctctggtccaggcttagtcggtgcattattagtgggatccactattgcacgctctttagcttatgcttggaatgtgccagctattggtgtacaccatatggaagggcatttgctagcaccaatgttggaagataatccaccgacattcccttttgttgcgttattagtctcagggggacacacgcaattagtccgtgtcgatggcgtaggacgttatcagttactgggtgaatcaattgatgatgcggcaggcgaagcctttgataaaacagcgaaattattaggcttagattatccgggtggtgccgcgttggcgcgtttggcggaaaaaggtgatcctaaacgttttaagtttccacgtccgatgacggatcgtccaggtttggattttagtttctccggtttaaaaacctttgctgccaatacactgcagcaagcgataaaagaagaaggggaattaaccgaacaaaccaaagcagatattgcctatgctttccaacaagctgtggttgaaactttagtgattaaatgccgccgtgcgttaaaagaaacgggatttaaccgcctcgtgattgcggggggcgtaagtgcaaataagcaacttcgtcaggatttagcacaattaatgcagcagttaaaaggggaagtattttatccacaaccacaattttgtaccgataatggagccatgattgcctatactggttttttacgtttaaaacaaggggagtcacaaccgcttgcgattcaggtaaagccgcgttgggcgatgactgagctttctgcgattgattaa

SEQ ID NO: 31044 - DNA, 216 bp, Pasteurella multocida
atgcctgtaattaaagtacgtgaaaacgaatcatttgacgttgcattacgtcgttttaaacgctcttgcgaaaaagctggtatcttagcagaagttcgcagccgtgagttctacgaaaaaccaactacaatccgtaaacgtgaaaacgcgactcgtgctaaacgtcacgcaaaacgtgttgcacgtgaaaacgcacgtaatacacgcttatactaa

SEQ ID NO: 31045 - DNA, 1749 bp, Pasteurella multocida
atgaaaggctcaattccacgcacatttattgatgatctgttagccaagacagatattgtggagcttgtcaattcaagagtgaagctcaaaaaagcagggcgagattaccaagcttgctgtccattccatcacgaaaagacgccttcttttacggttagtcaaaaaaaacagttttatcattgctttggctgtggtgcacacggtaatgcaatctcgtttttaatggaatatgacaaacttgaattcgtcgaagccattgaagaattagcaggcatgctcggtttagagattccgcgtgaaaataaaccgcactttcatggcaaacaaattaatctgcaaactaagcgtaatttatatgaattgatgcaagaaattgcccaattctatcaacaacaactcgcacaacatattcctgcacaaagttatttacaacaacgcggtttgtctcctgaggtgatttctcgttttcaaattggtttcgtaccgaatagttttgatgcagttttacaacgttttgggcaacagaaagaagatcaacaaaaactcttcgatcttggtatgctttcccgtagcgagcaaggcaagatctacgatcgcttccgtcatcggatcatgttcccgattcgcgatcgacgtggcaaaaccattgcgtttggcggacgcgtgcttggtgatgaaaaacctaaatatttaaactcaccagaaagcgcgacctaccataaaggaaatgaactatatggtttatatgaagccttacaagccaatgaatcaccagagatgttactggttgtggaaggctacatggatgtggtggcattagcacaatttggtgttgattatgccgttgcctcactcggaacagcgactaccgcagaacaaattcaactcctgtttcgttctacggaacaagcaatttgttgttatgatggggatcgcgcgggacgagaagcagcttggcgagcgtttgaaaatgcccttccttatttagaagacgggcgtcaattaaaatttgtttttctgcctgatggtgaagaccctgattcatttattcgtcagcatggaaaagccagctttgaacaatatatgcaaaaagccctctcgctgagtgagtttttattcactagcctcgcgccacaagtggatttttccagtaaagaagggaaaacaaaattagccgcattggcggtgccattaatcaaaaaaatccctggcgatatgttacgcttatctctacgcaacacgctcgcgcaaaaactcggcattttagaccaagcccaattggaaagtctgattccaagctattctgaaatgaaaataacagcctcgcctcaaccggtcaaaagaacgccaatgcgtgtattaattggtctgttattgcaaaatccagaattagcccaattggtaccagacttatctcccttacgaacactgaatgaaccagggctggatttattggaaaaactgaccgcactttgtcaagaaaaagtgggcattactaccggtcaaatacttgaatattggcgtgatactgaacacagcaaagcccttgaaattttagcaagttggaatcatttagtagaagacacacaaattgaagaaacgttcaaaagcacgctacgctatttgtactttcaacttattgaacatgaaatcgatttactgattgccaaagatcgctcagaagggctaaatatgaatgagcggaaaaagttgacacaattattagtgaaaaaacaacaaaaggcatag

SEQ ID NO: 31046 - DNA, 1869 bp, Pasteurella multocida
atggatcaaaatccacaatctcaattgaaattgttaatcgcacaaggcaaagaacaaggttatcttacttacgcagaggtcaatgaccacttgccagaagaacttgttgatgctgaacaaattgaagatattattcagatgatcaatgacatggggattcaagtacttgaaagtgcacctgatgctgatgatctgatgttaaatgaaacgattgctgatgaagatgcggttgaagaagcgacgcaagtattatcaagcgttgaagcagaaattggacgtacaaccgatcctgtgcgcatgtatatgcgtgaaatgggcagtgttgaactacttacccgcgaaggcgaaatcgacattgcaaaacgcattgaagaagggattaatgaagttcaaagtgcgattgccttttacccagaagcaatttcttatctacttgatcaatacgcattagtcgaagaaggtggcgtccgtttagctgacttaatcactggctttgttgatccaaatgcgatgacagaaagcgatgttgcagaaattgaagacacttttgatgaagacgaagacagcgattctgtaagtgctacgctcaatgaagaagaggaagaggaagaagaaagcgaagaagaaagcacgacagacgatagcgattcagacaattccatcgatccagaagtggcgcgtgagaagtttctagaactcaagacacaacacgccaaagcggttgcgatgatcgaaaaacacggtcgcaccagcaaaaaatcaaaagatcaaatccaagccttagcagatgtctttacccaattccgtttagtgccaaaacaatttgatacgctagtcaatttaatgagcaatatgatgaaatcggttcgtttacaagagcgtagcattcaaaaaattgtggtagataaggccaaaatgccaaaagagcaattccaaaaagtctttattgggcatgaaaacaaagatacttggttagttaaagcactatcatcaggcaaaacttggtctgaaaaattagcgaaacatgaagaagaaattcgttattacattgataatattctggaaattgaacgtcaaaccaatttaaccgtttcgcaaatccgcgaagtctgtgaacggatttctgccggcgaactcaaagcgcgccgtgcgaaaaaagaaatggtggaagccaacttacgtcttgtgatttctatcgctaaaaaatacacgaaccgaggcttacaattcttagacttaatccaagaaggaaacattggtcttatgaaagcagtggataaattcgaataccgtcgtggttacaaattctccacttatgcgacttggtggatccgccaagcgatcacacgctctattgcagaccaagcaagaacgattcgtatccctgtacatatgattgaaacgattaataaattaaatcgcatttcacgtcaaatgctacaagaaatggggcgtgaggcatctccagaagagttagcagaacgtatgggaatgccagaagataaaatccgtaaggtcttgaaaattgccaaagagccgatttctatggaaacgcctattggtgatgacgatgattcacatttaggtgattttatcgaagactcaactcttgagttaccattagactctgccacagcacaaagcttgaaagtggcgacacacgaagtattagaagggctaaccccacgtgaagcgaaagtactccgtatgcgctttggtattgatatgaacacagatcatactttagaagaagtaggtaaacaatttgatgtcacacgtgaacgtattcgtcaaatcgaagcaaaagccttacgtaaattacgtcaccctagccgctctgaaactttgcgtagtttcttagacgaataa

SEQ ID NO: 31047 - DNA, 2007 bp, Pasteurella multocida
atggcaacacgtagagaactggcaaatgccattcgttttttaagtatggatgcggtgcaaaaagcaaaatcagggcatccaggtgcaccgatggggatggcagatattgcagaagtcttatggcgtgactttttaaaacataacccaagcaatccacactgggccgatcgcgaccgtttcattttatccaatggtcatggttcaatgctgatttacagtttattacatttaagtggttatgacctttctattgaagatttaaaacaattccgtcaattacattccaaaacaccgggacacccagaatacggttatgcgccgggtgttgaaaccacaacaggaccattaggtcaagggattacgaacgcagtgggttttgcgattgcggagaaaacccttgcccatcaatttaaccgtccaggtcatgaaattgttgaccaccacacctatgtgttcttaggcgatggttgtttaatggaagggatttctcatgaagcctgttctttagcgggtactcttgggttaggtaaattaattgctttctatgacgacaacaatatctcaattgatggtcatgtggacggttggttcactgatgatacgcaaaaacggtttgaagcttatggttggcatgtcattccagcggtagatggtcataatccagaacaaattcttgaggcggtgaaacaagcccaagcggagacaaccaaaccaaccttaattatttgtaaaaccattatcggttatggttcaccgaataaagccaactcacacgattgtcatggtgctccattaggtgatgatgaaattgcggcagcacgtgaattcttaaaatgggagcatgccccgtttgaaattcctgcggagatttatgcacaatgggatgcgaaagaaaaaggtcaagttgctgaaaaagcgtgggaagaaaaattggcagcttatgccaaagcttacccagaattagcggcggaatttactcgtcgtgtgaatgcggagctaccggcaaactgggcggcagaatcgcaagcttttattgaacatttacaagcgaatccggcgaacattgccagccgtaaagcgtcacaaaatgcgattgaagcctatgctaaattattaccggagtttttaggtgggtcagcggatttagccagctcaaacttaaccctctggtcaggttccaaaccaatccgtgcggtagaaaatgccgatggtaactacatcaactacggtgtgcgtgagtttggtatgtcggcgattatgaacggtattgcgttacatggtggtttcattccttatggtgccactttcttgatgtttatggaatacgcacataatgcggtgcgtatggcggcgttaatgaaacaacgctcattgtttgtttatactcacgactctattgggcttggtgaagacggtccaactcaccaaccggttgaacaaacgtctgctttacgtttaattccaaatttggaaacatggcgcccatgtgaccaagtggaatcggcggtggcgtggaaagcggcagtggaacgtaaagagggacctagtgcgttaatttttactcgtcaaaatcttgcgcaaatggaccgcactgctgagcagttagccaatgtggcacgtggtggttatgtattacgtcattgctgtgaaaaccaaaactgtccagatttaattttgattgcgaccggttctgaggtggaattggcgatgaaagcggcggatgttttagatgcagaaggggtaaaagtacgtgttgtctctatgccgagcaccaatgtgtttgataaacaagatgcggcttaccgtgaaagtgtgttaccaagccacataacaaaacgtgttgcgattgaagcgggtattgcggacttctggtacaaatatgtgggctttgagggacgtgttgtgggaatgaacagttttggtgaatccgcaccagctgaccaattgttcaaactctttggttttacagtcgagaatatagtcgaaaaagcaaaagcgattttataa

SEQ ID NO: 31048 - DNA, 666 bp, Pasteurella multocida
atgaaaccagtccacgcctttatgcgcttatatttcatcgctggtacgcaagattgtttacatcttgacggtgatcctgcccaaaatttactcaacattttacaacaagcgctgcaaagtggcattacttgctatcaattccgtgagaaaggcaaaaaagccctacaagaccccgacaaaatcaaagcattagccattcaatgtcgcgacctctgccgtcaatatcaggtgccatttgtggtcaatgatgatgtgcaactagccattgacattggcgcagatggaattcatgtggggcagacggatatggcggtggcggatgttgccgcactttgccatagtcattgttttattggcacctccgtcaatacccttgaacaaggcatcgcagcacaagccaatccgttgattgattactttggtacaggtcctatttttcccacacaatcaaaagaagatcctaaaccggtggtcggtgtggattttgtgtcaactattcgggcacacggcatcgacaaaccaatcgtggcaattggcggtgtgacgacacagactgccgaggaattacgccgacgtggcgcgaatggcgtagcggtgatttccgcgatcacacaatccgccgatattgctaaaactgtaaaggagttactgggtaatgcgcaataa

SEQ ID NO: 31049 - DNA, 804 bp, Pasteurella multocida
atgctaaacccgacatacttacaacaaatccgctcccaaaatccccttatccacaatatcactaacgtggtagcggcgaatttttccgctaacggactgttagcgattggtgcctcaccgctgatgtctgcggcaatggaagaaatgcacgaagtacctcgtcttagccaagcgctagtaatcaacattggcaccttaatgggcaaagaagtcgatgccatggtcttagcgggtaaaacagccaatgaagtaggtattcccgtggtgcttgatccggttggtgttggcgcaaccaccttccgcaaacaaacggtggcaaggctactaaaagaagtcaaatttgctgccattcgtggtaatgctggtgagctagcgacaatcgcagaggtgaattggcaagcgaaaggagtggacgcgggatcgggcgaagccgatttagcacagattgcgcatatcgtggcaaaaacataccaatgcattgccatgataagcggcgcgactgattatcttagtgatggcgaacaccatgcgcaaatccataatggtacgcccttatttccaaaaatcaccgcgtcaggttgcttattaagtgcggtgtgtggtgcctttttagcggtagcgaaacctgaacagtattttgatgccatgttagaagcttgtactgcctatgccattgctggtgaacttgccgcgcaaggattaaaaacaacacaacatggacaattttatgtgggcttgctggatcaacttgcccacctttcacctgaaacaatcaatcaatatgcaaggatttcttatgagtaa

SEQ ID NO: 31050 - DNA, 654 bp, Pasteurella multocida
atgtccacaacacaacaacttatcaacaattcagggcgctattggctggattatatccaccacccttttgtgcaacagttagccgacggtaccttgccgaaagcgtgttttcagcactatttaaaacaagattatttatttttatttcaatataaccgtgccttgtccttagggatttacaaagcagacaattttgcacaaatgaaagccgcacaagacgccattggcgctctgttacatgaaattcagctacacattcaatactgtgaaagctggggtattgatgaaaataccttatttcgcacggaagaatctgccgcttgtgtggcttacacccgttatgtcttagatgcgggtatgacgggcggtttagctgaactttataccgcgctagccccttgtgcgattggttatgccgtgattgcaaagcatattgtagaaagtggcaaaagcccagcaaacaacccttaccaagcatggattgatacctattctggcgaagaattccaaaatgcagcacaaaacgcaatcgctaccttagatgcactttgtgcggatcgctctgaagcacagcttgctaaattacaacagatttttaataccgccacacgcatggaatcggcgttttggcaaatgggattggatttaagttaa

SEQ ID NO: 31051 - DNA, 810 bp, Pasteurella multocida
atggataaatacgcggtatggggcaatccaatcgcccaaagtaaatcaccacaaattcatcaaatctttgccaatcaaactcagcaacagatggaatacgtggcaatgttaggtgatgaacaagattttgaacagcaattacgcgtcttctttgaaaaaggcgccaaaggttgcaacattaccgcgccgtttaaagagcgggcgtttcagttagcggatcttcacagcgagcgttgtttgacggcggaagcctgtaataccttgaaaaaattagacgacgggcgtctctatggcgataacaccgatggagcaggtttagtcagtgatttacaacgcttaggttggcttaagccagaacaaaccattttgattttgggcgcaggtggcgcgacaaaaggtgtgttgttaccgttattacaagccaagcaacatattgtgttggctaaccgtaccttaagtaaggcagaggatttggcacaaaaatttgcgcaatatgggcaaatccaagcagttgagctggataatatccccgtgcaatccttcgatttaatcatcaacgccacctcatcaggcttgcacgggcaaacggtacagatgaaccctgaaattttgcaaaacgctaccgcactttacgatatgcaatatgctaaacaagccgatacgccgtttgtggcgttatgcaaacaattaggcaagcaaaacgtcagcgatggctttggtatgttggtggcacaagccgctcacgcttttcatttatggcgaggggtgatgccagaatttgaggcgttgctagaacaagagtggctttaa

SEQ ID NO: 31052 - DNA, 1569 bp, Pasteurella multocida
atgagcaatcaatatcttatggcacttgatgctgggaccgggagtgtacgtgcggtcatttttgacttagacgggaatcaaattgtcgctgcccaacgggaatggacgcacctcgctgatcccaatattcccggatcaatggaatttgatctcagcacaaactggcaacttgcttgtgactgcatccaacaagcactccaaaaatcccagattccagcacaacagattgccgccatctcaacttgttccatgcgtgaaggcattgtgttatatgatgaaaataaacaaccgatttgggcttgtggtaatgtggatgcccgcgccacagaagaagtcaatgaattaaaagcacgttgtgatcaccgctttgaagaaaaattgtatgccatttcagggcaaactcttgccctgagtgcggtccctcgtttattgtggctcgcccaccatcgtcctgatatttatcaacaaacgaaagccatgaccatgatcagtgactggcttggctttatgctaagtggtgaacttgccgtagaaccgtccaatgcaggtaccaccggcatactcaatcttaaaacacgacagtgggcacctgaactactggctatggcagggctcaatagcgatattttaactccagtaaaagagaccggtgagatcctcggcaacgtcagcacgcttgtcgcccaacaaactggtttacatgctggcacccctgtcgtagtaggcggcggtgatgtgcaattaggctgcattgggttaggcattacagagccatctcaagcggcggtcattggtggaacattctggcaacaagttgtcaatttacctgaacccgtcacggatcctgagatgaatgtccggattaacccccatgttgtcgcacctttagtacaagcagaatccattagtttctttactggtttaactatgcgttggtttagagatgcgttttgccaagaagagaaaatcctagcggaacgcttaggcattgatacctacactttattagaacaaatggcagaacgtgtgcctgtcggcgcaaatgatgtcattccgattttctccgatgccatgcactttaaatcttggtatcacgcggcaccgtcttttgtgaatctctccattgatccagaaaaatgtaataaaccggtcttattccgtgcgttagaagaaaatgccgccatagtgtcttcttacaacttagatcaagtagaaaaattctcgggggtcaacctcacttccatcgtcttcgctggcggtggatcaaaaggcaaactttggagccaaattctcgccgatgtgaccggcttagtagtaaatatcccggtggtcaaagaagccaccgcactgggctgtgcgattgctgcaggtgtcggggtcggactctacccgtcactcagtgaagcaggcaagaaattagtcaaatttgaacgtcaacaccaaccgaatccagagaattatcaactttatcagaaacataaagcaaaatgggctgatgtctatgccaaacagttacagctggttgatagcggattaaccacttcgctgtggaaagcgccgggtctctaa

SEQ ID NO: 31053 - DNA, 993 bp, Pasteurella multocida
atgtggaaatttatacaagataaccgtgaattaaccattgtctttgcgatcggattgctgtttaccttactcagtcttggaggcagcggctttcatttacaaacgttggcaatgatttttaactcggcacaaattgtgattttgctggcgattggtgccacgtttgtcattttgacacgcaatattgatgtgtcggtgggttcaacgatgggcttatgtgccgtcattgctggtagtttacttaatgccggatttggtgcgagcgcttttgtgattactctatgttgtgggctgttggctggtttatttaatggcattttagtcacactactacgtatccctgccattgtggcgaccttaggaacacttggcttgtataaaggtattatgttgctaattacaggtggtaaatggattgagggcttaccacaggatttaaaaaccttgtctgcgccagcatttttgcacatttcgccgatcggttggctacttttaggcttgattggcttaacgtatttctttttaaccaaaatgaaagcagggcgtgacttttacgcggtgggtgacaatttgcaaggggcattacaactgggagtgcgcgtgaatcaagttcgcatcgctgcatttgcgattaacggtacgatggcggcattagccggtattgtgtttgcctcacaaatcggctttgtgcctaactcaacggggaatggattagaaatgaaagcgattgccgcttgtgtattaggtgggattagcttacttggtggggcggggaacattattggtgctgttttaggtgcctatttcctgatccaaattgactctattttggtgttgttaaaagtgcctgcttattggaataactttgtagcaggtttagtgctcttagcggtcttggtgtttgatggacgtattcgcgtgatgattaacaataatattaaacttcagcgttatgcccgtttcttaaaagacgatcaagatgcggtgaaataa

SEQ ID NO: 31054 - DNA, 1476 bp, Pasteurella multocida
atggctaactatttcaatacattaaatttacgccaacaattagatcaattagggcgttgtcgctttatggatcgcaatgaatttgcgaatgaagcagattacctaaaaggaaaaaaaattgtcatcgtcggttgcggggcacaaggcttgaatcagggcttgaacatgcgtgattcggggctagatattagctatgccttacgtgcagaagccattgcagaaaaacgcgcgtctttccaacgtgcgacggaaaatggctttaaagtggggacgtatgatgaattaattccaagtgcagatttagtggtgaatttaacccctgacaaacagcactcgaaagtggtggcagatgtcatgccgttaatgaaacaaggtgccgcactcggttattcacatggtttaaatatcgtggaagtaggtgaacaaatccgtaaagatattacagtggtgatggtggcaccaaaatgtccgggcacggaagtacgtgaagaatataaacgtggctttggtgtaccgaccttgatcgcggtgcatccagaaaatgatccaaatggtgatggtttagaaattgctaaagcctgggcggcagcaacgggtggtcatcgtgcgggcgtgcttgagtcgtcttttgttgcagaagtgaaatcggatttaatgggtgaacagactattctgtgtggtatgttacaagcgggttctatcgtttgttatgataagcttgtggcggacggcaaagatcctgcgtatgccggtaaattaatccagtacggttgggaaaccattactgaagcgctgaaacaaggtgggattacgttgatgatggatcgtttatccaattctgcgaagttacgtgctttcgaactttcagagcaaatcaaagcgaaattaacgttcttatttgaaaaacacatggacgatattatcagtggcgaattttctgccacgatgatggcggattgggcaaacggtgatgcaaatcttttaaaatggcgtgaagaaaccggcaaaacggcatttgaaaatgcaccaaaatatgaaggtaaaatcagcgagcaagagtattttgatcacggtgtattgatggtggcaatggtgaaagcaggcgtagagttagcctttgataccatggtcgcgagcgggatttatgaagagtcagcctattatgagtcattgcatgaattaccactaatcgctaatacgattgcgcgtaagcgtttatatgaaatgaatgtggtgatttctgatacggcagaatatggtaactacttatttgctaatgtggcgacgccaattttggcaaaagagattatgccgaccttacaaaaaggggatttaggtgagcctacgcctacggttgagattgataatattacgctacgtgatgtgaatgacgcgattcgcaatcatccaattgaattgatcgggcaagaattacgtggttatatgacagatatgaaacgtatttcctctcattaa

SEQ ID NO: 31055 - DNA, 801 bp, Pasteurella multocida
atggcttattcaatcgacgattttattcatctcatcgcccagttacgcaatccaaatggaggatgcccgtgggatcttaaacaaacgtatcacagcatgattccctgtctaacggaagaaacctacgaagtgattgaagccatccaacaacaaaatatgcacgatctgaaagaagaattgggtgatctgttattacaagttattttcttcagccaattagcaaccgaagatcaacatttcacctttaacgatgtcgtcgcgactgttgctgaaaagattatccgtcgacaccctcatgtttttggtgagaagatcgcaaataacgaacaagaagcgttacaaaactggaacgccatcaaagcacaagaacataaagaaaaagggcaacattctattttagataatgtaccacatgctttccctgccctgatgcgcgcggaaaaactacaaaaacgctgtgctaaagtcgggttcgactgggatgatagccagcaagttattgacaaaatcaaagaagaattaacagaagttcaacaagaaatggcaaaagcggacaaacaacaagccaaaattgaagaagaagtgggtgatttattgtttgcggtggtcaatctgtgtcgccatttaaactgccaaccagaagaaagtttacgtaaagctaaccataaatttgagcaacgcttccgcgccgttgaaaacaaactcaaagctcatcataaaactcttgaacaaagctcgttaatggaaatggacttattatgggatgaagtcaaacgagaagaaaaaaataaggtgctctaa

SEQ ID NO: 31056 - DNA, 2625 bp, Pasteurella multocida
atgaaaacaacagcagaaattagacaatcttttcttgattttttccatactaaagggcaccaaattgtcgcaagtagtgctttagtacctgagaatgacccaactttattatttaccaatgcagggatgaaccaatttaaagacgtttttttaggtatggataaacgtccctattcccgagcaacgacggcacagcgctgtgttcgtgctgggggaaaacataatgacttagaaaatgtcggctacaccgcgcgtcaccatactttttttgaaatgttaggtaatttcagttttggcgattatttcaaaaaagatgccatccattttggttgggagtatttaacgtcaccaagatggttaggattaccggcagaaaaattgtgggtcaccgtgtatgaaaccgatgatgaagcctatgatatttggaacaaagaagttggtgtaccagcagagcgtattatccgtattggcgataataaaggcgcaccttacgcatctgataatttttgggcgatgggtgatacaggaccttgtggtccttgtactgaaattttctatgatcatggtgagcatatttggggtggaccgccgggatcacctgaagaagatggtgatcgctatatcgagatctggaatatcgttttcatgcaatttaatcgtcacgcagatggaacaatggagccattaccaaaaccgtcagttgatacgggtatggggctggagcgtatcagcgcggtactacagcatgttaactccaactatgaaatcgatattttccaaaaattaattgcgaaagtcgcggaattaaccggtgagaaagatctcagcaataaatctttgcgtgtgattgcggatcatattcgttcatgtgcttatttaattgcagatggtgtgattccgtctaatgaagggcgtggttatgtcttacgtcgcatcatccgtcgcgcagtacgtcatggtaacttattaggtgcaaaagaagcctttttctataagttagtgccaacccttattgacgttatggcggaagccggcatcggcgtaaaagaaaagcaagcgaccgttgaaaaattgttacgtttagaagaagaacaattcgcgcgaaccttggagcgagggttagccctattagatgaggcattagccaacgtgaaaaaaggcgaattgtcaggcgaagtggcgtttaaactttatgatacttatggtttcccattggatttgacggcagatgtttgccgcgaacgcaatattacgatcgatgaagtgggttttgatcgtgaaatggaagcacaacggttacgtgctcagtcggcgagccaattcggcatggattacaataatgtaattcgtgttgaaggttgcacgactttcgagggctatacggcatcagaatcacttgcaaaagtgaccgcactttttgccgatggtaaaccagttgaacgcattgaagctggtcaaagtgcggtggtgattttagaaaatacaccattttatgcagagtcaggcggtcaaatcggtgacagtgggtatttaaatgggcaaggtttctcatttgaggttaaagacacacaaaaatatggtcaagtgtttgggcatattggtgagttggtgagtggcagtttaactgtggggaaatccgttaatgcagtagtggacgtaaaacgtcgtcataatacctcattgaaccattcagcaacgcacttattacatgcggcactccgtcaagtgctaggcgagcatgtagtgcagaaagggtctttggtgtcagacgtggcattacgttttgactttgctcaccatgaagcgattacgaaggcacaattagttgaaattgaatgccttgttaatcaacaaattcgcgctaaccatcttatccagactgagttaatggaattagaggcagcgaaagccaaaggtgcaatggcattatttggcgaaaaatatgcggatcaagttcgtgtgctaacgatgggtgatttctctattgagttgtgtgggggaattcatgcgaaacgtaccggtgatattggtttgtgcaaaattacaacggaaacggcgattgctgctggtatccgtcgtattgaagccattaccggtgaaaatgcgatgtcttggttgcatcaacaacaagcgcttttagcgcaaagtgccgatttattgaaatctgatgtgaattcaattgtcgaaaaaatccaacagctacaagataaagcgaaaaaagccgagaaagaattgcaagtcttaaaggaaaaaagcgcgatgcaagcgggttccgatttggcgagaagtgcggtgaaaatcaatgatgtttctgtcattgtgcaaaaacttgatggcgttgatacaaaatcattacgtgttgttgtagatgatttaaaaaatcagctgagttctgcggttattgtatttgcctctgttgtagaggaaaaagtcaatttaattgtgggtgtaacaagtgatttaacgagcaaagtgaaagcgggtgagttagtcaatctgttagcacaacaagttggtggtaaaggtggtggccgtccagacatggcaatggctggcggtacacaaattgagaatgttgatcatgccttatcttttgccacaacgtggttaaaagaaaacttgtaa

SEQ ID NO: 31057 - DNA, 189 bp, Pasteurella multocida
atgctaatcttaacccgtaaagttggcgaaagcttactcatcggtgatgatatttctatcacgattctaaatatacgtggaaatcaggtaaaaattggaatcaaagcccctaaagacgtttctgtacatagagaggaaatttatcaacgtattaaacaagcattagaagcacctcatgtgggtgagtga

SEQ ID NO: 31058 - DNA, 888 bp, Pasteurella multocida
atgaaagcaattatccccgtcgcaggtttagggacacgaatgttacccgcgacaaaggcgattcctaaagaaatgttaacgctggtggataagccgttaattcaatatgttgtgaatgaatgcgtggctgctggtatgaaggaaattgtcttggtgacacattcttcaaaaaatgccattgaaaaccattttgatacctcatttgaattggagacaatgctagaaaaacgtgttaaacgtcaacttttagatgaggttcgctcgatttgtccaaaaaatgtgacaattatgcatgtccgtcaaggtaatgcgaaaggcttaggacatgccgttttatgtggcagaccattagttggaaatgagccatttgctgtgattctaccggatgtactattggctgatttttcagcggatcaaaaacgtgagaatctggctgcaatggtcaaacgttttgaggaaacacaaacgagccagattatggttgcgcctgttgctgaaaaagaggtcagtagctacggtatcgtagattgtggcggagctgatttaaaaggtggcgaaagtacaaaaattcatagcattgttgagaaaccgagtttagacaaagccccttctaatttagcggtggttggacgttacgttttctcagcggcaatttgggacttgttggaaaaaactccgattggtgtcggcgatgaaattcaattaaccgatgcgattgatatgttaattgaaaaagaagtcgttgaagcgttccatatgacaggaaaatctttcgattgtggtgataaaattggttatatgcaagcgtttgtggagtatggattgcagcatgataaattaggtcagcaattcaaaacgtatttgcaacagctcgtcaaaagtttttaa

SEQ ID NO: 31059 - DNA, 318 bp, Pasteurella multocida
atggcaaattgggacggtaaatatattagcccttacgcagagcatggcaagaagagtgagcaagtcaaaaaaattacagtatcgattccgattaaagtattggaaattttaaccaatgaacggacacgcagacaaattcgtaatttacgtcatgcaacgaacagtgaattgctctgtgaagcctttttgcatgcctttaccggtcaaccgttgccaacggatgaagacttattaaaagagcgccatgacgaaattcctgagcaagcaaagcaagtgatgcgcgaattgggtatcgatccagaaaaatgggaatactaa

SEQ ID NO: 31060 - DNA, 537 bp, Pasteurella multocida
gtggtaaatatggaacagcaaagaattgaagtagttggcaaattaggctcaacttatggcattcgcggttggttacgtatttattcatcgacagaatatgctgaaagcatttttgattaccaaccttggtttttaaaaattaaagggcaatggcagcctacagagttagagagttggcgttaccacaataacgatttaatcgttaaattgaaacatgtggacgaccgagaaaccgcacaaactttagccaatattgaaattggcgttgatttggcggttttccctgagctagaagaaggggattattactggcatgatttaatcggctgtaatgtggttaaccttgaaaactatgcgatgggcacagtgaccgaaatgatggaaacaggatctaacgatgtattggttgtgcgtgcaaaaagcaaagatgcttttggaaaacaagagcggttaattccgtttttgtatgaacaagtagttaaaagagtagatctcaacacgaagacaattgtcgtggattgggacgctggtttctaa

SEQ ID NO: 31061 - DNA, 738 bp, Pasteurella multocida
atgttagttgggattattagtttgttccccgaaatgttcaaagccattacggaatttggggtcacaggtagagctgtcaaacagaatctcttacaggtgcgttgttggaatccccgtgattttacgcacgataagcataaaacagtggatgatcgcccttatggcggtggtccaggtatgctgatgatggtgcagcctttacgggatgcgattcaagcagcaaaagctgaagtaggagagggggcgaaagtgatttacctttcgccacaaggacgaaaactcgatcaagcaggcgtaaaagaactcgcacagcatcagaaattgattttactgtgtggacgttacgaaggcattgacgagcgattaatcgaaacagaagtggatgaagaatggtcagtcggtgattatgtactgactggcggtgaattgcctgctatgacattaattgatgcagtagcacgatttatcccaggtgtgcttggtaaacaagcctcagccgatgaagattcgtttgctgaaggcttgcttgattgtccacattatacgcgtcctgaagtgttagatggtttagctgtaccacctgtgctgatgtctggtaatcatgaagaaattcgtaaatggcgattgagacaatcgcttgagcgtacatggttaagacgccctgagctattagaaagcctagctctgactgacgaacaacgtaaactgttgaagcaaattaaagcagaacacagttaa

SEQ ID NO: 31062 - DNA, 351 bp, Pasteurella multocida
atgagtaacatcattaaacaacttgaacaagaacagttaaaacaaaacttaccgagcttccgccctggtgacacgttagaagtgaaagtatgggtagtagaagggagcaaacgtcgtctgcaagcattcgaaggcgtggttattgcaattcgtaaccgtggcttgcactctgcctttacattacgtaaagtgtctaacggtgtcggtgttgagcgtgttttccaaacacattcaccaatcgttgatagcatcactgtgaaacgtaaaggtgcggtacgtcaagcgaaactttactacttacgtgagcgttcaggtaaatctgctcgtatcaaagagcgtttgggcgattaa

SEQ ID NO: 31063 - DNA, 1152 bp, Pasteurella multocida
atgaaatcaaaaacttatgaaacgcatttcccgccattaagtgcagagcaattggcggaaaatcgcaagaaaaaagtcatctgtggcatgtctggcggggtggattcgtctgtttctgcgtttattttgcaacaacaaggctatcaagtagaaggcttgtttatgaagaactgggaagaagatgacgacactgattattgtacggcggcagccgatcttgccgatgcacaagcggtgtgcgataaactgggcatcaagttacataaaattaattttgccgcagaatattgggataatgtctttgagcattttttacaagaatacaaagccggacgtacgccgaatcctgatattttgtgcaacaaagaaattaaattcaaagcgtttttagactatgccgcggaagatttaggtgccgattatattgcaacggggcattatgtgcgtcgtggtgagaaagacgggcaatgccagcttttacgtggtttagataataataaagaccaaagttattttttatataccttgagcaaagatcaggtggcacagagcttattccctgtcggtgaaattgaaaagccgattgtacgtgctattgcggaagatttaggtctagccaccgcgaagaaaaaagattccacggggatttgtttcattggcgaacgcaaattcaaagattttttagctcgttatttacctgcccagccgggtgagattagaacggttgagggaaaagtggtggggcgccatgatggcttgatgtaccacacgttaggtcaacgtaaagggcttggcattggtggagtgaaaggcatgggcgaagatccgttctatgtagtagaaaaagatttggtgaataatgtgttagtcgtggcacaagggcatgataattctgctttattgtcttcgggcttaatcgccagccaattacattgggtagatcgtcaaccgattcgccagccagtccgttgcactgtcaaaacccgttatcgtcaagaggatattccctgcgagattcaaccgattaacgatgaaaccattcgagtggtgtttgatgaaccacaaattgctgtgacgccgggacaatctgcggttttctatcaaggtgagatctgtcttggtggtggggttattgaaacccaaatcaaatag

SEQ ID NO: 31064 - DNA, 1566 bp, Pasteurella multocida
atgtggaactcacgaatttctttcatcaaacatattaacttgaacaagttgttcaccttcatttacagttggtttctgctcacctgttcctatttctgtttatggggcgtggcagattatttgttacatgactcgcgcttagcctttctctttttgccttttgcattgcggcttggactttgtctgcatcttcgccccacattgtggttggctccactgttagccgaaatcagcgtgctcctgttggtttcttgggcagaacacagtgcagcttacttgcccttactcttattaagtgcggtcagttttcccatcgtgttatttagccaatcctattatcaaggcaaacaacgctccaaattacgcctacaaggcatactggcattgagtatcagcgtgctcaatggattggtgcttgtttgtttggatgcctcttttgcttacacgatgctagtcagttttactggtgcgttattgttgttgccgatgtgttatttattacaagatttcttatttacacggcaatggattccacttactgccagctttattcatcacccgatcgccctgcgcagcaaacacattgtggtttatacactgttattaatcttaaacattctgatccaaacctatctgcccgatgagtttaaccgctttagcctgttctttttagcgattccgattattttattagcctattattatggctggcagggcgccttactcggctcactaatcaatagtgtggcattaattgcttccacacagcacttctcccatttagatctgtctgatttactcctatctctgtgtgcacaaaccataacaggaatttttctaggactcgctattcaacatcaacgcgagctcaatcagcatttaggcatggagctcatgcgtaaccgcgctttaacacagcaattgatcagcagtgaagaaagcattcgccaagaaattgcccgtgaattacacgatcaaatcgggcaaaacattaccgccattcgcacccaagccagtattctgaaacggctcaatccacacccgcaagaacagaacaatgccaatatgatcgaacacttatcactcaatatttacgatacggtcaaaggactattaaaccgcctacgtcctcgtgtattagatgacttaccattaccacaagtcctccaaaatgtattagacgaattaggtttaacgcaacagcacatacactgtcagtttgactggcataatcctcaacaattgcacctcgatccgcgcttagaaatcaccctttaccgcctctaccaagaagccttaaacaacatcatcaagcatgcacaagccagtcaaattcacattgcgatccacattgatcagcaggtcatcttatcgattcaagataatggcaaaggctttgatattcatcagccagtgacaggattagggctacgtggtatgcaagaacgggttgccttactcggtggcgaatttcagctctcctcaagcacggcgaacatgcgttcctcttcaattcaacctttgacacaaggcacttcccttgtgatcactctccctcgattttaa

SEQ ID NO: 31065 - DNA, 672 bp, Pasteurella multocida
atggatgcaaagcaaattgcacagtttatcgatcatactgcgttaaccgcggagaaaacggaacaagatattattcaattatgtgatgaagccattacacatcagttttggtcagtttgtattaattctgcctatattccgttagccaaacaaaaattagctgggacgccagtcaaaatctgtactgtagtgggttttccattaggtgcaaatttaagcacggttaaggcctttgaaacgacagaagcgatcaaagccggggcagatgaaattgatatggtgattaatgtcggttggattaaatcaaataaatgggatgcggtagaaaaagatattgcgaccgtgttagctgcttgtgcaggaaaaccattaaaagtcattttagaaacgtgcttattaagtaaagacgaaattgtaaaagcatgtgaaatttgtaaaacgctcaatgtggcgtttgtcaaaacatcaactggtttcaatcgtggtggggcaacaaaggaagatgttgctttgatgaaacgaaccgtaggcgatattggagtcaaagcgtctggcggcgtgcgtgatacggagaccgcaatcgcgatgattaatgcgggggctagccgtatcggtgcaagtgcagggattgcgattatccatggtttacaggacgtaagcagtacctattaa

SEQ ID NO: 31066 - DNA, 726 bp, Pasteurella multocida
atgacattaatggaaggaaaaaaagtacctcaagtgacatttcatactcgtcagggcgatcaatgggtagatgtaaccagtgcggaattatttgataataaaactgttgtacttttctcattaccgggagcatttacacccacttgttcttccactcatttgcctcgctataatgaattagcttgtgaatttaaagcattaggggtagacagtatcatttgtatgtcagtgaatgatacgttcgtcatgaatgcgtggaaagcggatcaggaatgtgaaaatgtgattgtcattccggatggtaatggtgaatttaccgaaggtatggggatgctcgtcggtaaggaagatttaggctttggtaaacgctcttggcgttattcgatgttagtgcgcaatggtattgtggagaaaatgtttgttgagccacaagaacccggtgatccatttaaagtctctgatgcagacacgatgattaaatatcttaaaccagaatggcaagctaagccttctgtttcagtgatcactaaacctggttgcccatattgtgccaaagcaaaagcgttgttaaaagcgaaagactatacctttgaagaaattgtgttaggacgtgatgccagtacgatttctgttcgtgcgattacagggaaaacaagcgtacctcaagtctttatcggtggaaaatacatcggtggcagtgaagagttagaaaagtattttgcttaa

SEQ ID NO: 31067 - DNA, 375 bp, Pasteurella multocida
atggcaactatcaaccagctagtacgcaaaccgcgtgtgaaaaaggttgtaaaaagtaacgttcctgcattagaggcttgcccgcagaaacgtggtgtgtgcacccgtgtatacacaactacacctaaaaaaccgaactcagcattacgtaaagtatgccgtattcgcttaactaacggttacgaagtaacttcttatatcggcggtgaaggtcacaaccttcaagagcacagtgttgtgcttatccgtggcggtcgtgttaaagacttaccaggtgtgcgttatcacactgtacgcggtgcattagactgcgctggcgttaaagatcgtaaacaaggtcgttctaaatacggcgttaagcgtcctaaatcttaa

SEQ ID NO: 31068 - DNA, 471 bp, Pasteurella multocida
atgccacgtcgtcgtagtattgaaccacgcaagattcttccagatccaaaattcggatcagaattacttgctaaatttattaatgttttaatggtagatggtaaaaaatctatcgcagaaaaaatcgtttatagtgcattagacacattagcacaacgtacaggtaaagaagcgttagaagcttttgaagctgcgcttgataatgttcgtcctaccgttgaggtaaaatctcgccgtgtgggtggttctacttatcaagtacctgtagaagttcgtccagtacgtcgtaacgcattaggtatgcgttggattgttgacgcagcacgtaaacgtggtgataagtcaatggctttacgtttagctaacgaattatctgatgcatcagaaaataaaggtgcagcagtgaaaaaacgtgaagacgttcaccgtatggctgaagctaacaaagcgtttgcacattaccgttggtaa

SEQ ID NO: 31069 - DNA, 2103 bp, Pasteurella multocida
atggcacgtacaacccctattgaaagataccgtaacattggtatcagtgctcacattgacgcaggtaaaacaaccacttccgagcgtatcctattctatacaggtgtgagtcacaaacttggtgaggtgcacgatggtgcagctactatggactggatggagcaagaacaagagcgtggtatcacaatcacctctgcggcaacaaccgcattctggtctggtatgtctaaacaatatccacaacaccgtatcaacgtgattgatactccgggacacgttgacttcacgatcgaagttgagcgttcaatgcgtgtacttgacggtgcggtgatggtttactgtgcggtgggtggtgttcaaccacaatcagaaaccgtatggcgccaagcaaacaaataccaagttcctcgtgttgctttcgtaaacaaaatggaccgtactggtgctaacttcttacgtgtagttgaacaaattaaaactcgcttagggggtaactctgttcctttacaattaccaatcggttcagaagataatttcaaaggtgttgttgaccttgttaaaatgaaagcgattaactggaacgaagccgatcaaggtatgacatttacttatgaagagatcccagctgatatggttgatgcttgtgaagaatggcgtcaaaatttagttgagtcagctgcagaagcgtcagaagagttaatggaaaaataccttggcggtgaagaattaacagaagaagaaattaaagcaggtttacgtcaacgcgtattagccggtgaaattattcctgtatgctgtggttctgccttcaaaaataaaggtgttcaagctatgcttgatgcggtaatcgactatttaccagcaccaacagatatcccagcgatcaaagggattaatccagatgaaacagaaggtgagcgtcatgcaagtgatgatgaacctttctctgcacttgcgtttaaaatcgcaactgacccattcgtaggtaacttaacgttcttccgtgtttattctggtgtaattaattcaggtgatactgtattaaactctgtaaaagataaacgtgagcgttttggtcgtatcgtacagatgcacgcaaacaaacgtgaagaaatcaaagaagtacgtgcaggcgatatcgcagccgcaattggtttgaaagatgtaggtactggtgatacattatgtgcacaagatgcgccaattattcttgagcgcatggaattcccagagccagtaatttctgttgctgttgagccaaaaacgaaagcagaccaagaaaaaatgggtcttgcattaggtcgcttagcacaagaagacccttcattccgtgttcatactgatgaagagtcgggtgaaactattatctctggtatgggtgagttacacttagatattatcgttgaccgtatgcgtcgtgaattcaaagttgaagcgaacattggtaaaccacaagtatcttaccgtgaaactatccgtactcgcgttaatgatgttgaaggtaaacacgcaaaacaatctggtggtcgcggtcaatatggtcacgttgttatcgacttatatccgttagatccagaaggtccgggttatgaattcgtgaacgaaatcaaaggtggtgtgatccctggtgaatacatccctgcagtagataaaggtgttcaagaacaacttaaatcgggtccattagcgggttatccagtagtggatttaggtgttcgtttacacttcggttcataccatgatgttgactcatctgagcttgcgtttaaattagctgcatctttagcctttaaagctgcatttaataaagcaaacccagtgcttcttgagccaatcatgaaagtagaagttgaaacgccaccggactacgttggtgatgtaattggtgacttaagccgtcgtcgtgcgatggttaacggtcaagaagcaaatgaatttgttgtgaagatcaatgcagaagtaccactttcagagatgtttggttatgcaactgaccttcgttcacaaactcaaggtcgtgcttcatactcaatggaaccattgaaatatgcagaagcgccgaaaaacgttgctgatgcaatcattgaagctcgcaaaaaataa

SEQ ID NO: 31070 - DNA, 1185 bp, Pasteurella multocida
gtgtctaaagaaaaatttgaacgtacaaaaccgcacgtaaacgtgggtacaatcggccacgttgaccatggtaaaacaactttaaccgcagcaatcacaaccgtattagcaaaacactacggtggtgcagctcgtgcattcgaccaaatcgataacgcgccagaagaaaaagcgcgtggtatcaccatcaacacatcacacgttgaatacgatacaccaactcgtcactacgcacacgttgactgtccaggacacgcggactatgtgaaaaacatgattaccggtgcagctcaaatggacggtgctatcttagttgttgcggcaactgacggtcctatgccacaaacacgtgagcacatccttttaggtcgccaagtaggtgttccttacatcatcgtattcttaaacaaatgcgacatggtggatgatgaagaattattagaattagttgaaatggaagtgcgtgaacttctttctcaatatgatttcccaggtgatgatacaccaatcgtacgtggttcagcgttacaagcgttaaacggtgtagctgagtgggaagagaaaattcttgagttagccaaccacttagatacttacattccagagccacaacgtgcaatcgaccaaccgttccttcttccgattgaagacgtgttctcaatttctggtcgtggtacagtagtaacaggtcgtgttgagcgtggtatcatccgtacaggtgaagaggttgaaattgttggtattaaagcgacaacgaagaccacagtaacaggtgttgagatgttccgtaaattattagacgaaggtcgtgcgggtgagaacgttggtgctttattacgtggtactaaacgtgaagaaatcgaacgtggtcaagtgttagcgaaaccgggttcaatcacgccacacactgattttgaatcagaagtttacgtgttatcaaaagaggaaggtggtcgtcatacaccattcttcaaaggttaccgtccacagttctacttccgtacaacggacgtaacaggtacaatcgaattaccggaaggtgttgagatggtgatgcctggtgataacatcaagatgactgtaagtttgattcacccaatcgcgatggaccaaggtttacgctttgcgattcgtgaaggtggtcgtacagtaggtgcgggtgttgtagcgaaaattatcaaataa

SEQ ID NO: 31071 - DNA, 1800 bp, Pasteurella multocida
atgcattcaagtaaaccttatttttggggaagtgtgtttcttttgttcacgtttttaggtgcctatcttgcttcggcaatagatcgtgattttggtcgaattgaggtgagccatgtgagctttatgacagaagaaatgcaaccgatggtcgcgaagctatatcgtccagtttctgctacggcagacacaccgaagccaggacttttggcattgcatggctatcaaagtgataaagaagcaactagtacatttggtgcgttggagctggctaagcgcggttttgtggtgctagcgatcgatcattttggacatggctattctactaagctacccgcttcaaataaaaatatgagtggagcgaataatggttatcaatatttaaaaacgttgccgtttgtagataacacacggttaggtctctttggtcactctactggcgcgttaaatgcaattcgcgtggcaaaactcaatccagatcacaaagctgtcaatggattaagtagcaatggtggtgagatgacattgaataactacttattgacacaaggattgtacgaagaaattggtggctatcgtgaaagaaccttccctgtaaaaagtttgattcatcatcctaaccgcctgaaagcatttgggttaggcgaaaatgaaactttgcagtgggatcatacctatggtgactttaacaccggttctgcacgtcgtgcggcaatggtcgatggtacccatcttggggtgatgattgcttcccagagtaataaagaagccattctttggtttaatcaagcattgcaacatggcgaaaaaggtgcggattggattgatcctgaccaacagacctattggtataaagaacttacagggttatttgccttagcttgtgctttgcttgccacattatgttttgctagcggacttttaaaaacgacttattttggcgtgatgaatcaagcggtcacagaaaagacagcaatttcgagcaaacaatggtggggctttacgctgattaatattgtgctgacattactgctctatccgctatttacccagtggggcggtgcgaatgaaccgattgcagcgaaattgagttttatgccacttgaaatgggaaatggcattattttatggctcgttgtgagtgggcttgtcggtagtcttttatttggcttgtggcaaagaaaagcacagttttgttgggcggagtttggtgtgttgagccaatctgcttccttgacaacggcgcaactgattggacgttatttattactcagcttattgttatttgccggtttatatttccttgtcaatctgatttatcaatatttccatgttgagttacgtttcttatggccattattgaagccattaacgacagagcggtttaatttatttatcgtgtattggttacctattttggtctttttcttcgtgttcaacggtttgatcgtgtcagtccaaatgaaacaaaaagtagcgagttcgtttacggcaacattgctgatctggagtttcaaaaccgcactttttgctactggtggtttaatcattttatggttattccattttgttcccggttttatgcaaatcggtccgggatttgatgtggtaggactgccacaatttggtggacgttggatgatgatgttagccgtcattattccacagtttattgtcttcaccgtgatcaatcactggtgctatttaaaaacaggctatatttatttaggggtatttttcacctctctgttaatgacttgggtgttagtcggaggtcaagtcattgggcgattcttagcctaa

SEQ ID NO: 31072 - DNA, 633 bp, Pasteurella multocida
atgacagaactcgaacaaaaaaaagaaatggtgaatcttgcgcgctcattatttgaacgaggctatagtgtggggggcgcaggaaatttgtctgtacgtttagatgagaaacgtattttagtcacgccaacgggctcttctttggggcgtttagaggcggacagtctctctgtattggatatggaaggcaacttgttatcgggtaagaagccctctaaggagtctgtctttcatttggcgatgtatcaccaaaatccggcatgtcatgccattgttcatttacattcaacttatctcactgccctttcgtgtttagaggggctcaatccagataatgcgatgaaagcattcacaccctactatgtgatgcgtgtcggcaagcttccggtgattccttattatcgccccggtgatacgaatattgcgcgtgaactgagtgaacgcgcattactgagcaaagcgtttttattggccaatcacggtgtggttgtaacgggaaccgatttggttgatgccgtggacaataccgaagaattagaggaaaccgcaaaattgtatttcctcttaaaaggccaacaagttcgttatctgaccgatgacgaagtgaaagatctcgaaaagaggggaaaatag

SEQ ID NO: 31073 - DNA, 1716 bp, Pasteurella multocida
atgcgtacaagtcaatatttattctcaaccttaaaagaaacgcctgctgaggcgagtattgttagccatcaattaatgttacgtgcgggtatgattcgtccgttagcatcggggctctatacttggttgccgaccgggttgcgtgtcttaaataaagtagaaaagattatccgtgaagaaatggataaaagcggtgcgttagaagtgaaaatggcggtcacgcaaccagcagaattatggcaagagtctggtcgttgggaagaatatggtcctgagttattgcgctttaaagatcgtggcgagcgtgattttgtgattggaccaaccaatgaagaagtgattaccgatttagtgcgccgtgaattgagttcttataagcagttaccattgaatttatatcatattcaaaccaaattccgtgatgaagttcgtccgcgtttcggcgtaatgcgttcgcgtgagtttgtgatgaaagatgcatactctttccatactactcatgagtgtttgcaaaaaacctatgatgtgatgtatgaaacctattcgaatatttttaaccgcttagggttagattttcgcgcagtgcaagcggatacaggttcaattggtgggagtgcatctcatgaattccaagtgctagcacaaagtggtgaagatgatgtggtgttttccaccgagtcagattttgccgcaaacattgaacttgccgaagcggtggcattaggtgaacgtggtgcggcaacagaagaattacgtgtagtcgatacgcctaatgcaaaaaccattgcggaattggtagaacaattcaatcaaccgattgaaaaaaccgtcaaaaccttagtcgtccacgcgacggaagaaagtggtcataaattggtagcattgttagtgcgtggtgatcacgagttaaacgaaattaaagcggaaaaagtcgatatcgtggcaagcccgttacaattcgccacagacgaagaaatccgtgcggtggtgggcgctggtacgggttcactgggtccgattaatttaccaatgccgatagtgattgatcgcaccgtcgccaatatggataacttctcagccggtgcaaatcaagatggtaagcattattttggtattaactgggaacgtgatttacctgtgccacacattgccgatttgcgtaatgtagtggaaggcgatccaagtccagatggtaaaggtgtgctacaaattaaacgtggtatcgaggttgggcatattttccaattaggcaccaaatattctgcggcaatgaacgccactgtacaaggtgaagatggtcgcccgcaaactatgattatgggctgttatgggattggtgttactcgtgtgattgcggctgcgattgaacagcatcatgatgagcgtggcattatttggccagacaatattgccccattcaaagtggcgattgtgccgatgaatatgcataaatccgaaagcgtgcaacaatttgcggaagaattataccgcactttaactgcacagggcgtggaagtgatttttgatgatcgtaaagagcgtcccggtgtgatgtttgcggatatggaattgatcggcgtgccacacatgattgtgattggtgagaaaaatctcgagaaaggtgaaattgaatataaatatcgtcgctctggtgaaaaagaaatgattgccaaagatcaattattagatgtcttaaaggcgaaattcgccagctaa

SEQ ID NO: 31074 - DNA, 1470 bp, Pasteurella multocida
atgtatatcggcattgattgtggtacacaaggtactaaagtcatcgtggtagatagccagcagagacaggtgattggtgtgggctatgcgccgcatgcgatcattgaaaatagtgaaggtcgccgtgaacaacagcctcaatggtggacggacgccttagtcagtgcatatcaacaagcgataaaactcgcccaaatcgaaccgcacttgattaaagggattggagtctcggggcaacagcatggtttggtgctgttagatgacaatgatcaaccgttatacaatgcaaaactttggtgtgataccgaaactgcggctgaaaatgcggaatttatccgattgttgggcggtcaagaaaaagcgttctcacagttaggtatcatgccccaaacaggctataccgcctcaaaaattttatggtttagaaagcagtatcctgaacaatatcgtcgtatagccaaaatcatgctcccacatgattatttgaattattggctaacgggacatttttgtatggaatatggtgatgcctcagggacaggttattttgatgtggtgcaacgtcagtggcatctcgaggcgtttaaattactggcgccagaattagacccacatcaagttttaccgctattacgttctgcccaacaaaagattggtaaggtacgtgctgaaattgccgccctattaggcttatcagaaaatgttattgtgtccacgggtggtggcgataatatgatgggggcgattgggacgggcaatattcagcaaggtattgtaacgatgagtttaggcacctcaggcacactctatgcctataccgataaaccactcacggatttaccgatggaaattgccaacttctgttcaagtacagacggttggttaccgttggtttgtgtgatgaacatgacctctgccaataaaaatctgatggatttattacagattgatgtggctaaatttaacgaactcattcaacaaagctcaattggtgcagagggtatcaccattctgcctttcttcaacggtgagcgtgtgcctccgctaccccaagcgaaagccagtatcttaggtttagatgctgctaattttacccaaccgaatttatgccgagcgatgatggaagctgccagttttactttacgttacggcttagatttattccgtcaagccggcttatcgacctcacaaatccgtttaattggtgggggagcgaaaagtgcggtatggcgtcaaatgattgcggatatcatgaataccgaagtggtttgtttgaaagaagacgaagccgctgcactcggtggcgcaatccaagccatgtgggcgaatggtgaaggggatttagctgatttatgtcacgcctttgtgcatcttgatacgacatctcttgtacaacctaatccaaaaagtgcggtggaatatgagcgagtttatcagcgttatttagtacttttacaacaacattattaa

SEQ ID NO: 31075 - DNA, 885 bp, Pasteurella multocida
atgggattattgaacttaaagtcaatgctttccatcgcaaatcaacatcaatttgcggtcggggcatttaatgcgattgactcaaattttattgatgcagtgtttactgcagcacaacaaaatcagtcaccggtaattattaatgtggctgaagtgcatttaacgtatattgatttagaatccactgctgaatatatcaagaaaaaagctatgttagcaggcgttcccgtgtgcttaaatttagatcatggattgacgttttccaccgttgagcgtgcaattaaatgtggtttttcttccattatgtttgatggttcctcacttacttacgcagaaaatattgcgcaaactcgtaaagtcgtcgaactttgtcaaaattatggcatttctgttgaaggtgaacttggtgcagtggggggagatgaacatggcgcgttagaaagttgtgctgatgtggcgctttataccaatgttgaacaggctgtggagtttgtgcgcgaaacaggtattgatgccctcgctgttgcgattgggaatacccatggtaaatataaaggtgtacctaagttagattttgaacgtctggcgcaaattcaccaagcggtatctgttccgttagtcttacatggtggatcaggattaagtgctgacgatttccgcaaaacgattcaacgtggcatttgcaaaattaatttctttacaggcatgtcacaagcggcgttacagtcacttgaaaaagatatgcaacacgccgatctcgaaacaaaatatcattattacctcattatgatgaaccgtatgcaacaggcgatttctgacacggttgcagaacagatgaatatctttaacagcattaataaggcgcatttatatgcaacaacgtaa

SEQ ID NO: 31076 - DNA, 2589 bp, Pasteurella multocida
atgaaacgtttttttaccagcgccttcttgccaaaaccctacagtgttcgctttcggctcgtgatctttttaatcacagccattttcctgatcatttttattagtggcaccgccattattggcttaaatagcacttataacgccttatccaacctgcgtgatagttcattaaaccagatgttttcctcaatgaccttaggggtaaaaactgcacaaatttctacttatgcaaaacgccttactcaaacaacacgcgctttagagtatcaagaagaatccaaaaccttggcacatcatgctgaacaattacaaatgctcttaactcaagcgaagcaatctacaccagaggaccaacgctttgccaatatcatctatcacattgatttactgggaaaaagtgtacaagacttgctattacaaactcaccaacgtcatattcttaacaccacaatcattagtgaattaaaccaagggttgctccacattcagcatattaaaagactggaaaaaaataccgcactgccagaacagatccctgccacttttttatcgcagcttaaccgtatggaaaaattaattgaagatgccaccaaaagtaatttttcgacggggatttttatcagcattgagtccaattttttactcttccctgcagttgattacttaaccgacattaaccaagaactggataagctcaaagcccttttcccacagttgattgacaatgctaaagcccttgaaaagatcaatttacgcgtgcaattcctcaccttccagattgatgctttggtgcaacaaattagccaacaatatacacaattggcgaaagaaaaagtggacagcgtggatattgattcagaacaaattcaacaacgattatccacacttactttgtctattttgctcttttcgttatttacgattttattgattattattctaggacaatacatttattccttgatcggcaaacgcttatattccattactgatgcgttaaaacgcttatcacaaggcgataaaaacgtgacggtaccgcaacaacaaacccaagatgaaattggcgatttagcacggacctttgatatttttcaccaaaatgtgctgaccttagagcaaactgactcattattaaaagaaaagagtgaattattagagcacacgtttttagccatgcgcgacggtctcgccatttttgaccaacaacttaacttagtgtcttacaacgcacaatttaacacactactaggtgacttttttacgcatacctccccattaagcttacacacactggtggattactttaatcataaacacgctaaggtaagcggctgggaacaaccaattgatctcgccttactgaaacaaattcggcaagcggaagatttccttgaaattgaatattcacagcaagtactggaatggcgggttagtccattaaaagatggactagtcatctttttaattgatcgtacacaacgcaaaaaattagaaaacgaaattgcgcacagtcaaaaaatgcgagccatcggtcacctcaccggtgggattgcgcatgatttcaataatttcttagctgtgattattggtaatttggatttaattgatccgcatgggcttgatgaacgccaagtcaaacgtctacagcgtgccttgaaagcagcagaaaatagcgcaacgctgacacaacgcttgttagcctatgcgcgaaaacaaccgttacaccctacagctttagatattaatcaactggtgattgagtttaatgatttgattaaacacaccattcccccaacgattaatgtacaactcgaattgggcgaacatttgcctttagtctatattgataaaaaccagctcgaaaccgctttagtgaatttaattgtcaatgcgaaagatgcactcaatcacgaaggtaatatcatcattcgcagcacacaattaacagtacagcgtgctcattgccaagaggagatggtgcaactctcaatcattgatgacggttgtgggatggatgagcaaacacaaaaacgggtatttgaaccattcttcaccactaaacaaaatggtcgcggaagtggcttgggcttatccatggtctatggttttatccgccaatcgaaaggacgtgtactgattgagtcccaacctgatcaaggtaccgctattcatttgcaattgccaatcgcacaacaaatacaagatgtatcagcgttgacatcccaacctcgtctgagctgtgatacagcataccagattctagtagtggaagataaagccagtgtacgcgagaccctgtcagaacaattacatgaaatgggctaccaacccgttttatgtgagtcaggtgaacaagcccttgccttattagaacaaggactaacgattgactatttactctctgatattatgttatccggcaaattaaccggggtagatgtcgcaaaatgggtaaaaacacacttaccgcaagtgaagatcctgttgatgacagggcacactgagcaaagagaaaaagcagaacaattcccagtccttgtcaaaccctttaaacaaatagaattgcagcagaaactcaccgcactttga

SEQ ID NO: 31077 - DNA, 921 bp, Pasteurella multocida
atgtacaatacgttaaacaataaagaagatatttcattagtttcaaataattttggttttctacgcttgcctgttcactttaatcccgtcgaaacggatgcagagtgggttattactggcgtaccgtttgatgcgtcagtatcgggtcgcgcaggaacgcgttttggtgcggaagccattcgtcgcgcgtcggtgaatttggcttgggaacactgtcgctttccatgggattttgatgtgcgtgagcgtttaaagatcgtggattgtggcgatttggtttattcattcggtgataatcaaaatttcgtagaagaattagaagcgcacgcaaccgctttattaaaagcgggtaagcgttgcttaacttttggtggcgatcatttcattaccttgcctttattacgtgcccatgcaaaacattttggtaagttggcgatgattcactttgatgcccatacggatacctatgaaaatggcagtcgttatgatcacggtaccatgttttaccatgcgccaaacgaagggttaattgatgcagcccattcggtacaaattggtattcgtactgaatttgatcgcaacttaccatttacggtactttctgcgccacaagtcaacgaggagagcgtggcacaaactgttgctaaaatcaaagaggtaattggtgatttacctgtctatttaacctttgatatcgattgtttagatcctgcttatgcaccgggtaccggtacgccagtctgtggtggattaagcacagacagagcattgaaaattttacgtgccttgaaagatgtgaatattgtgggtatggatttggttgaagtctctcctgcctatgatcaatcggacattactgctttagcaggtgcgacgttggcgctagaaatgctgtatatgcaaggggcgaaaaaaggctaa

SEQ ID NO: 31078 - DNA, 645 bp, Pasteurella multocida
atgaatcagtctattttatctccttttggtcagtcagaagaacgtgctattgctgcgattaatgcgtttaaacagggaaacggtgttttagttcttgatgatgaagatcgtgaaaacgaaggtgatctcatttttcctgctgaaaccattacagtagaacaaatgacaatgttaattcgttatggcagtggtatcgtttgtttatgtttaagcgatgaaatttgccaacaacttgatttgccaccgatggttactgaaaataccagtgtgaataagacggcctttacggtgacgattgaggcagctaaaggtgtatcgacaggcgtatccgccacggatcgtgtgacaactattcgtgctgccgttgccgataatgccaaaccaagcgatttaagccgtccgggacatatttttccattacgtgcgatgacaggtggcgtgttaaaacgccgtgggcatactgaagcatcagttgatcttgctcgtttagctggttataaagccgctggtgtgatttgtgaaattaccaatgatgatggttcaatggctcgtgcaccagaaattgttacgtttgctcagaaatttggttttccagtcgttacgattgaagatttagtggcttatcgtcaaaagtatgatgtgtaa

SEQ ID NO: 31079 - DNA, 390 bp, Pasteurella multocida
atgcgccatcgtaagagtggtcgtcaactaaaccgtaatagcagccatcgccaagcgatgttccgtaatatggcaagctctttagttagtcacgaaattatcaagactacgttgccaaaagctaaagaattacgtcgtgtagttgagccgttaattacattagcaaaagtagatagcgttgcaaatcgtcgtttagcttttgctcgtactcgcaacattgaaactgttgctaaattattcaatgaattaggtccacgttttgctcaacgtgcaggtggttacactcgcatcttgaaatgtggtttccgtactggtgataacgcgccaatggcatacattgagttagttgatcgcccagaagttgcagctgaagaagcaactgcggagtaa

SEQ ID NO: 31080 - DNA, 990 bp, Pasteurella multocida
atgcagggttctgttacagaatttttaaagccacgcttagttgatattgagcaaattagctcaactcatgctaaagtgatcttagaaccgttagagcgtggattcggccacactttaggtaatgcattgcgtcgtattcttctatcttcaatgccaggttgtgctgtaactgaagtagaaattgatggcgtattgcacgaatacagcagtaaagaaggggttcaggaagatattcttgaagtacttctaaacttaaaaggcctagcggttaaagttcagaataaagatgatgtatttctgacattaaacaaatctggaattggccctgttgttgcagctgacatcacccatgatggagatgttgagatcgtaaatcctgagcacgttatctgtcatttgactgacgaaagcgcatcaattaatatgcgcattcgcgttcaacgtggtagaggttatgtacccgcatcagcgcgtgtgcatgctcaagatgaagaaagaccaattggtcgtctattagtagatgcttgttacagtccagtagaccgtattgcttacaatgttgaagcagcacgtgttgaacaacgtactgacttagataaattagttattgagttggaaactaacggcactattgatccagaagaagcaattcgtcgtgcagcaacaattttagcagagcaactagatgcgttcgttgatttgcgtgatgttcgtcaaccagaagttaaggaagaaaaaccagaattcgatccaattctgttgcgtcctgttgatgacttagagttgacagttcgttctgctaactgtttgaaagcagaaacaattcactatatcggtgatttagtacagcgtactgaagttgaattattaaaaacacctaatcttggtaagaaatcacttactgaaattaaggacgttcttgcttcacgcggcttatcactaggtatgcgccttgaaaattggccaccagcaagtattgctgaagactag

SEQ ID NO: 31081 - DNA, 621 bp, Pasteurella multocida
atggcaagatatttgggtcctaagctcaagctaagccgtcgtgaaggcactgacttattccttaagtcaggtgtgcgcgcgattgaatcaaaatgtaaaattgataccgccccaggtcaacacggtgctcgtaagccgcgtttatctgactatggtagtcaattacgtgaaaaacaaaaagttcgtcgtatttacggtatcttagaacgtcaattccgtaattattataaagaagcaaaccgcttaaaaggtaatactggtgaaaacttactagtattattggaaggtagattggataacgttgtttatcgcatgggctttgctgcaactcgtgctgaagctcgccaattggtgagtcacaaagcgattgttgtaaatggtcgtgttgttaatatcccatcattccaagtttcagttaatgatgtagttgctgttcgtgagaaatctaaaaaacaagcacgtattaaagcatcattagaattagcagaacaaagagaaaaaccaacttggttagaagttgatgctgctaaaatggaaggtgtgttcaaacgtgttcctgaacgttctgatttatcagcagacattaacgaacatctgatcgttgagctttactctaaataa

SEQ ID NO: 31082 - DNA, 390 bp, Pasteurella multocida
atggctaaaacaccagttcgtgcacgtaaacgtgtaaaaaaacaagttgtagatggcgtagcacatatccacgcatctttcaataatacaatcgttactattactgaccgccaaggcaatgctctcgcgtgggcaacagcaggtggttcaggtttccgtggttctcgtaaatctaccccgtttgcggcgcaggttgctgctgaacgttgtgctgaagttgtcaaagaattcggcttaaagaacttggaagttatggtgaaaggacctggtcctggtcgtgagtctactattcgtgcgttaaacgcagcgggtttccgtattacgaatattactgatgtgactccgattcctcataacggttgtcgtccaccgaaaaaacgtcgtgtttaa

SEQ ID NO: 31083 - DNA, 357 bp, Pasteurella multocida
gtggcccgtattgcaggcattaacattcctgatcataaacacactgtaatcgctttaactgcaatttatggtatcggtaagactcgcgcacaagcgatttgtgctgcaacagggattgccgaagatgttaagatcagcgaattgtctgaagagcagattgataaactgcgtgacgaagttggtaaatttaccgttgaaggtgacttacgtcgtgaagtaacactaaacatcaaacgtctattagacttaggttgttatcgtggtttacgtcatcgtcgtggtttaccggtacgtggtcaacgtactaaaactaatgcgcgtacccgtaagggtcctcgtaagccgatcaagaaataa

SEQ ID NO: 31084 - DNA, 114 bp, Pasteurella multocida
atgaaagttcgtgcttccgtgaagaaattatgtcgtaactgtaaaattgttaaacgtgaaggtgtcgttcgtgtactttgtagcgaccctaaacataaacaacgtcaaggttag

SEQ ID NO: 31085 - DNA, 1326 bp, Pasteurella multocida
atggctaagcaaccaggttatcaaagtagaagtactcaaagcggtacaggtgaacttaaaagcagattgttatttgtattaggcgcacttattgtgttccgcattggttctttcattccggttcctggtattgatgcggccgtgttagctcaattagttgaacaacaaaaaggcaccatcattgatatgtttaacatgttctctggtggtgcattgagtcgtgcgtcaatttttgcgttaggtattatgccatatatctcggcatcgattatcatccaactattgactacggttcatcctgcacttgcagaattaaaaaaagagggtgaggctggtcgtcgtaaaatcagcaaatacacgcgttattcaacgttagtccttgcgacattacaggcggttggtatttcaacaggcttacctaatatgctacctggacttgtccctaacgtaggatttagtttttatcttgctgcagttattagcttggtcacaggaacaatgttcttaatgtggttaggtgagcaaataacagaacgtggtattggtaatggtatctctttaattatttttgcgggtattgttgcagggttaccatccgcgattggtcaaacgattgagcaaactcgccaaggtcaaatgcatctattagttctcttattgatcgccgttattgtatttgctgtaacctactttgttgtctttgttgaaagaggacaaagaagaattaaagttgaatatgctaagcgtcagcaaggtcgtcagattttaggtggacactcaacgcacttaccattaaaagtcaatatggcaggcgttattccagcaattttcgcatcaagtattattttattccctgcgacattagcgcagtggcttggtgagggatcgagcttagaatggttaacagatttatcaatgttattgcatccaggtcaaccactctatttgcttgtttatgccgtagcgatcatcttctttagttttttctataccgcaatgcaatataatcctcgtgatacagcggataatttgaaaaaatctggtgcatttataccaggaattagaccaggtgaacaaacatcacgttatattgacaaaattatgactcgcttaaccttaattggtggcttgtatattacgttcgtatgtttggttccttacgtgatgacatcagcatggaatgtacagttctactttggtggaacctctcttctgattgttgtcgtagtaattatggatttcatcgctcaggttcaaagtcatttgatgtcgacgaaatatgaatctgcgctgaagaaagcaaaccttaaaggtttcggacagtaa

SEQ ID NO: 31086 - DNA, 435 bp, Pasteurella multocida
atgcgtttaaatactctatcaccagctgaaggcgctaagcatagtgctaaacgtttaggtcgcggtattggttctggtttaggtaaaacaggtggtcgtggtcacaaaggtcaaaaatctcgtactggcggcggtgttcgtcgtggtttcgagggtggtcagatgcctttatatcgtcgtttaccaaaatttggttttacttcaatgaaagctgcagtaactgcagaagttcgtttgaatgatttagccaaagtagaaggtggcgtagtaactttagaatcattaaaagcagcgaatgtcatcaccaaagatattcaatttgttaaaatcattttagcaggtgaagtgaaaggtgcagtggttgttcgtggtttacgcgtaactaaaggtgcgaaagcagcaattgaagctgctggcggttcagttgaggaataa

SEQ ID NO: 31087 - DNA, 180 bp, Pasteurella multocida
atggctaaaactattaaagtaactcaagttcgtagttctattgctcgtttaccgaagcataaggctacattgcgtggtcttggtcttcgccatatgcatcatactgttgagttaatcgatactccagcagtacgtggtatgattaaccaagtttcatacatggttaaagtggaggagtaa

SEQ ID NO: 31088 - DNA, 501 bp, Pasteurella multocida
atggcaaacatcgaaaaacaagctggtgaactgcaagagaagctaatcgcggtaaaccgtgtatcaaaaactgttaaaggtggtcgtattatgagctttactgcattaactgtagtaggtgatggtaacggtcgcgtaggttttggttatggtaaagcgcgcgaagttccggcagcgatccaaaaagcgatggaaaaagcacgtcgcaatatgatcaatgtagctttaaatgaaggtacattacaacatccaattaaaggggctcatacgggttctcgcgtatttatgcaaccagctagtgaaggtacaggtatcatcgcgggcggtgcaatgcgtgcagtattagaagtcgcgggtgttcgtaacgttctttctaaagcttatggttcaaccaacccaattaacgttgttcgtgcaactattgatgcactagcaaatatgaaatcaccagaaatggttgctgcaaaacgtggcaaaaccgttgatgaaatcttggggtaa

SEQ ID NO: 31089 - DNA, 354 bp, Pasteurella multocida
atggataagaaatcagctcgtatccgtcgtgcagctcgtgcacgtcatatgatgagagagcaaggtgtaacgcgtttagttattcaccgtactccacgtcatatctacgcacaagtgattgcaccgaacggttcagaagttcttgccgctgcttcaactgttgaaaaagtaattagtgagcaagtgaaatataccggaaataaagatgcagcagcagtagttggtaaagttgttgcagaaagagcattagcaaaaggcgttaaagacgttgcttttgatcgttctggttttaaatatcatggtcgtgtccaaacgttagcggacgctgcccgtgaagctggtctacagttctaa

SEQ ID NO: 31090 - DNA, 534 bp, Pasteurella multocida
atgtctcgtgttgcaaaagcacctgttagtattcctgccggcgttgaggtaaaacttgacggacagctactaacagttaaaggaaaaaatggtgagttatctcgtaccattcataacgcagtcgaagttaaacaagataataacgaattaactttttctccacgtgaaggtattgttggagcagatgcgcaagcaggaactgcacgtgcattagttaacgcaatggttatcggtgttactgaaggcttcactaagaagttacaattggtgggtgtaggttacagagcacaaattaaaggcaatgcagttgctttaagcttaggcttctctcaccctgtggagcacgctttaccagcaggtattacagctgaatgtccatctcaaaccgaaatcgtgttgaaaggtgcagacaagcagttaatcggtcaagttgctgcagatattcgtgcttatcgccgtcctgagccttataaaggtaaaggggtacgttacgctgatgaagtggtacgtatcaaagaggctaagaaaaaataa

SEQ ID NO: 31091 - DNA, 393 bp, Pasteurella multocida
atgagtatgcaagatccaatcgcagatatgttgactcgcattcgcaacggtcaagctgcgaacaaagttgcgatcagtatgccttcatccaagctaaaagtggcgattgccaatgtattagctgaagaaggttatattgaaagcgttaaagttttagatggtgttaaaccagagttggaaattacattaaaatatttccaaggcaaaccagttgtagaaagcatccaacgtgttagccgcccaggtctacgtatttataaacgtaaagacgagttaccaaaagtaatgggtggtttaggtgttgcagtagtatctacatctaaaggtgtgatgactgaccgtgcagctcgccaagcgggtttaggcggtgagattatctgttacgtagcttaa

SEQ ID NO: 31092 - DNA, 306 bp, Pasteurella multocida
atggctaaacaatcaatgaaagcacgtgatgtaaaacgtgtgaaactcgctgaaaaattctacgcaaaacgcgctgaattaaaacagatcatttctgatgtaaatgcctctgacgaagaccgttggaatgctgtgttaaagctacaaactttaccacgtgattctagcccaagccgtcagcgtaaccgttgccgccaaactggacgcccacatggtgtgcttcgtaagtttggtttaagccgtattaaggtgcgtgaagctgcgatgcgcggtgaaatcccaggccttaagaaagctagttggtaa

SEQ ID NO: 31093 - DNA, 540 bp, Pasteurella multocida
atggcgaaactgcatgattactacagagatcaagtagttaatgaattgaaagataaattcaactacaaatctgtcatgcaagtcccacgaatcgaaaagataaccctaaatatgggtgtgggtgaagcattgaccgataagaaattgctagataatgcagtagcagatttagcagcgattagcggtcagaaacctttgattacaaaagcacgcaaatctgttgcaggctttaaaatccgtcagggatatccaatcggttgtaaagtaacactacgcggtgagcgtatgtgggagttctttgaacgtttaattacaattgctgttccacgtatccgtgacttccgcggtttaagcgcgaaatcattcgatggtcgtggcaattacagcatgggtgtgcgtgagcaaatcatcttccctgaaatcgattatgataaagtggatcgtgtacgtggtttagatattactatcaccacgactgcgaaaagtgatgaagaaggtcaagcactacttgctgcctttaatttcccattccgtaaataa

SEQ ID NO: 31094 - DNA, 312 bp, Pasteurella multocida
atggctgcaaaaattcgtcaaaacgatgaagtaatcgtgcttgctggcaaaagcaaaggcaagcgtggtaaggtaactcaagtgttaccaaatggtaaagtgattgttgaaggtgtaaatatcatcactaaacatgaaaaaccggttcctgcgttaggcaaagaaggtggtttagtgaagaaagaagcggcaattgatgtatcaaatgttgctatttttaacccaaaaacaaataaagctgaccgtgtaggttttagatttgaagacggcaaaaaagtccgattctttaaatctaacaatgaaatcatttaa

SEQ ID NO: 31095 - DNA, 372 bp, Pasteurella multocida
atgatccaagaacagactatgctggacgttgctgataactcaggcgctcgcagtgtaatgtgtatcaaggttctaggtggatcgcaccgtcgttacgctgctattggtgatatcatcaaaattactgtgaaagaagcaattccacgcggtaaagtgaaaaaaggtgatgtattaaaagcagttgttgtgcgcaccaagaagggtgttcgtcgcccagatggatcagtcattcgcttcgatggtaatgcatgtgtcattttaaacaataacacagagcaaccaatcggtactcgtatttttggaccggtgactcgtgaacttcgttcagagaagtttatgaaaatcatctctttggcgccagaagtactgtaa

SEQ ID NO: 31096 - DNA, 258 bp, Pasteurella multocida
atgactgataaaattcgtagcgtgcaaggtaaagttgttagtgacaaaatggacaaatcgttcgttgttgctattgaacgcaaggttaaacacccactttacggtaagtttatccgtcgcacaacgaaattacatgtgcatgacgagaacaacgaagctaaattaggtgatatcgttgaaattaaagagtgtcgtccactctctaaaacgaaatcatggactttagttcgtgtagttgaaaaagcagtagttgcttaa

SEQ ID NO: 31097 - DNA, 192 bp, Pasteurella multocida
atgaaagctcaagaactacgtacaaaaagtgttgaagagctgaatgctgaattggttaacttgttaggtgagcaattcaagttgcgtatgcaagcagccaccggtcagcttcaacaaacccatcagttaaaacaagtgcgtcgtagtattgcacaagtaaaaactgtgttaaccgaaaaggcgggtgagtaa

SEQ ID NO: 31098 - DNA, 411 bp, Pasteurella multocida
atgttgcaaccaaaacgtacaaaattccgcaaagtccacaaaggtcgtaaccgtggtattgcagcaggtacagaagtaagcttcggtaccttcggtttgaaagcagttggccgtggtcgtttaacagctcgccaaattgaggcagcacgtcgtgcgatgactcgtgcagttaaacgtcaaggtaaaatctggatccgtgtattcccagataaaccaattactgagaaaccattagaagtccgtatgggtaaaggtaaaggtaacgttgagtactgggtagccttaatccaaccgggtaaagtactatatgaaatggatggtgtgtctgaagagatcgcaagaaatgcatttgcattagcagctgctaaattgccaattaagaccactttcgtaactaagacggtgatgtaa

SEQ ID NO: 31099 - DNA, 708 bp, Pasteurella multocida
atgggtcaaaaagtacatccacatggtattcgcctaggtattgttaagccttggagctctacttggtttgcgaatacacaagatttcgctgataatttagacggcgacttcaaagtacgtaaattcttgaataaagaattagcgaatgcttccgtttcacgcatcactattgagcgtccagcgaaaagcatccgtgttacaattcacacagctcgtccaggtatcgttatcggtaagaaaggcgaagatgttgaaaaattacgtaacgcagttgcggctatcgcaggcgttccagctcaaatcaacattgctgaagtgaaaaaacctgaattagatgcaaaattagttgcagacagcatcgcttctcaattagaacgtcgtgtaatgttccgtcgtgctatgaaacgtgcagtacaaaacgcaatgcgtttaggtgctaagggtatcaaagttgaagtaagcggtcgtttaggtggtgcagaaattgcacgttcagaatggtatcgtgaaggtcgtgtacctctacatacattacgtgcggacatcgactataacactgctgaagcacatactacatacggtgtaatcggtattaaagtatggatcttcaaaggtgaaatcctcggtggaatggctgcaattgcgcaaccagaacaacaacctgctgacaagcctaaaaaggctccacgcggcaaaggtcgtaagtaa

SEQ ID NO: 31100 - DNA, 333 bp, Pasteurella multocida
atggaaactattgcaaaacatcgttacgctcgcacttcagcgcaaaaagctcgcttagttgcggatttaatccgtggtaagaaagttgcggcagcattagaaatcttgacttttactaacaaaaaagcagcagctttagtgaaaaaagttcttgaatcagcaattgctaacgcagagcacaatgacggtgcagatatcgatgatcttaaagtagcgaagattttcgtagatgaaggtcctagcatgaaacgtgttatgccacgtgctaaaggtcgtgcagatcgtattttaaaacgtactagccacattactgtggttgtgtcagatcgttaa

SEQ ID NO: 31101 - DNA, 276 bp, Pasteurella multocida
atgccacgttctctcaagaagggtcctttccttgacctacacttgttgaagaaggtagagaaggcggtggaaagcggggataaaaaaccaattaaaacttggtcccgtcgttcaatgatcattccgtcaatgatcggattgaccatcgcagtccataatggtcgtcagcacgttcctgtttatgtatctgatgaaatgatcggtcataaattaggtgaatttgcaccgactcgtacttaccgcggtcacgctgcggataagaaagctaagaagtaa

SEQ ID NO: 31102 - DNA, 822 bp, Pasteurella multocida
atggctatcgttaaatgtaagccgacctccgctggtcgtcgtcacgttgttaaaatcgtgaaccctgaattacacaagggtaaaccttacgcaccacttttagatacaaaatctaaaaccggtggtcgtaacaatttcggacgtattactactcgccatattggtggtggtcataaacaacattaccgtttaatcgatttcaaacgtaacaagttagatattccagcggttgttgagcgtctagaatatgaccctaaccgttctgcaaatattgctttagtgctttataaagatggcgaacgccgttatatcttagcacctaaaggtttgtctgcaggcgatacaatccaatctggagcgaatgcgccaattaaagttggtaatgcgttaccaatgcgtaatattccagttggttcgactgtacataacgttgaattaaaaccaggtaaaggcggtcaaatcgcgcgttcagctggtgcttatgtacaaattatcgctcgtgaaggtaactatgttactttacgtcttcgctcaggcgaaatgcgtaaagttttagctgagtgtacagcgaccattggtgaagttggtaactcagaacacatgcttcgcgtattgggtaaagcaggtgctaaccgctggagaggcattcgcccaacagttcgtggtacagcaatgaacccagtagatcacccacacggtggtggtgaaggtcgtaactttggtaaacacccagtcacaccttggggcgttcaaactaaaggtaagaaaactcgccataacaaacgtactgataaattcatcgtacgtcgtcgtggtaaataa

SEQ ID NO: 31103 - DNA, 303 bp, Pasteurella multocida
atgattcaacaagaacgtttgctaaaagtgttaaaagcaccacatgtctctgaaaaagcaacaaataacgctgagaagtctaacacaatcgttttcaaagtggctttagatgcaaataaagttgaaattgctaacgctgttgagcaattatttgaagtgaaagtggattctgttcgcactgttgtggtgaaaggtaaaactaaacgccacggtgcaagaatgggacgtcgcagtgactggaaaaaagcttatgtaactcttcaagaaggtcaatcacttgacttcgttgaaggtgcagagtaa

SEQ ID NO: 31104 - DNA, 603 bp, Pasteurella multocida
atggaattacaagttgtaggtgcaaacgcactaactgtttctgaaactaccttcggacgtgagttcaacgaagcattgattcaccaagttgttgttgcttatgcagcaggtgcccgtcaaggttctcgtgcgcaaaaaactcgtgctgaagtgtctggttcaggtaaaaaaccttggcgtcaaaaaggtactggtcgtgctcgttcaggtgatatcaaatcaccaatctggcgttcaggtggtgtcactttcgcagcgaaaccacaagatcacagccaaaaagtgaacaagaaaatgtaccgtggtgcaatcaaaagcattctttctgaacttgttcgtcaagaccgtttaatcgtggttgagaagttcgaagttgaagcgccaaaaacgaaagttttagtacaaaaattaaaagaattagcactcgaagatgtgttaattatcacagcaagcttagatgaaaatctattcttagccgcacgtaacctttacaaagtagatgtacgtgatgtgcaaggtatcgatccagtcagcctaatcgcatttgataaagttgttgtcactgttgatgctgtgaaacaaattgaggagatgttagcatga

SEQ ID NO: 31105 - DNA, 630 bp, Pasteurella multocida
atgattggtttagtcggtcgcaaagttggtatgactcgtatcttcaatgaagatggcgtttcaattccagttaccgttatcgaaatcgaagccaaccgtgttactcaagttaaaactgtagaaacagatggctattctgcaattcaagttactactggctctaaaaaagcaagtcgtgtaactaagccagaagctggtcatttcgtgaaagcaggtgttgaagctggtcgcggtttatgggaatttcgtactactgaaggtgaagaattcactttaggtcaagaaattaatgttgacatcttcgctgatgttaaaaaagttgatgttactggtacatctaaaggtaaaggttttgctggcggtgttaaacgctggaacttccgtactcaagatgctactcacggtaactctttatcacatcgtgtacttggttcgattggtcaaaaccaaacaccaggtcgtgtgtttaaaggtaaaaaaatggcaggacacttaggtaatgagcgtgtaaccgttcaatcacttgaagttgttcgtgttgatgctgagcgtaaattactattagtgaaaggtgctgttccaggcgcaactaatggtgatgttatcgttaaaccagcagttaaagcataa

SEQ ID NO: 31106 - DNA, 312 bp, Pasteurella multocida
atgcagaaccaaagaatccgtatccgcttaaaagcatttgatcatcgtttgattgatcaatctactgcggagatcgtagaaacagctaaacgtactggtgcacaagttcgtggtccaattccgttaccaactcgtaaagagcgtttcactgtgttgatttctccacacgtgaacaaagacgcgcgtgatcaatacgaaatccgtactcacaaacgtttggttgatattgttgagccaacagaaaaaactgttgatgcattaatgcgtttagatctagctgccggcgttgacgtgcagattagcctaggttaa

SEQ ID NO: 31107 - DNA, 984 bp, Pasteurella multocida
atgatccaaaaccaaccgcacttttaccgtgggcgcttttccgttgccccaatgctcgattggaccactcgccattgtcgctatttccatcgtcaatttagccaacacgccttgctctataccgaaatggtgacaacaggggcgattattcatgctaagtatgaccaccttgaattttcgccagcagaaaaccccgtagcattacaattaggcggaagcgatcctacccaactcgcccaatgtgcaaaaatcgcacaacagcgaggctatacagaaatcaatctcaatgttggttgcccttctgatcgggtgcaaaatggcatgttcggtgcctgtttaatggcaaaagccgatttagtcgccgactgtgtcagtgcgatgcaaacggaagtcagcattcccgtcacggtaaaaactcgcattggtattgatgatctcgacagctatgaattcctgtgtgagtttgtgcagaaagtacatgaagctggttgccaagaatttatcattcacgcccgcaaagcgtggctttctggcttaagcccgaaagaaaaccgcgaaattccccccttagattatgaacgcgtgtatcaactcaaacgagatttcccacacttactcatgagcattaatggtggcattaaaacccttgaagagatgcaacaacatttgcagtatatggacggcgtcatggtggggcgtgaagcctatcaaaatccgagcttattgggctatattgatcaagccttatttgatccaacctgtcctgtggttaccccaagagaagctgtagaaaaaatgtttccttatatcgaacaacaactgagccaaggcgtgtatttaaatcatgtggttcgccatatgcttggtgcattccaaagctgtaaaggggcacgccaatggcgccgttatttaagtgaaaatgcgcacaaagccggagctggcttggaagtggtcgaaaaagcgttaagttttgtagcaagttaa

SEQ ID NO: 31108 - DNA, 1809 bp, Pasteurella multocida
atgactactcaaaacaaaaaaattgccattactgatgttgtgttacgtgacgctcatcaatctctctttgccacgcgtatgcgccttgatgacatgttgcctattgcacatgagttagatcaaattggctattggtcgcttgaagcctgggggggcgcgacttttgatgcgtgtattcgttttttaggggaagatccttgggtacgtttacgtgaattaaaacaagccatgccaaatacgccgttacaaatgctgttgcgcggtcaaaacctattaggttatcgtcattatgcggatgacgtcgtggatcgctttgtagaacgctccgtgaaaaatgggatgtccgttttccgtgtcttcgatgccatgaacgacccgcgtaatatgaaacaagccttgcaagccgtaaaacgtaacggtggacatgcccaagggacattaagttataccactagcccagtacataacttagaaacctggttagagattactgagcaattattagaaatcggtgtcgattccgtggtgattaaagatatgtccgggattctaaccccagtagaagcctacaaattagtcagtgaaattaaaaaacgctacgatgttcaactccatttacattgccacgccacgacgggaatggcagaaatggcgctattaaaagccgtagaagcgggtattgatggcattgacacctccatttcctctatgagtggcacttatggtcacccgtcaactgaagccttagtcgcgactttacaaggtacacaatatgacaccggcttagatatccataaattagaacatattgctgcctacttccgcgaagtacgtaaaaaatacgctaaatttgaaggtcaattacgtggttcagatagccgtatcttagttgcacaagtaccaggtgggatgttgacgaaccttgaaagccagctcaaacaacaaaatgcgtcggataaattagatgaggtattgaaagaaattccacgtgtgcgtgaagatttaggctttattccattagttacccctacctcacaaattgtcggtacgcaggccgtgattaacgtgttaatgggtgagcgttataaaaccattgctaaagaaacagcgggtattttgaaaggtgagtacggtcgtacacctgccccggtcaatgctgaattacaagccaaagtgttagacggtggacaacctatcactgatcgtccagccgatcatattgcaccagaaatggaaaaattagccacagaaatcaaacaacaagccaaagaaaaaggcattaaactggctgaaaatgaaattgatgatgtattgattgtggcgttattcccacaaatcggttggaaattcttggaaaatcgtggcaacccagatgcctttgaacctgcaccaaccttagaaaccgcaaaaccggcagaaaaaccagctgcacctgtggcgaaaacaccagtttcaggacctgccgtttacaccgtggaattagagggcaaatcctttgtagtgaaagtcacagacgggggagaagtcggtgagattgcccctgcagcacaaccaactgcacaaacagcgccacaacctgccccggcatctacgagtggtacacctgtcagcgccccaatgtctggcaatatctggaaagtggtagcaaaagaagggcaaaaagtggcagaaggggatgtgttactcattttagaagccatgaaaatggaaactgaaattcgtgcaagccaagcaggtaccgtacaaagtattcatgtaaaagccggcgatactgttgccgttggcgataccttaatgacattaagctaa

SEQ ID NO: 31109 - DNA, 1899 bp, Pasteurella multocida
atgttttctagttctctcctctcaaaagacaataaaagtgcggtggattttcacgaaattccgttaaaacagaccgcacttgacgtgttgcatgctgtttttggttaccaaagtttccgtaaagggcaagaggaagtcattgatgcgacgttaatgggcaaagatagcctagtgattatggcgacggggaatggcaaatccttatgctaccaaattccagccctctgttttgaggggcttaccttggtcatatcaccactgatctcgttaatgaaagatcaagtggaccagctgcttgcgaatggaattgaagccgattatctcaactctagccaaacctttactgagcaacaacaagtacaaaataaactgatgtctggcaccttaaaattactttatgtgtcaccagaaaaagtgatgacaaccagctttttccatttgatctcacactgcaaagtgagttttgtggccattgatgaggctcattgtatttcacaatgggggcatgatttccgtccagaatatacccaacttggtggcttaaaaagctgttttccacacgcccccataatggcgctcacggcgactgccgatcatgccacacgacaagatattttacgccacttaaacttacaatccccgcatgtgtatattggcagttttgatcgcccgaatatccgctatactttagtggaaaaatttaaacccatggagcaactttgtcgttttgttttggggcaaaaaggcaaaagtggcattatctactgtaatagccgtagcaaagtagaacgtattgcagaaagtttgcgcaataaaggggtatccgcacaagcctaccatgcagggctagaaacttcacaacgtgagcaagttcaacgcgcctttcaacgcgataatgtccaagttgtagttgcgactatcgcatttggtatggggattaataaatccaatgtgcgctttgttgtgcattttgatttaccacgcagtattgagtcttactatcaagaaacaggacgagcgggacgtgatgatttgcctgcggaagcggttttattttatgaacctgcagattacgcttggctacataaaatcctattagagaaacccgaatcaccgcagcgccaaatcgaagcattgaaattacaagcgattggcgaatttgccgaaagtcaaacctgccgacgtttagtcttactcaattattttggtgaacaccaacaaaaaccttgtcagaactgtgatatttgccttgatccacctaaacaatatgatggcttaattgatgcacaaaaagtcatgtcaaccatttaccgcattggtcagcgttttggtgtgcattatgtgattgccgtcctacgaggtttaagtaatcaaaaaatcaaagacaatcaacacgagcaattaagcgtttatggcattggtaaagacaaaagcaaagaacattggcaatctgttatccgtcaactcattcatttaggttttatcaaacaagtgtttgaccattttaatgccacgttgcaattaaccgaaaatgccaaaccgattttacgcggtgagcaacctttatcccttgcgatgccacgtatttcatcacttacctccgtggtagcgcctcaacgctacgccatagcacaatatgacaaagacttatttgctcgactccgcttcttacgtaaacaaatcgcagacaaggaaaatatccctgcttatattgtgtttaatgatgcgaccttacaagaaatggcacaatatcaacccaccaccaaagcggaaatgttagccatcaatggcgtaggggcaactaagtttgaacgctttgcacaaccctttatgcagattattcaacaacataaaaaagtcctcacacaacatgagccgccactctctttagagtcatga

SEQ ID NO: 31110 - DNA, 795 bp, Pasteurella multocida
atgccattagcggtttggactgacatccgtcaggaagcaaaaaccttagcagaaaatgagccaattttggccagtttttttcacgcaacgattttgaaacatcataatcttggtaatgcattaagctatattttagccaacaaattggcaaatacgattatgcccgccattgctttgcgagaaattattgaggaagcttatcaggcggatcctgacatcattgccagtgctgcctgtgatattcgtgcggtgcgtcaacgcgatcccgcggtggaattatattctacgccactgttatatttaaaaggttttcatgccttgcaaagttatcggattacccattatttatggcaacaagagcggaaagccttagctgtttatttacaaaaccaaatctcggtcgcctttgatgtggatatccatcctgcggctaaaattggttgtggcattatgtttgaccatgcgacaggcatcgtggtgggagaaacctcggtgattgaaaatgatgtgtcgattttacaaggcgtcaccttgggggggacgggtaaagagtgtggcgatcgtcatcctaaagtacgcgaaggtgtaatgattggtgctggggcgaaaatcttgggtaacattgaagtgggacgttatgccaaaattggggcaaactcggttgttttacaacctgtccctgaatataccaccgcagcgggggtaccggcacgtgtgattgctcgcgatcaagcggcgaaacccgcttttgatatgaaccaatattttaatgacgatcatgcctctaaggtgtaa

SEQ ID NO: 31111 - DNA, 1014 bp, Pasteurella multocida
atgaatacgactgtagccacttctccaattacggtacttggtgcaggttcttatggtaccgcattagcgattgcgttttctcgaaatggtttccctacttatctttggggacatgatcctgttcacatgcaacgcttaagtgaagaacgtcagaataacgcctttttgccgaatattgcttttccagatgccttgcatattgaatttgatttagccagtgccttaagccaatcacgtgatctgttaattgtggtgccaagtcatgtatttggggaagtgattgataaaattaagccttatttacgccctgatcatcgcattgcttgggcgacgaaagggttagagcgcaatacgggacgtttattgcaagaagtgattgaggaaaagctcggtacacaacacccgttagcggtattatctggaccgacatttgcgaaagagcttgctgccggtttaccgaccgcaattgccctagcctccaataatgaacaatttgctttggaattccaagcacgtatccattgcagtaaacatttcagagtttatattaatcaagatatgatcggtgtgcagctaggtggtgcgattaaaaatgtgattgcgatcagtgctgggatgtcggatggtatgggctttggtgctaatgcacgaacagccttgattactcgtggtattgcggaaattagccgtttaggcgcctcattaggcgcgaatccaaatacttttatgggcatgtctggcttaggtgatttagtgttaacctgtactgacgatcaatcgcgtaaccgccgatttggtattatgctcggtcagggcttttcagcccaaacagcaatggacaatatcgggcaagtggtagaaggcttttataacgcgaaagaagcctatttattagcgcaacgtcaagggatagaaatgccgatcacagagcaagtttatcaagttttattctgtggtaaaaatgcacaagacgtggcggcaagcctactcggacgtgagcgtaaaggggaataa

SEQ ID NO: 31112 - DNA, 441 bp, Pasteurella multocida
atgcaagaatttattccaatggcaaaagcctttgcccaaaaccatactttaatggtacttgcgtgggtaatggtcttttttatggttatttatacttttgtgaaagatttcacctcaaaagtcaaagtagtgacaaatgcggaagcggtaagcttgatgaataatgaagatgccgttgtggtggatttacgctctattgatgagtttgagcgtggtcatattattaacagtttgaatattttacccgcagaaatcaaaaagaataatgtcggtaaaattcatcatcataaagacacgcctgtgattctggcttgtgcaaccggtatgagtgccggtgcgtctgccgagttattaagtaaacaaggatttaaccgtgtttataccttaaaagaaggcattacaggttggcgttctgcaaatttacctttaattaaaaaatag

SEQ ID NO: 31113 - DNA, 1281 bp, Pasteurella multocida
atgaatcttcaacgcttgattgataacgccagacaagatatgtcggctccgctcgtacatcatcatatagatgagagctttgagagttgtattaaatgtacggcatgcacggcagtttgtccggtttcgcgtcaaaatcccgtttacccgggaccgaaacaatcgggaccggatggcgaacgtttgcggctcaaaagtgcagaactctatgatgaagcactcaaatattgtacgaattgtaaacgctgtgaagttgcctgtccgtccgatgtaaaaattggtgatttaattgtacgtgccagaaataacaatcttgaacggcaaaataagcctttaatgcataagttgcgtgatgcagtattaagccataccgatatcatgggcaaaatgaacaccccatttgcaccgattgtcaacaccattaccggcttaaaagccacgcgctttttgttagaaaaaaccttaaatgtcagtaaacatcgtacgttaccaaaatattcctttggttcattccgaggctggtatttgaaaaaagccgctgaacaacagcagctttataaagacaaaattgcgtattatcacggctgttatgtgaattataacaacccacaattaggcaaagaattaattcaggtatttaatgcgttagatattggtgtgatgttgttggaaaaagagaaatgctgtggtttacctttatcggttaatggtttcccgcaacgtgccaaaaaacaagcggagtttaaccttaaataccttggtaaaaccattgatgaacggggtttagaagtcgtaggcacatcctcaagctgtaccatgaacctacgtgatgaatatcatcatattttaggaatggataaccaaaaagtgcgaccgcatgttcatattgtgacccgttatctttatcagcttattcaacaaggacgccaattcccgttcaaaacgttaccgcttcggattgcgtatcatactgcgtgccatgtggaaaaagccggctgggcaccgtatacgttggcggtgttgaaacagattccggggattgagattgttatgttaccgtcacaatgttgtggtattgcaggaacctacggctttaaatcagaacattatgatgtcgcacaagccattggtaatccgttattcgatctgattaatcaaggtggctttgattatattgtttcggagtgtgaaacctgtaaatggcaaattgacatgtcaaccaatgtgacttgcttacatccaatcagtttattagctatggcattagatgcgaacaaatag

SEQ ID NO: 31114 - DNA, 789 bp, Pasteurella multocida
atggataaatcattaaaagccgcctgtattggcgaattcttaggtaccgcattacttatcttctttggtgtaggttgtgtcgcggcattaaaagtcgcgggagcaaactttggacagtgggaaatcagtatcatgtgggggttaggggtcgcaatcgcggtttacgcttccgccggtctttctggtgcacatctcaatcccgccgtcacgatcgcgttatggcagtttgcctgttttgacggtaaaaaagtcgttccttacatcttagcacaacttgcaggcgccttctgttccgctgctttagtgtactttttataccataaccttttcattgatgttgaaatcgcccagcaaatggtacgtggtacgccggagagtctttcactcgccagcaccttctcaacctacccccatccaagtattagcgtgttacacgcctttatcgtggaatttgtgattacggctgtactcatggcattaattctagccctcacggatgatggtaatgggttaccaagaggccccctcgcaccattattaattggctttctcattgctatcattggcggtgcgatgggacctttaactggctttgccatgaaccccgcgcgcgatttgggacccaaagtctttgcttcacttgccggctggggagaaatcgccctgacagggggaagagaaataccttatattttcatcccggttatcgccccaatcctgggtgggctttttggtggttggatttataccaaattcgtcggcaaaaacttaccttgtcattgcgaataa

SEQ ID NO: 31115 - DNA, 1509 bp, Pasteurella multocida
atgacggataaaaaatatatcattgccctagatcaaggtacaacaagttcaagagcggttcttcttgatcacgatgccaatattgttgaaattgcccaacgtgaatttacgcaaatttatccacaggctggctgggttgaacataatcccatggagatttgggcaacacaaagttccaccttaaatgaagtggtcgcgaaagccggtatcactgctgatcaaatcgcggcaattgggatcactaatcagcgtgaaaccacgattgtatgggaaaaagaaaccggtaagccaatttacaatgcgattgtgtggcaatgccggcgtacgactgagataaccgataaactgaaagcagatggtcacgaagactatatacgtcaaacgacaggcttagtggtagatccttacttctctggaaccaaaattaaatggattttggataacgtggaaggggcacgggaacaagcagaacgtggcgaattactctttggtacggtggatacttggctagtatggaaattaactcaagggcgtgcacatgtcaccgattacactaacgcctcgcggacgatgttatttaatattcatactctgcaatgggacgataacatgctggcgattttaggtatcccacgtgctatgttgcctgaggtgcgtaattcttctgaaatatatggtcaaaccaatatcggtggcaaaggtggcgtacgtattcctgtagccggtatggcaggagatcaacaagcggccttatatggtcatctttgtgttaatgcgggacaagcgaaaaacacttatggtaccggttgtttcatgttaatgcatacgggcgacaacgccgtacaatcacaaaatggcttattaaccaccattgcctgtaatgccaaaggtgagcctgcatatgctctcgaaggctccatcttcatgggcggggcatccattcaatggctacgcgatgaactcaaaattgtgcatgatagctatgactcagaatattttgctacccgagtacctgattgtaatggtgtctatgtggtacctgcctttactggattaggtgccccttattgggatccctatgcacgcggtgccatttttgggctctcacgtggtgcaaatcgcaaccacattgtgcgcgctaccttagaatccattgcataccaaactcgcgatgtgctagaggcgatgcaatctgactcaggacaaacactgcaagcgctccgcgtggacggtggagcaacggaaaataatttcttaatgcagttccaagcggatatcctcgccaccaaagtagaaagaccaaaagtgaaagaagtcacggcattaggcgccgcctatcttgcaggtcttgcgacgggtttctggaaagatctcagtgaattgcgtgataaagccagcatcgagaaaacttttgttcccgatggagatgaagccaaacgcactcgccgttataaaggctggaaaaaagcagtcaaacgtgcgctcgaatgggaaaaagaggaagagtag
